United States Patent Application Publication US 2003/0077808 A1 - sequence listing, part 2

SEQ ID NO: 1351 - DNA, 467 bp, Homo sapiens
  SITE (438): n equals a,t,g, or c
  SITE (451): n equals a,t,g, or c
  SITE (452): n equals a,t,g, or c
  SITE (466): n equals a,t,g, or c
gagaaaatgatgatggaatggaagaaagagaactaaaggagagccatcaaatcagacaaaagctatctgtctctttggagagacaacctctggcctcatccactgcattacattcttagagcttgtagaagagcggttattaaatattttcaaggctacagactccttcaagaattgataaaagctatagaacttctttccacaaaaatgcatgkattgsacactgaagtctgcatgcagtccttgaggggaggacctctgaggcctatctctgagtctgcagtgtccatgagcccatgtcaggaattcctgcaacacacattatgtgattttaaaatacttaaatgaaagttttttccagtgtcctccagaagcaaattccattaaacaagccaatgtgtataatattaccctaaaaaaaaaaaaaaaaaacctcgngggggggcccggnncccaattcgccctnt

SEQ ID NO: 1352 - DNA, 373 bp, Homo sapiens
gagtccctgacctgagctgtcaatgaaggctgagtactgaactcctacccctacctggtaataatgaggtaatgttctaccaccccactttccctgctagagtggtatcagagaaatccagctaaaacaaagtttaaataagattcagtctcgtaacataatgcttcaaaaatccccatttcaatagtaaatcacttgtcatgccaagaactaggaagaatcttaaactgaatgaaaaaagatgatatcaactcctagatgacaagagagtttagaattatctggaaaatattgtaaatgagccaccataaagatgtttagatgagcaattacaaacatgcctgaaataaattttaaaaaatagaaagtttct

SEQ ID NO: 1353 - DNA, 633 bp, Homo sapiens
tttttttttttaagtttataccacatgaggtaatcagcctttatttttagattattctgacttcagtggacaatatattggaggtgtgcaaaagctgaggtaaagagagacacagtaggaggctctttctcagtccagcaggaagaggttggtgccttggaccagatctctccatgggcactgtcagggtttgaactctggctgatgagggtggctagcaggagaaaacagaccttttagcaacaggaatccctgtgttctcttctctgctccctcctgctgcagaagatggggtccctcgcacggcacggtccatgtccctcacgctgggaaaggtatgcatgttcaaggaataccagggctccttggagcccaactgttgaccaaaccagggctcwcagtgcggccttggtcgccagcggggcgctccactttccgctccggagatggcaccaggagagatgggagtctgccaggctgtttccatggccacctcatgaagcccctgctccgggagagtgacaggcgagactctccttcgccgccacctctcgtctcagatgaccatctssgykcgaaagccctcaggagctcggagcgcgggtcggtagggcgctgcagaggaaggttggc

SEQ ID NO: 1354 - DNA, 830 bp, Homo sapiens
gattgcgaggaatgcaaaaaaccaattgaatctgattctaaggatctttgttacaaagaccggcactggcatgaaggatgcttcaagtgcaccaaatgcaatcactctttggtggaaaagccttttgctgccaaggatgagcgcctgctgtgcacggagtgctattctaatgagtgctcctccaagtgcttccactgcaagaggaccatcatgcctggttcccgcaaaatggaatttaagggaaactactggcatgawacctgttytgtgtgtgagaattgccgacaacctatagsgacaaagcctttgatctccaaagagagtggcaattattgtgtgccatgttktgagaaggagtttgctcactactgcaacttttgtaagaaggtgataacttcaggtgggataacattttgtgaccagctatggcataaagagtgktttctgtgtagtggctgtaggaaagatctctgtgaagaacagttcatgtccagagacgactatccattctgcrtggactgctacaaccatctttatgccaacaagtgtgtagcctgttccaaacccattagtggtctcacaggtgccaagtttatctgctttcaagacagccagtggcatagcgaatgctttaactgcgggaaatgctctgtctccttggtgggtaaaggcttcctgacccagaacaaggaaatcttctgccaaaaatgtggctccggaatggacactgacatctaggagacagtccttgcccacctaaaatccattttgccttcgttgtcactaaagccagaactcagaaaaaaaaaaacggcacgagcggcacgagc

SEQ ID NO: 1355 - DNA, 458 bp, Homo sapiens
  SITE (302): n equals a,t,g, or c
  SITE (389): n equals a,t,g, or c
  SITE (406): n equals a,t,g, or c
  SITE (411): n equals a,t,g, or c
gatttttttttcccttttctcttaggagcaagctgccttcaggaatcacacattctgttcccttcatccatgcgttatttttcaaagttcagtgtgagtatggcctttggttgaaagattaatttctctaatcctggggtttagtattaggaagttcacttgcctgctgaataagtcaattctctattatttatttcatcagtaatagaggggatgtttattctctatatgtgatggctttggtcttatttctcaattgcttcatattatttaatgagcttctggatggcataacatctggngcattagccaaaatcatcaagaaataagacaacaaaaaggaggtggatgggagatcaaacacacaaagggactgagacttttagagncagctggataagagctntaaanttttatgggctttgggagcacaaaccatgggaattcttgaccttggc

SEQ ID NO: 1356 - DNA, 321 bp, Homo sapiens
  SITE (316): n equals a,t,g, or c
  SITE (321): n equals a,t,g, or c
gccgccgcggagccctcatccctaacggtgaaagtctcttgaagcggtctccgaatgtggagctctccttcccacagcgatcagaaggctcaaatgtctttagtggtagaaagacaggaacattgtttctcacttcataccgggtgattttcataacttcatgctccatcagtgatcccatgttgtcttttatgatgccatttgatctgatgacgaacctcactgttgaacaaccagtatttgctgcaaacttcattaagggaactattcaggcagctycatatggkggctgggaaaggacaagctacttttaaantaagn

SEQ ID NO: 1357 - DNA, 341 bp, Homo sapiens
  SITE (50): n equals a,t,g, or c
  SITE (277): n equals a,t,g, or c
  SITE (288): n equals a,t,g, or c
ggtcggcattattttaatgaaattggacagtatgacaaggatatggattntaggggaagagaaaattwggaactttcactaaggatctggatgtgtggaggccaactctttataatcccctgctctcgagtaggacatatcagtaagaaacaaactggaaaaccttyctacaatcatcagtgctatgacacataactacctaagactggtgcacgtttggctggatgaatataaggagcagttttttcttcsaaagcctggtcttgaaatatgtcanctatggtaaancattcgggagcgtgttgagttaagggaacggcttgggttgcaagtcatttcaa

SEQ ID NO: 1358 - DNA, 472 bp, Homo sapiens
  SITE (306): n equals a,t,g, or c
  SITE (325): n equals a,t,g, or c
  SITE (385): n equals a,t,g, or c
  SITE (408): n equals a,t,g, or c
ggtcagcacctcttccaatctccgccgggagggcgaccgcacgctcctttcccgttcggaagattccttctttgtgtcggcgggggcagtccttccggagctggaaaccgagggaccccggcaggcgtttccagctggactgtcgccatcttgtggcaggactgggtggccacactggcccaacggccagatccgcatgcccacaactttcttgggttccaaacgtacctttccttctttccccaacctgctaggaactggattttaaaatcacgttccctgaagatacctcggatctgtcctctnccaattgcacgggcgttgncttctaaaagctaccctgctctttggagagtccagtgcaagcctcactgaggggctctgnggtaaatccatcaaaaccaactngtacgaaggcgtcaaatcctcaccaattttccatgagacaaaccaatgattaaagagcagagag

SEQ ID NO: 1359 - DNA, 746 bp, Homo sapiens
  SITE (378): n equals a,t,g, or c
  SITE (613): n equals a,t,g, or c
  SITE (624): n equals a,t,g, or c
  SITE (681): n equals a,t,g, or c
  SITE (704): n equals a,t,g, or c
  SITE (708): n equals a,t,g, or c
ggtggcgctgaggaatttggaaacctcaaatggctaaactattacaacctccgcccaagttcctgccctcagagtggcacattgctaacaagaaccagtaccacagagcagacgctcaaaggtcccgatcagaacgcctggtcgcagaaagccagaggcttgtggatgaaattgaaaagaccacaagaaaatctcaaagcgatgtgaacaagaaactagaacagagactcgaggaagtccagttctggaagaaggagttagatgacaaacttgagcagcttgtgaatgtaactgatgatctactcatatataagatcagattggaaaaagccctggagaccttgaaagagcccttgcacatcaytgagacatgcctgncatacagggagaagcgcattggcattgacctggtgcacgacacartggagcatgagctgataaaggaggctgagatcatccagggcattatggctctgctgacccgtaccttggaggaggcttccgagcagattcggatgaaccgstctgccaagtacaatcttgagaaggatttgaaggacaagtttgkggccctgaccatagatgatatctgcttctcgctcaacaacaactnccaaacatcanatattctgagaacgccctgaggattgagccaaacttcgtgagtctgggaagactggntggactttttccagcaccaatgngganaaagctgacagcaacgggacacttccttgatcttaaag

SEQ ID NO: 1360 - DNA, 977 bp, Homo sapiens
  SITE (713): n equals a,t,g, or c
  SITE (822): n equals a,t,g, or c
  SITE (933): n equals a,t,g, or c
  SITE (969): n equals a,t,g, or c
  SITE (972): n equals a,t,g, or c
  SITE (975): n equals a,t,g, or c
ggaaatttgaagccatgttggttcagcaaaataggtcagacaagagctcttgcgatgaatgcaaagagaagaaacaacagatcgatactgtgtttggggagaaaagtgtaattacgctgtcatccatattcaccaaagacttagtagagaaacacaacctcccttggtctctgggaggaaaaacccagattgaacccgaaaacaaaattacattgtgcaagatccacacaaaatcaccaaaatgtcatggcactggggttcagaacgaaggaaaacaaccctcagaaacacccactttatctgatgagaagcagtggcatgatgtcagtgtttacctgggcctgaccaactgtccaagttcaaaacatccagaaaagctggatgtagaatgtcaagatcagatggaaaggtccgaaatctcatgctgccagaaaaatgaagcctgtctgggcgaaagtggcatgtgtgactccaagtgctgccacccgagtaacttcataattgaagccccaggccacatgtctgacgtggagtggatgagtattttcaagccttccaaaatgcagagaattgtccgcctcaaatctgggtgcacctgttcagaaagcatctgtggcacamaacatgactccccggcaagtgagctaattgccatccaagattcccactctttgggttcttcaaaatctgccttgagagaagatgagacggantcctcttccaataaaaagaactcacctacgagtttgttaatctacaaagatgcaccagcattcaatgaaaaggcttcaattgtgttaccctcccaggatgatttctcgnccacgagcaarctycagcgtttgctgcggaatctcgtcagatggtgacggacctggagctgagcacactgctgccatcarccatgagaatctcactggagtgcacaaattntggtggggggctgacatgtgtggtggcatgcatgcntgnggngg

SEQ ID NO: 1361 - DNA, 610 bp, Homo sapiens
gttgcggcagcgttagccaggatctgaggcaattctgggtggctgaagggggaacgatcagtgacccgcgagccgccgacttcttgttcagctgtgatgcctcgcacccagacacgctgagaatatatcagagccttgattacatagaagataatgctacagtttttcatgcctactatctctctgcggtagctaatgccaaaataaaaaactcggtggctttgggtcatttcattcttcctcctgcgtgcctgcaaaaagaaataagaagaaaaattggtagttttatttgggaacaagaccaacattttctgatagaaaagcatgatgaagtaacaccaaatgaaataaagacccttagggaaaacagtgaactagcaacagagcacaaaaaagaattatccaaaagcccagaaaagcattttataagaactccagttgtagaaaagcagatgtacttccctctacagaattacccaggtaacaacatggtaacagggtatatatcaattgatgccatgaaagaaattccttggggagctacatgacttcatttctggaacctaaggatatttgggcatatcatgttcaaaatggaaattaatatgtc

SEQ ID NO: 1362 - DNA, 169 bp, Homo sapiens
  SITE (157): n equals a,t,g, or c
gctcgtgccgctcgtgccgtcagcttccgcracccagccgacgtcttcagggagttcttcggcggccaggacccattctcctttracctcttgggaaacccgctggagaatattttggggggrtcagaggaactgctggggaagcagaagcagagcnactgcacccctt

SEQ ID NO: 1363 - DNA, 407 bp, Homo sapiens
  SITE (384): n equals a,t,g, or c
  SITE (386): n equals a,t,g, or c
  SITE (389): n equals a,t,g, or c
gtccactccaagtgtgtacagggtctgctggcagcactgggccagggccccgggcatgtcctcccaagaattcatggcagtgagtctttggcgagccaccctccagatgaatttcttagtggagggagagtctgactctggaagaatagtttgkgacttgrgggatgttttcatcccttttatttctgctcacccttgtcagttgctctgttctcctctcctgcgcagtctacctgagtgaaatcactctgcctattatttcccatgccctcaggtcccatggcatgtgawtacctctttgctgattgcaaggctgtggagttcctaatcaccttggtctcarcctcttatttcctgctgagaaatggaaggaagtgatggggntnctnctgctcttgggaaaagct

SEQ ID NO: 1364 - DNA, 644 bp, Homo sapiens
  SITE (451): n equals a,t,g, or c
  SITE (564): n equals a,t,g, or c
  SITE (583): n equals a,t,g, or c
  SITE (595): n equals a,t,g, or c
  SITE (599): n equals a,t,g, or c
ggttttacgcaacatgatggttacagggcagctgggtctaacagaaatccacaaaaatcctcctaccatccacaggaagtcatgcatcttcagagattgaaaatgtcagggaagtccagcgggcaggaattctcttcttccgaatcatgctgctcgagctacaggaaagcatccaactactcaattccatggaatttgtgtcactgttgctctatgaccatactcttgtaacagagccaaattctcctcaagacagcaaatctatggagttggaagccaacgtgaaactagtgcgtgacatcctgaaggcggttatcttgttctttcatccagagttggaattttcaagtgactttggaagktgggataagtgtaaattttatgktaacaaatatttagtcaacaatatttgkgcctttgatccaactgccaagcatgtggaagttaatgnacagcttattgatgaatatatcagagatcattcccaactgaagtatggaaatttggtaatggtgcattgacattataccactggatcacatcttgttagctctcatgaagatnaccaaacacttaatagtgnattacacctccnttgncctccaagactgcaattatatgtatgcaaaaatgccaggggaagg

SEQ ID NO: 1365 - DNA, 718 bp, Homo sapiens
  SITE (328): n equals a,t,g, or c
  SITE (480): n equals a,t,g, or c
  SITE (503): n equals a,t,g, or c
  SITE (505): n equals a,t,g, or c
  SITE (573): n equals a,t,g, or c
  SITE (610): n equals a,t,g, or c
ggacaaaatctgggggctgaacaatcattgtgtactgtaattatgccaataacaacgggtttgagaggacggtgaaaatgacatcaacttcctcagcaacttaattatcttacattggaatcagagactcatatcaccatggaaactcagaatcacagaaccatagaatctttgctgctaagagcacccacagagkacaatttctcttcgtaacttgaagttgtaaaggatccttgcctgaaaatggacactgttaactcattttatctcttgattagaaatacagaggaatttgttgcacacaaaggataagcatgctgaaatttgntgatcactggtatttaaagtgaaataattggtatatgttgctgattaatttttccttttatcactagtaattttttgccataaagtctatttcatatgtataattatagtaaaactaggtttcttttgatcagggtcaagaataatatgtgntggtatatttgcatgtatttggngnaaacattattttaaaaattcattctaaaaatctttggctttttcacaatcgcttagtgaaattctaanatatttgggttggaaaactacatttttaaaggttggnctttattcttgggccctgttgggggtcctttttcaccttaatttgaattggcctggattttaaaaaattaaatccatggtctctattggctttttaaaattacattcc

SEQ ID NO: 1366 - DNA, 503 bp, Homo sapiens
  SITE (463): n equals a,t,g, or c
  SITE (484): n equals a,t,g, or c
  SITE (493): n equals a,t,g, or c
  SITE (503): n equals a,t,g, or c
aaggtatttttggagytaatggagtcagaaggacctccagagtcagagagttcagaatttttctcacagcaagaagaggaaaatgaagaagaagaagcccaagaaccagaggaaacaggccctaagaacccccttttacaacctgctctcacaggggatgtasagggtttgcagaasatatttgaggatcctgagaatcctcatcatgaacaggscatgcagcttctcttagaagaagacatcgttgggagaaatttgttgtatgcagcttgcatggctgggcaaagtgacgtgattagagctttggcaaaatatggtgtgaatctgaatgaaaaaaccaccagagggtacacactcttacattgtgctgcagcctggggtcgtttggaaactttgaaagcactggtagaactggatgttgatataagaagctttgaactttcgggaagaaagggctcgaganggtgctgctagatattctcanactgagtgngtgaaatccn

SEQ ID NO: 1367 - DNA, 1363 bp, Homo sapiens
  SITE (1278): n equals a,t,g, or c
  SITE (1304): n equals a,t,g, or c
  SITE (1316): n equals a,t,g, or c
  SITE (1354): n equals a,t,g, or c
  SITE (1361): n equals a,t,g, or c
gcggcacgagccgggtcctgcaggggcgacgcgaggcctcttttgaaagatgcggccctgaccctgtgaacctcgcgcagagcggcctgaagcgagaggttgaggctgggaggtgggagcaacggcggcggcggccgcctgcgagcccccggcctgaggcgcagcagcagctgcccgtcttcccacatagagggcaggaaggacaactttggtgagaaaatggctagcaacaatcattggtttcagagttcgcaggtccccagctttgcccagatgctgaaaaagaacctgccagttcaaccagcgacaaagacgataactacacccacaggatggtcctcagaaagttacggcctgtccaagatggcatccaaggttacgcaagtaacgggtaattttccagagccgttgctttccaagaatctttcatctatttcaaatcctgtccttcctccaaaaaaaatacctaaggaatttataatgaaatacaaacgtggagagataaatcctgtgtcagccttgcaccagtttgcacaaatgcagcgagttcagcttgaccttaaggaaactgtgacaacaggtaatgttatgggaccatattttgccttttgtgctgtggtggatggtattcagtacaagactgkactgggacaaaataaaaaggagtctagatccaatgcagcaaaattagctcttgaatgagcttctacaactggatgaacctgaaccacgaattttagaaacatcaggtcctcctcctttccctgcagaacctgttgttttatctgaactagcatatgtttcaaaagtacattatgaagggagacatattcaatatgcaaagatttcacagatcgttaaagaaagatttaatcaactaatttctaatcgttcagaatacctgaaatatagcagttcattggctgcttttataattgaaagagctggacaacatgaggttgtagctataggcacaggtgaatacaattacagccaggacattaagccagatggaagagtattgcatgacactcatgctgttgttacagcaagaaggtctcttcttagcaaaaatcctgctatgatggaaaaatcaatattttgtacagaaccaacttctaatctactcactcttaaacagaatatcaacatttgcctttacatgaaccagttgcctaaaggatcagcccagattaagtcacagttaccgtcttaatccacattctatatctgcatttgaagccaatgaagaactctgtctccacgtggctgttgaangcaaaatttatctgactggttactgncctaaagatggnggtaataggaataagcagtatgtcctcaagtgacaaantgaccanat

SEQ ID NO: 1368 - DNA, 543 bp, Homo sapiens
gggggtctgcagggagaggcacaagttacttgcatatagcggtgataagcctaagtgaggcaaactgaagtcctcagggttttctatgtttttgttttccatgtggctaaaaattctgtgatttttgtatactactgcagaaatacagaatcaggtcttttatttcataacttactgacactggcttaatttctttgcacagktctaccctatttccaaaaagctaaagagaggaatgtgctagaccaccctccctgcctcactatgccatagtctcttttgggcacacattatattcctatccatgacaagcagccagggcagaagagctctctacatatgtgccaccttgtctccaaaacctgctgtcccctttggacagactggcccatccctgaccactgttctcccctgtcttcaattcctgatggcaacaagagagattctctgactgtttccaaggatgtcattctcagcctcacctccaagtttgattttatagaacaaccaataaatgtggtttcaccttccttgagttcaaaa

SEQ ID NO: 1369 - DNA, 574 bp, Homo sapiens
  SITE (548): n equals a,t,g, or c
  SITE (566): n equals a,t,g, or c
gcgtgggcggccggaatccgggagtccggtgacccgggctgtggtctagcataaaggcggagcccagaagaaggggcggggyatgggmkaagcctccccacctgcccccgcaaggcggcatctgctggtcctgctgctgctcctctctaccctggtgatcccctccgctgcagctcctatccatgatgctgacgcccaagagagctccttgggtctcacaggcctccagagcctactccaaggcttcagccgacttttcctgaaaggtaacctgcttcggggcatagacagcttattctctgcccccatggacttccggggcctccctgggaactaccacaaagaggagaaccaggagcaccarctggggaacaacaccytytcmagccacytcagatcgacaaggtacccaggatggaggagaaggaggccctggtacccatccagaaggccacggacagsttcacacagaaytccatycccgrgkggccttctggatcattaagctgccacggcggaggtcccaccaggatgccctggagggcagncactggctcagcgagaancgacaccg

SEQ ID NO: 1370 - DNA, 410 bp, Homo sapiens
  SITE (151): n equals a,t,g, or c
  SITE (238): n equals a,t,g, or c
aggaattcggcacgagctgtggtcccagctactggggaggctgaggcacaagaatggcttgaacctgggaggcgaaggttgcggtgagccaggatcgcgccactgtactccagcctgggcaacagagcaagacagagactccatctcaaantaaataaatagaacgctcttcaggacattwtgatgcccactgggatatgggaactcctgccatggggaggagggcgtctttaakaanggaataggccctattgagatgccagccgtagacctctaggagttgaccatcgagcctgagaaggtaaggagagggtgtaggagacccctgactctgacctccaccctctcattcctctycagggcagtcccgcactctgatggccacatctggtgccaaggaagtttctcgg

SEQ ID NO: 1371 - DNA, 557 bp, Homo sapiens
  SITE (539): n equals a,t,g, or c
ggccatcgtcccagtggtgaccagccctgccatgggaaactatagttcccacaaaaggaccaaagcacccaagcaggcccgcaagragaggccggctgacatggacaaggcctggtggaaatcgttcctcaaccacctcactcggaagaagccggctaccaggatcgtgctgattctccccctggacaagcggcagccgctggccaacgctgggcaacggattgactacgcgtccggcgctgggctgggctccccggcggcacccagattgcgcggagcgggcgaaggtagcgagcgcgarccgaggatgccggtactgctgctgctgcggcggcaagaggcgcggcggccggaaragggcggggccagggcagctytgagctggccgcggctgctctcgcgcttccggtccccggggaaggctccccgcgaagccggccccgccgaggagcagccgcgcaaacggtgccgctgccctcgcccgcagctttaaacgcttggcccggaccccgcccaataaagagtgcgtggcaaccctngamaaaaaaaaaaaaaaa

SEQ ID NO: 1372 - DNA, 621 bp, Homo sapiens
  SITE (571): n equals a,t,g, or c
gttttttttgaagaggccaacaatgtattcaagattgcaaacaattatttcacatggaacawaacacaaacaatatcactgcaaacatcattgaaacaaggttaagacaaacaaaaaacctctataatatagacgagaaaaaatgttgccacatttttttcttatgcaattagaatctgtttgtttaaaaatatatccaagcgtttaattttcaatcttcaatgtcttccattaaaactaattaggactaattctaaaagtcaaaactcaattctctttagcagaataaacaatctgtgggttaagaatcataatttgttctgaaacaactgatgattctggggagacatttattaggttttgtcactggagaaattttcaaaagcactgaatctctatgctagagatagaaaagattctagaagttaaaaataatataaatcaaacacctcatttaacagaagagtttctgactcaaagataattctaaccttaagaatcaaggcagaagtaaggagtaagaaaccaagaacttctgatccttcttcctttcaataaccccttccaaccncaccacccaaaaaaagcaaagccctcaaacttaattaagtttgattaaaa

SEQ ID NO: 1373 - DNA, 743 bp, Homo sapiens
  SITE (582): n equals a,t,g, or c
  SITE (596): n equals a,t,g, or c
  SITE (648): n equals a,t,g, or c
  SITE (671): n equals a,t,g, or c
  SITE (699): n equals a,t,g, or c
  SITE (715): n equals a,t,g, or c
gcttaaatacaaaggccgggaagggtcagaccaccatccgggtactctaaggtacataaaagagtcctccctcccccttctccttcacccccaagtgtctcccacgactgccctccccgacctctagctgaccatggcatcagaggcagaaaaaacattccatcggtttgctgcgtttggagaatcatcaagcagtggcactgaaatgaacaacaagaacttctccaagctgtgcaaagactgtggcatcatggatggcaagacagtcacctccacggacgtggacatcgtgttcagcaaagtcaaggccaagaacgcccgaaccatcacgttttcaacagtttcaaagaggcagtgaaggaactgggccagaagcgyttcaaagggaagagtccagwtgaagtcctggagaacatttatggactcatggagggcaaagacccagccaccactggcgctactaaagcaacaacagtgggtgcagtggaccgtttgacagacaccagcaagtacaccggcacccacaaggagctctttgatgagagtggcaagggcaagggcattgcgggacgggaagagatncttgacacccaagntttgggaagtgggtacaagggttctggcacctaccattagaagaccaagtanagaggagctttatctcagcctgnttagcccccctgacccttgcatggtttnaacacccaggggagcnttgggaaaaccaattaaaccatctgggg

SEQ ID NO: 1374 - DNA, 591 bp, Homo sapiens
  SITE (508): n equals a,t,g, or c
  SITE (538): n equals a,t,g, or c
  SITE (549): n equals a,t,g, or c
  SITE (563): n equals a,t,g, or c
  SITE (571): n equals a,t,g, or c
gcagtctaggagatggccaatctgaggaggcttctgaaagcagcagcccagtccctgaggacaggcccactccacccccttccccaggtggagacactccccaccaaaggccaggctcccaaacaggcccttcctcctccagagcatcctcttggggcaactgctggcagaaagactcagaaaatgaccatgtacttggagacacaaggagccctgatgccaagtccacggggacccctcatgcagagaggaaggccaccaggatgtacccagaaagktctacttctgagcaagaagargcccctttgggctcaaggactycagarcarggggccagtgaaggktatgacctacmagaggmccaggcacttcggaagtctygsccccamtgaggcartgggcaarggcaracggstttggccaaratgacttaratttctagacaagatcaaagctagaaaacaatcaccaagcttgggaactctggttttaatcatattttttctancaaaacttgggccaacgttaagtccacctngggaaaggccntaagaccaatgggnccaaaganccaagggccttgcccaaggg

SEQ ID NO: 1375 - DNA, 617 bp, Homo sapiens
gccggcgccgatgaaaccgaccaaactggagttagctaccggactgtcccgcgagcgaaagttggaaataatacctaaacctacttcttgacatggtgtcaaaacagagcttttgctgagagtttgatttataaagaaattatggttcgactgaccttggatctaattgccagaaacagcaatcttaaaccccgaaaagaagaaaccatttcacagtgcctgaagaaaataactcatataaatttttcagacaaaaatatagatgcaattgtatctgggaggcaattacattgctgcatagaaggttagaaggattaggagaactaagagagcttcatgttgagaatcagaggcttcccttggggaaaagcttctgkttgatccaagaactcttyattctctggcaaaatccctctgtatattgaatatcagcaataataatattgatgacattacagacttagaactactagagaatcttaatcagctcatagccgttgacaaccaacttctgcatgtgaaggtagtgtaaagagaaattaatttttaagatatttacatgaaattttgattgaaaaatgttttgtaatagctataaaataaatatatcacattaa

SEQ ID NO: 1376 - DNA, 510 bp, Homo sapiens
  SITE (16): n equals a,t,g, or c
  SITE (34): n equals a,t,g, or c
  SITE (469): n equals a,t,g, or c
  SITE (473): n equals a,t,g, or c
  SITE (510): n equals a,t,g, or c
ggatgagtcttccagnacttcagagacatctgangaggaggtccaagaccgagtgcaagtgcatgccattctgaagggcttatattcagtccaagctacatgccacctaagtacactggactttaaaattcagttgactaatttagaattgcaatagattaatagatttgctttttgytttctattttccataatatatgctgaaaaccgtctcttccattccttcctctctactttcctttctttcttccacacattctttctctcattcctttcctcttggtttctttacgcctcttttgttaccccttattcttacatgagtggcatacacaacttatttatgcctcttttcctttgttcccttatagttggacctctgaaattttctggaattttgctgaagggaattgaatacccttattaggatggcatctactcaaatctggacagttctggaaaacggttnaccnttttgacttttttttcaaactttaacaaattttttcn

SEQ ID NO: 1377 - DNA, 510 bp, Homo sapiens
gggcagcaagtacaaggtgatgaatgactgcactggccattgcttcatgaagagccacgaaaaaacagagccggtttctcagcaggtagctggctgctcagtcacaaaggacctctttggacaggctttatggaaatactgtgcctaggacagtcgctcaaaggcaggagggagagaaaatgcatctgcaagctcactttgtcttctttcttctgctggtcaaaatttgctggctsgggcagttaacgccctcacacatccgagttgtgtcacctggcccctttggtagccactggggaagccagatctaggcatgtggcctgatggctcctgcggtggaaccacatgctcacactcagtcagtcaccactgggatgccctgggcagggcaggctgagtggctgggagatagctgagcctaagatatctaagcaagcacctgtgatgtatgcactgcagtgtccaaatgtgaaaaagcaagaaagggagatagaagcatatttttttctg

SEQ ID NO: 1378 - DNA, 389 bp, Homo sapiens
  SITE (352): n equals a,t,g, or c
gctcgtgccgtttcagttgagagacttcagctgttcattgctcatttggacttagttcaaggtcatgtcaaagaagaaggtgcacttacgctattgttagctctgtcttttgtaaccatcaagttccatgcgattgatcagatttaggagggggcgttgggggataatcaattttgggtgtcaccaggtaaacagagccctcagcatctgaatagaaactgaacaggaacagaagagattacactacatctgagatggagacctttcctctgctgctgctcacctgggcctggttcttgcagaagcatcagaaagcacaatgaagttattaaagargaatttacagacgagngatgcatatgacatggcaaaaatgggccagaaaacag

SEQ ID NO: 1379 - DNA, 141 bp, Homo sapiens
aagctgccttcaaaaccccaggactcattttttccttattcacaatgggaaccaatcttcctccttccacattgcatttyaccaaagtcttttgctgtatggaggcagcagccacgacatgggattagttcttggkgggtc

SEQ ID NO: 1380 - DNA, 604 bp, Homo sapiens
  SITE (587): n equals a,t,g, or c
  SITE (597): n equals a,t,g, or c
gcaggcccatccttctgtggtcagtcactgctggttggggaaggaaggagagacacaaccgcttcagatgggcagtgaaaaagacgatggaaaggccaggacaccacggaagttctgaaggggtagtgggaaccgacagggtgaatggaaagcagccctttgacagaagaaagacagagaccagtttccagtgagctcctgaggatattcaagtctgtgcttctgcttgactgaggatcatctaggaaatgaaactaaacttggcttcgacctagaccttgtgtgaccttgaggtcatcaccctctcacagtcaccctagagaatcctttacttacctgtgctaaaaaaaatgctcccatcagttaccctatgatgaggtctccagccctttcatcagaagacagagctttaaaatgcaggtcaccagtactggccccatctgcagcggattatttcttccttyctaaaaatccaggctgcttcttgccatgtggagacaatgagctycttaaccaagggtgaaaaagaccaaccaaatcaaaacaaacaagggcttttttttttttaamcttttttttaggaagcnttagggaatnttggctt

SEQ ID NO: 1381 - DNA, 770 bp, Homo sapiens
  SITE (562): n equals a,t,g, or c
  SITE (735): n equals a,t,g, or c
  SITE (745): n equals a,t,g, or c
gcagggagccaggacacagaggggcagagcaagtcagcattggcgccccttcctcagatccctatcatcttgggaaacagtagcccagaggttcaggaagatgttaacttaaatgttcggggtgccccagtctgttcagcatggctgaaatccacactccgtattcttccttgaagaaactgttatctttactcaatggcwtcgwggctgtgtctggcatcatcctagttggcctgggcattggtggtaaatgtggaggggcctctctgacgaatgtcctcgggctgtcctccgcatacctccttcacgttggcaacctgtgcctggtgatgggatgcatcacggtactgcttggctgtgccgggtggtatggagcgactaaagagagcagaggcacgctcttgttttgcatcctgtcaatggttattgtcctcatcatggaagttacagctgccacagtggtccttcttttctttccaattgttggagatgtggccttggaacacaccttcgtgaccctgaggaagaattacagaggttacaacgagccagacgactattntacacagtggaacttggcatggagaarctaaagtgcttgtggggtgaataactacacagatttttctggctcttccttcaaatkacaacggccacacctacccaggagttsctgtaaatccawcggaagtgtgtctgtgacsgacgsgatgtgtttcaaacgtcatccaccanaaggctgttncataaactctaaaaataccaagact

SEQ ID NO: 1382 - DNA, 570 bp, Homo sapiens
tttttttggaaaatagkgggttttaatgagcttcacttaaagcccttcaaactgaagacatcacattcactattagcatggagtaaaacatttattttcaaatgtcatagaaacaatatttataagtcctcttctccacctcttgtgtggtgatttactgatttctctctttctttccttctttttcttcagcttgcttcccatccagtcatcctttttcacaaacattccctggggcatcttgctgtcttctgcagagaaaccagtgcttcttaagccttatttcttgctacccggtccagttgatcttctgttttcattaaatcaagaggacctgtcccatgttacccctggagtttcagctctctacatgtgtacgttaaaagtttaagtggacgaagccagtgagggagcccaggaactcggtttaagccgcactttgacagtctgtgaatctgtttgacaactttctcccckstctgcctctgtgaacgcctgtgcaccarcgaaatagccacctagatccgctgtggtcagcgtcaggaaaacagcaagacccagctatgaatc

SEQ ID NO: 1383 - DNA, 1312 bp, Homo sapiens
gttcccacccttcctccccacaaggctgtctgagatgccaccttccacctaaacatcatctcccaaattttaatccttaactttggtctctgacttctgcttgattccacagtctccacccacatttgcacaaaggaccatcacctgtccttcctggaatctctaaagttttctgctttccttctgtcctgatggccagctctgctaagtcagctkaratgcccaccatytccaaaaccsgttaaccytactyctggatcctcatcaagaatatctgggacccttaggattaccattgccttaattcgaaattggatcacattccccttctcctggggctctctccctttcctaaagaatagcagccatcaagttacagaacaacagactgcacagaagtttaacaatctcttaaaagaaattaaagatattcttaaaaatatggcaggttttgaagagaagatcacagaagcaaaagaactttttgaggaaaccaatattactgaggatgtgtcagcccacaaagaaaawatcagaggacttgacaaaatcaatgaaatgttatcaacaaacctgcctgttagtttagccccagagaaagaagacaatgaaaagaaacaggagatgatattggaaaccaatattactgaggatgtgtcagcccacaaagaaaatatcagaggacttgacaaaatcaatgaaatattatcaacaaacctgcctgttagtttagccccagagaaagaagacaatgaaaagaaacagcagatgataatggaaaaccagaactctgagaacaccgcacarktttttgcaagagatttggtaaatcgtttagaagaaaaaaaagtccttaacgaaactcaacaaagtcaggaaaaagcaaaaaacagacttaatgttcaagaagaaactatgaaaattaggaacaacatggagcagttactacaggaagcagaacactggagtaaacaacatactgagctcagtaaactgataaaatcctatcagaaatctcagaaagacataagtgaaactcttggaaataatggagtcggtttccaaacccagccaaataatgaagtgtcggctaagcatgagctggaggawcaggtgaagaaactgagccatgacacctattcattgcagttgatggcagctttgctagagaatgaatgccaaatcttacagcagagagtagagattctcaaggaactccatcatcagaaacagggaactctgcaagagaagccaattcagataaactataaacaggacaagaaaaatcagaagccatcagaagcaaagaaag

SEQ ID NO: 1384 - DNA, 361 bp, Homo sapiens
  SITE (359): n equals a,t,g, or c
aattcggcagagtgacttttgctcatttcactcagatcttgtgggcttctcggcttactcccagatttctaatatgtcatctcattgcagctgatgacatccctccaagacaggyaagaattaccatgcccattggacagccatcaaaaataaagctcaaagagtttgagatcacattcatggcatggcaggcagaatctaaactggccctagattcctgctccctaataagcatgcattgcatttcccaccctttgagggcaggcgggacttggggaatatgatgagatgttccccgctattgtaaggttaccttataagggcaaaggtggtaggattttgcagttgtaattaaggtncc

SEQ ID NO: 1385 - DNA, 267 bp, Homo sapiens
  SITE (200): n equals a,t,g, or c
cgggctctttctgtccagccaggagcagagagcgagagacactgaggggccgagacaaggagacctggaggcagggcttgggtggggctggccctgcacccagggtcgaaccagggggttcccaggcaggggggatccattggctcagggaccagaccctgcccatgcccacccctgtcgcgggagggaggggccctggnctcgcccagggtagccctgtcccagcttcagtgcgggctgctgggctctgcagaacagtccttcctg

SEQ ID NO: 1386 - DNA, 334 bp, Homo sapiens
  SITE (194): n equals a,t,g, or c
aattcggcagagcttctggggaggaagaaactggcaagggctcctggcctctgccccagggatgcttgtgccagagccccctcgcctcgtggtctaatagtgcatcctccggcctgggctgcagggcagggccggggcagggtgggccctcagcccgtgccatccagcccacctggggcacccccatggctgtnagcccctcccagggttggggtgtttgggctccatctctcccccggggctgaggtggagaccaggcagagcagtgggctccccccaagatgcctgtggacaggytctagggtctgcatggcgccgaggggctctggggagg

SEQ ID NO: 1387 - DNA, 206 bp, Homo sapiens
  SITE (183): n equals a,t,g, or c
atcactgggaaggtggggaaggtgctgggttgggtccctggaactgcagtcagtgatccaaaggagtgggcctgttagggggttcacaggtcgtgggatgagctcttatgarcgccggctaagtgccgggctctggggtgcccttggcatgtacgggctcccctaattcccaagaccaaccgnccccaacccacttcatagatgcg

SEQ ID NO: 1388 - DNA, 240 bp, Homo sapiens
cgataccgcgtgaggagcctgagcgagacgttgtcaacggggtgttacaggcagcagttgcatgggscaagagcaaggwcaccacggccaagaggagcaagggctgagccgcagcacgtygaggtctagagaggacccatggccagtytcattttaggygcagaactgcttttcgaggaggttgcaccggatccacaggcggcagattcgttcctgcaggaaggcggcaaaagacgtttc

SEQ ID NO: 1389 - DNA, 504 bp, Homo sapiens
  SITE (477): n equals a,t,g, or c
  SITE (478): n equals a,t,g, or c
  SITE (479): n equals a,t,g, or c
  SITE (492): n equals a,t,g, or c
agaagctacaccctcgcttccgcaggagaatgacaacctcttcttcgtgaaccccatccctcttggcaaggctctcacctgctgcactgtggaggtgaggaccctagatgaccgtctgctcaacatccccatcaatgacatcatccaccccaaatacttcaagaaggtgccaggggaggggatgccattgccggaggaccccactaagaaaggggatctcttcatcttcttcgacatccagttccccacccgsctcacamcccagaagaagcagatgctgcgccaggcattgctgacatgactgtggtgggctggagcaggggtgagaggaggctagccgggcctcaccccacccctacccgccacagcctcagggtgtgcaggggagcctgctgcacagatatgatacaagggtgggatggcgcagggcttaaactgacataataaagatctatttcctgtccaaaaaaaaaaaannnaaaaaaaaaaaanttcggggggggg

SEQ ID NO: 1390 - DNA, 531 bp, Homo sapiens
agctttgatgagagtggccacttggcaatatcacgggacttcatttgtgttacatgcctggaaaggggtctgcaccccttcgtgaggactgaagcctgggaaattcctcacgggctacttctcatggcagagttcccaggatgagcggctcacggtggacagcatgaggaggaagaactacaaggccttatgccaaatgtatgagaagattcagccccttctggaaaacctgcaccggaacttcacagagactcgcaataacattgcacgtgacattcagaaaatctatgacaaagatcccctgggcaacgtcctcatcgacaagaagaggctagagaagatcctgctcctgagttacgtctgcaacacgcaggcagagtaccagcagggcttccatgagatgatgatgctcttccagctgatggtggagcacgaccacgagaccttctggcttttccagttcttcctgcagaaaacggaacacagctgtgtcatkcaacattgggcgtggscaaggaacctaggacatgg

SEQ ID NO: 1391 - DNA, 572 bp, Homo sapiens
  SITE (375): n equals a,t,g, or c
  SITE (529): n equals a,t,g, or c
cccagctggcagagcctttggaccaatatgcttgaaccacttggaagcaaaacagagaccctggacctgagagcagagatgcccatcacctgtcccactcagaatgagcccttcctgagaacccctcggaatagtaactacacgtaccccatcaagccagccattgagaactggggcagtgacttcctgtgtacagagtggaaggcttccaatagtgttccaacctctgtccaccagctccgaccagcagacatcaaagtggtggccgccctgggtgactctytgactacagcagtgggagctcgaccaaacaactccagtgaacctacccacatcttggaggggactctyttgggagcattggaggggatgggnaacttgggagactcacaccacactgcccaacattctgaagaagttcaaccgttacctccttggcttctctgaccagcacctggggagggggacagcaggactgaaatgtggcagcggaaggggccagagttaggggacatgccagccccagggnttggggacctggttagagcggattggtaaaacagccccgactt

SEQ ID NO: 1392 - DNA, 222 bp, Homo sapiens
  SITE (203): n equals a,t,g, or c
ggcacgaggagaatttggggactcagagaggttaggtcactagcctcaggtcacacagcatctgcctgctgaagctggggcttgacctcaggcatctggagcccaaggcttccaggactctacacgtttgcctcttagcagccaaggactctttccccagttacagagggtggccacttgtctggggccacacgggaggctcncaggccacctgcccccgca

SEQ ID NO: 1393 - DNA, 333 bp, Homo sapiens
  SITE (300): n equals a,t,g, or c
  SITE (302): n equals a,t,g, or c
tccagcaagtgggaagaacagtcccggcctctttgcacacaagactgtaatacgaatgcaccatcacaggccccacaggggagctgtccgcttccccacacagctgctaggggctcttttggcatgttcccaacctttcctgcctttatctgatattcgttccttagatcctgggatgaggaggtggaccagcagaaggtgggcttgtgaaaggcagcccggggtccaaatcctcctggctcttcagcttagcgggttagttaacatttcaggagccttgcatcttcccatctggcaaantngggcatgttccagttcgaggaagttgccttg

SEQ ID NO: 1394 - DNA, 307 bp, Homo sapiens
  SITE (266): n equals a,t,g, or c
  SITE (268): n equals a,t,g, or c
ggcacgagctggctcagaggcccaggaaagagagagaagaccaaccaaggggtggctggagtcccaaggccatgaactttcaggaaaatgtgaccctggccatggccttgttcaccatcctgacctccatctatttcttcaacaaggctcagcagtgagaagacacaggacctccccgcacaagagccctgcctctccctctgccatcgctctgaggccagataaatgtaactgaatccgcaaaaaaaaaaaaaaaaaaaaaaaantnaaaaaaaaaaaaaaaaaaaaaaaaaaaaaaaaaaaaaag

SEQ ID NO: 1395 - DNA, 481 bp, Homo sapiens
  SITE (69): n equals a,t,g, or c
  SITE (386): n equals a,t,g, or c
  SITE (410): n equals a,t,g, or c
cagcaacagccaaagcccctagtcccagagctggctgccctctgtttcacagcagctccctgacctgtnttgctgcgtgcactccctacagctcgacacagccaggggaccaacaggccaagaaatgcaagatcccgggaggtttcttagcagcagaatctgaggcccagagaccctgaggccgtggcaggcctgctagtctggctagagcaaggcccattcctggcgggggtgtcattgccttcaccggacgcttccctctcagggtcctgggactgcaccagatgccctgagggaatggcccaccctgggcctgtacccacttcagcctgtgatctatccaaagagccagggcccaaaagcgcctaggttcagggtgctcaggnttaccagggagcacgcctcttgtncccccggcaaacccagtttgacctttaatttgaacggtttttccagaaccagccttgcgggcaaccatttt

SEQ ID NO: 1396 - DNA, 742 bp, Homo sapiens
  SITE (709): n equals a,t,g, or c
  SITE (734): n equals a,t,g, or c
  SITE (735): n equals a,t,g, or c
ggcagagtggggaggtgggggcagatcacatcaacatcctggcattgggctgggtcggcgtggagccccagaaatgttcccaagcccattcttaccaagaaccaatgagtaaaatsaggggcctcccacctgaggtcagggaaccaggccctggagtggaacttggggtggaaaatggccttctttgtcaactgattcattctccagaattcaatttgttctccaactcggtggtgtttgaaagcaactttatccaggtcactaagcccgggaactggagagatgtctgtgaagggtctgccaccgtgatcctcggggtgacctcctcggtgccctccctgccactccccaatgtcctcctgatggccaatgttacctggccccagggtccatttaccacctggagcacaactggtgacgccccagtcatcaacctcagcaggcttctccccctgaagtacgtggagctacgaatctacgactggctycagcgcatcctgagggttaggacagtgaccgaaaagatctactatctgaagctycacgaaaaacacccagagattgggggtttcaattctgggtccccttggtgaaaattctgcagaaaggcctgtcatcaccaccaaagacccgagaatcaaaattactcacttgcctggtgcccaagatgccaccaacttcacagaacacacctgraamcaggctggantgcaattggcgcgaacttcgggttnncttggaa

SEQ ID NO: 1397 - DNA, 201 bp, Homo sapiens
  SITE (126): n equals a,t,g, or c
aacgcaggcattgctctggggaagctgtgcacagctgagcccaggtatgctgtggacacggagccaggctgacctattgcagaaagagcagctgagctgaggtgctgagttttggctgggactgcntgccacacagaacagtgtgggaaagacctcatgctttctgtgcagaccttaggttaaagcccagtagctgcttct

SEQ ID NO: 1398 - DNA, 1162 bp, Homo sapiens
  SITE (100): n equals a,t,g, or c
  SITE (1158): n equals a,t,g, or c
  SITE (1159): n equals a,t,g, or c
  SITE (1160): n equals a,t,g, or c
  SITE (1162): n equals a,t,g, or c
agtggttattgacatgggcacaggcacctgtaagtaggttttsctgggcaggccagccscacctacaccgtggccaccatcctgggctgccagcccaagnaaacccgmcacctcggggcagtccgggctgcagacgttcatcggcgaggcagcccgmgtgctcccagagctgacgctggtgcaacccctgcgcagcggcatcgtcgtggactgggatgccgccgagctcatctggcgccacctgctggagcacgacctccgagtggccacccacgaccacccgctgctgttctccgacccacccttcagcccggccaccaaccgcgagaagctagtggaggtggccttcgagtcgctgcgctccccagccatgtacgtggcatcgcagtcggtgctgtctgtctacgcccacggtcgtgtcagcgggctggtggtggacacgggacacggggtcacctacacagtgcccgtcttccagggctacaacctgctccacgccacggagcgtctggacctggcgggcaaccacctgaccgccttcctggcggagatgctgctccaggccggcctgcccctgggacagcaggacctggacctagtggagaacattaagcaccactattgctacgtggccttcgacttccagaaggagcaggcccggccggagcaggagtacaagcggactctgaagctgcccgatgggcgcacggtcaccctgggcaaggagctgttccagtgtccggagctgctgttcaaccccccagaggtcccggggctgtcacccgtcggcctctccaccatggccaagcagagtctccgcaagttgtcactggagatgcgcgcggacttggcccaaaacgtgcttctctgcggtgggtcctcgctcttcaccggcttcgagggtcgcttccgggcagagctgctgcgcgctctgccagccgagacccacgtggtggtggctgcccagcccaccaggaatttctccgtatggatcgggggctccatcctggcctccctgcgcgccttccagtcctgctgggtcctgcgggagcagtacgaggaacagggtccctatatcgtgtaccgcaaatgctactgaccagggcagagctggggagggcgtgggggcagtaaagcctctgctacaaaaaaaaaaannnan

SEQ ID NO: 1399 - DNA, 112 bp, Homo sapiens
  SITE (106): n equals a,t,g, or c
aggctccagaagcagaatcaagtgggatgtcttgggaagaaaaacaaacaaaaggcccactaggtggagtgaaaatggaatcaggwggcaattatgttcaatttgnaccttt

SEQ ID NO: 1400 - DNA, 279 bp, Homo sapiens
  SITE (278): n equals a,t,g, or c
  SITE (279): n equals a,t,g, or c
ggccctactgcccgtctccctcctggctagctccttcatgaccgaggttgtggtggccctgctcatgtgccccctcccactgaacagcaatggagcagagatgtggaggcagctgatactgtgtaagcccagctgtgatgtccgagacctsctggatctgctcctgggcagcctgaaggagaagcccgtcaccaaggagggccgggcttccatcgtgcccctggcgccacggcctgtgcgagctcctgtccgtcaacagctgcatggggggggggggnn

SEQ ID NO: 1401 - DNA, 302 bp, Homo sapiens
  SITE (167): n equals a,t,g, or c
  SITE (260): n equals a,t,g, or c
  SITE (280): n equals a,t,g, or c
tccgctgcatcatttattgaaccaacgtggcctacaaagtaaaccgcatttctgtacacctgagagctggaaatgttggtttgggttccggggcgtcctgcgcagagaggagggaacgggccgccctatcgcagtgcgggaaccctacagatcccccggagacgganggcctggaccgcacccccggcggcctcagggagcagctgggaccttgggccactgcggcctaggaggtggctcttaccctggggccggcaagngagtggtggactcgcagctncagcccctgcccctcggccatg

SEQ ID NO: 1402 - DNA, 1064 bp, Homo sapiens
  SITE (1062): n equals a,t,g, or c
  SITE (1063): n equals a,t,g, or c
  SITE (1064): n equals a,t,g, or c
ggcacgagcctcccctccccccactcctctcagtgggggcccctccagtccctgagaattggtactacgaaaaggtgaactcctgggcagaatcttgcctagagcttgcggagtccagccaggcccctgctgaagggccccagaccaccggccacttctcccccgtccatctgaccagctgggcccctgcgcccacctggcctccacgttccctctcctctcacccacacccctggccatggctaactactacgaagtgctgggcgtgcaggccagcgcttccccggaggacatcaagaaagcctaccgcaagctggcccttcgttggcaccccgacaagaaccctgacaataaggaggaggcggagaagaagttcaagctggtgtctgaggcctatgaggttctgtctgactccaagaaacgctccctgtatgaccgtgctggctgtgacagctggcgggctggtggcggggccagmacgccctaccacagccccttcgacaccggctacaccttccgtaaccctgaggacatcttccgggagtttttyggtggcctggaccctttctcctttgagttctgggacagcccattcaatagtgaccgtggtggccggggccatggcctgaggggggccttctcggcaggctttggagaatttccggccttcatggaggccttctcatccttcaacatgctgggctgcagcgggggcagccacaccaccttctcatccacctccttcgggggctccagttctggcagctcggggttcaagtcggtgatgtcgtccaccgagatgatcaatggccacaaggtcaccaccaagcgcatcgtggagaacgggcaggagcgcgtggaggtggaggaagacgggcagctcaagtcggtgactgtgaacggcaaggagcagctcaaatggatggacagcaagtaggcgctggccacccsgccctgccttcccaccaccaccaccgtgcatggggcagcaaacacgtggggccgcagacatagcctgatggttaataaatgtgccaagtgagttcatggcaaaaaaaaaannn

SEQ ID NO: 1403 - DNA, 413 bp, Homo sapiens
  SITE (309): n equals a,t,g, or c
  SITE (377): n equals a,t,g, or c
  SITE (389): n equals a,t,g, or c
cacgagcgtatacagggttcgggtactctccatggcttcagccacctaccagggtcttggaacatatccctcatggatgagggggaactgctgtattcttacggggtaaaggacgaattcttgggcgttctgtcaaatgaattatttgcaggaagagtgaaatagactatttctgtgatcctttccaagctttgtttcagtacttgtggcatagggcaaggacagaaaaggaagacaggagggaggaaaagacgtttgaaaatcccagacctcaaggagagacaggataggaggtacaagtgctagcgntggtgagagccatgatgcccggacccctgcctgtgaccctgcaccccagcaggtgctgaggccaccangtttccactctngaaagggggaagtgaatcttaaga

SEQ ID NO: 1404 - DNA, 473 bp, Homo sapiens
  SITE (47): n equals a,t,g, or c
  SITE (441): n equals a,t,g, or c
  SITE (465): n equals a,t,g, or c
cagcatacgcacttaaagcagcaacgggcaaatttgccatactgtgnacttcattcagagctgtgtcctcctgctaaaagcaaaggaaagctcactgatgcacaggatgaagatccagaatgcacacaagatgaaagaagccggcgcggagamgccatctttttactctgctctgctgcgtattcagcccaaaattgtgcactgctggaggccaatgcggcgcacgttcaaaagctatgatgaggctggaacagggctgctaacgtcgcagatttcaggacggtcctgagacagtacagcatcaacctctctgaggaagagttcttccatattctggagtattacgataagacgctgtcttcaaaaatctcctacaacgacttcctccgggcattcctccagtagacaaccctgctgtgtgcccaacgggacgacagccanagggctgtttcaaggcaataaaanctataatt

SEQ ID NO: 1405 - DNA, 273 bp, Homo sapiens
  SITE (232): n equals a,t,g, or c
ggcacgagcccggacgagcgccggtcgaagctcaccgacttggcttggccgacaccatgggctacccagacctgagcaccacctactgcggctcagccstacgsgtcacccgaggtgctcctgggcatccccttacgaccccaagaagtacgatgtgtggagcatgggcttcgtgcttttacgtcatggtcaccgggtgcatgcccttcgacggattcggacatcgccggcntgccccggggccagaaacgcggcgttgttttattcccgagg

SEQ ID NO: 1406 - DNA, 624 bp, Homo sapiens
ctccctgaccaccagaagttccacctcaccatcaagaaaggccctggtccaggatgtgcaaggtgtgatgaaatcacagggctggggaaggtcagctcggggtcacaagaagcctgatgggcaggaaagagcatgaaagccccagccagcctcacctgtgcggctgggaggactcacagaaaccctctgtacccagtcatgggccaaagacaccgtcatgcaagggggtgaaggctccacactcgtcccggccccgggcgtggaagcaggacctcgagcagtctctggcagcagcctatgtgccggtcgttgtggactctaaggggcagaatccggacaagctcaggttcaatttctacacctcccagtactccaactccctgaaccccttctacactttgcagaagcctacctgtggctacctgtaccgccgggacactgaccacacccgcaagcgctttgatgtgcctcctgccaacttggtcttgtggcgctcctaggcctgagcaaacggaagcccccgacccttcaccctcacccctgtgacctcaggtccccagaggggagagggctgctcactgcaggaggagtgacctatattcgggctaagacagctgtgccatg

SEQ ID NO: 1407 - DNA, 852 bp, Homo sapiens
  SITE (745): n equals a,t,g, or c
  SITE (747): n equals a,t,g, or c
  SITE (756): n equals a,t,g, or c
  SITE (768): n equals a,t,g, or c
  SITE (790): n equals a,t,g, or c
  SITE (828): n equals a,t,g, or c
  SITE (834): n equals a,t,g, or c
aaggcccatttctaccagagcagcccggacctgctccacagacagtagagaagaactccaggcctcaggaagggactggtagaaggggctcctcagaggcaaggccttactgctgcaactacgagaactgcggaaaagcttataccaaacgctcccacctcgtgagccaccagcgcaacacacaggtgagaggccatattcttgcaactgggaaagttgttcatggtctttcttccgttctratgagcttagacgacatatgcgggtacacaccaratatcgaccatataaatgtratcagtgcagccgggagttcatgaggtctgaccatctcaagcaacaccagaagactcatcggccgggaccctcagacccacaggccaacaacaacaatggagagcaggacagtcctcctgctgctggtccttaggtgaatgaagaaggaagaggattccaggctgagagcactggacgtggcaactgttcagaggagaggcagtcttcaagttctacattcattcagaaaaatgttttttgagcctacaataytgagcgcaacaaggytktggagacccatggtgaggagcwtggagttaactaaaggatgtgtcagggaagaaagacttcttaaggaggtgcctccatcagacccaaaggactcatgggggctagctgcacctcacattctttggacatataccggtggacatggctaatctttctggaaactatggcatggacaggnangggattcanaagtgcatgaangcaccctggctttgcagaagcngaaagaatcattggccaccatttatgaatgggcccagnggttgnccagaaaaaaaaacccct

SEQ ID NO: 1408 - DNA, 299 bp, Homo sapiens
gggcacgagagaccatccactggaacgggtccttccaggaggcagcctttcccggggagacctttccagtgtcggtagagtgtgaggatggagaccggttcccgcgcaccatgtcatcgtcaccgtgcccttaggtctgtccacgttctctgtgggttcatwgccggacttgagtctgagttcatggagactctgtcggatgaagaagtactttgtgtctcacccaagtgctccggagagtgacaggaaacccacggctycccgggcccaagagcgtcctgcggtctcgctggcacagg

SEQ ID NO: 1409 - DNA, 630 bp, Homo sapiens
caccgccagccttgccttacccgctgaaaaagaagaatggcaaaatcctgtacgagtgcaacatatgtggcaagagctttgggcagctctccawtctcaaggtccacctgsgtgtgcacagtggagagcgtccattccagtgtgccttgtgccagaagagcttcactcaacttgcccacctgcagaagcaccacctggtgcacactggggagcggccccacaagtgctcggtgtgccacaagcgcttcagcagctccagtaacctcaagacccacctgcgcctgcactccggggcccggcccttccagtgcagtgtctgccggagtcgcttcacccagcacatccacctgaagctgcaccatcggctgcatgccccacagccctgtggcctggtgcacacccagctgcccctggcctctctggcctgccttgcccaatggcaccagggggcactagatcttatggcggtggcatctgagaaacacatgggctatgacatagatgaggtcaaagtgtcctcgacatcccaggggaaagcaagagcagtgagcctgagcagtgccgggactcccctggtgatggggcaggaccagaacaattaaaaatgtttcttctgtcaaaaaaaaaaaa

SEQ ID NO: 1410 - DNA, 210 bp, Homo sapiens
  SITE (142): n equals a,t,g, or c
  SITE (200): n equals a,t,g, or c
ggcacgagagagagagagagagagagccggcacatggtcarctccatcgtggggcacctgaaattccaggcttccttcagcagaggccaaccagaagaagtactttgtgggggaggaggccctgtacaagcaggaggccctncagctgcacttccctttcgagcgtgggctgatcacagggtgggattacgttgagagantcttggagca

SEQ ID NO: 1411 - DNA, 915 bp, Homo sapiens
  SITE (3): n equals a,t,g, or c
  SITE (6): n equals a,t,g, or c
acnggncacgccatgctggtggactccatcctgcagggcttcaagcctcagatctttcccgatgcctacactctcaccttcatccctgtgatcagtacctcggagaccagcgtccccctcaaggtgatccgcctgaccgtgcacacccccaaggcccagagccagccgcaactctaccagacagaccagggggaggtgtttctgcggcgcgacgggagcatccagggcccgctgtctgccagcgccatccaggagtggtgcaggcagaggtggctggtggagctgggcaagctggaagagaagatgaaggcgctgatgatggagaaggagcagctccagcagcagctgcagcagcacgggcctgtgtcctgcacctgctgtgtcctgtgagggccctggggagcaggcaggacggcacggcactctccacctgagacccagggatttcctgtttgagtgtaaggccaaccagtaaagcccatgcgggctgctgagaggcggacagggactccttcaacatggcacatgagcaggcacccatgtggcttcaaccctgacagacccatctgtgtagccaagaaactgctctcagccctgtccccaaatgaccttactttcagaaagaatgtgtaaaaccctgcccagagctcccctagggctaagctataagggattgtccttctccctaaaatgctcatttggcccaggctgaggtctgtgactccagttggctacacagtgccagaaaggaatctgtcatctcaggaaagcccctcaaagatggcgaggcatatttgatgactgtggttacagggcaagaggccaccctgcagcccccacccctgacttgctggaacttgtgactgtcaaagctccattaataaattacatgcacctggaaaaaaaaaaaaaaaa

SEQ ID NO: 1412 - DNA, 472 bp, Homo sapiens
  SITE (349): n equals a,t,g, or c
  SITE (386): n equals a,t,g, or c
  SITE (445): n equals a,t,g, or c
  SITE (455): n equals a,t,g, or c
ggcagtagccgcagagttagggtctcagggcgaccccagcagcctggaaacgaggcgggcttcccatatgtcacttctaagtaggatattggaggaatgaagaggtctaaatgacacgttaaggtccaagctcacccgtgaatcagaacttaccggaggccacggaggctgttaccgcgaggaaactctagtcctggcggaagaccaacttctagcagatccccttaccctggctctagtccactaacttctttctagcacaaccgacttacgggccggagcccttaaggagcactcgcatccttcaatcgcgctagaagctcgccggtgggcggaaccgtgccagttnaaggcagaaccaggaggcagaagtctccgctttcttnaagcttggttgagaagtccacctgcaagttgcaaaagaccggcttgtttgaaaaccggncgcccaaagntggccggaaacttccct

SEQ ID NO: 1413 - DNA, 556 bp, Homo sapiens
  SITE (36): n equals a,t,g, or c
  SITE (498): n equals a,t,g, or c
  SITE (503): n equals a,t,g, or c
gggcacgaggtcaggctggtggaaaaggtgataagnaaatcgggttatgggatccagtttttcggacccaaggagtattatgagggtgactggtgtggcagccagcgcacgcgtggggccgcatgtattacagcaacggcgacatctacgagggacagtgggagaacgacaagcccaacggggagggcatgctgcgcctgaagaacgggaaccgctacgagggctgctgggagagaggcatgaagaacggggcggggcgtttcttccatctkgaccacggccagctgtttgaaggcttctkggtggacaatatkgccaaatkcgggacgatgatcgactttggccgtgacgaggcccctgagcccactcagttccccattcctgaggtcaaaatcctagaccctgatggtgtgctggcggaggccttggccatgttcaggaagacagaggaaggagattgatgccagagaacacaaacgcttcaggagaaattcaagnctgtntcacccgatcgttcagaccagtgcggctctggctggaggagtcagcagcagtt

SEQ ID NO: 1414 - DNA, 652 bp, Homo sapiens
  SITE (605): n equals a,t,g, or c
  SITE (615): n equals a,t,g, or c
  SITE (619): n equals a,t,g, or c
gggcacgagcctcgggggcgcactggttactatttattcacacaaggcaagaagggcaggctcaccagcctcaccaatatttccaatatggaaataatgcccgagggcagccttctcattaaagatccattgccctcccagacgggcctctaccactgctggaacaagaatggccgccaagtggtgcagtatgaaattgaytttcaggatgtcaccaccctgcatataacacacaaggacctgggtcagaggcccctgcagaacgagaccctgcatttgggcagcaaacagctcatttttacctggtgggagccctggcaggactgcaaccgctgtgaggagccgggcgagygtaaacgcctggggtaccgctacattgaggagcctctggaggaagccatgccctgctggctctatctgggagaggtgctggtgtggtctagccgcttgcggcctgagctgcaggtggaagcctgccacgtccagtgcaccaataacacacagktaagggtggattacgtatttttgacacttcagctcgatgagaaacagaatttggtggctcgatgtccttaggatcatgacaggccgcaactgcgtgcacncacccctgcngganagcagtttcgcagattacacttttgacctcacg

SEQ ID NO: 1415 - DNA, 1234 bp, Homo sapiens
ggcacgagccctttcaagcatgaatcataccaccagagatcacccagcktgctcttagctctgcctgcctggtgtagggtcctggagaccttcttggagctcatccagcagccatcatgcaaggtggtgctggggactgccctcttgctaggaggtggaggtctcatgctgtgggttcagagaaagaggagaagaaaggaaacctctgagtgtccatcagacaaggacaagtcaccagaatcccataaagcaaagaatgaaagctggattaaatcccactttagccgcctttccgaagagaagctggccctcgacaacaatgccagcgctagtggcaatgctacccagactgagagtgggagtgaagaggtcagctccacggttcacatagagaccttcaccacgaggcacggagaagtgggctccgctctgcaccgggaatccttcaccagcaggcagaagacatctgggccctcagtgatccaagagatccaccaggagtctggaaaagccccatccactgatgasgccacgtgggccgctgtggctgcctgcaccaaggagattgacacccaggggcggcacctggctcactccatgctgcagcgggccatagcttaccagcactcaggtcacctrgagtccaaggacatcaaccaggaggagctgagggccctcgaggaggtagagatgaagctgcaaaagaatttcctcacccagcgggaaaacaccatagctggtgccaatcacacacacaccttctatggccacagtcaccacagtcaccatggccacccaagccaccagagccacagcctgcctaatcgcagacactagatctgtgacttcttggaagccacctaaccatggatggagacgcccctgcccccagcaaggctggctcacacacacgtctgttttctctcctatggggccatctatgcaggccagggtgagatgctgtgcccaaatccctactttcttaggctcctcacggggattatgggctctttaaactccatgagtggggtctgccacagaagatggcccctgttggagggagagctgggaggacacagcgcaggtgagatagaccctgaggcccctgaagacccaccaagagaagacagatgggagcagcaagagccccacactgatgtcattgcctggaacggagccaataaagctttgtgtgccttcaaaaaaaaaaaaaaaaaaactcgagactagttcc

SEQ ID NO: 1416 - DNA, 1316 bp, Homo sapiens
ggcacgagcacacacaccaggccctgccaggacaaggcagctcctggaagctccaccaggacccacgtccaccaggcatctcgaacccttggcccccatggaccccctgaggcgctccccctctccctgcctgtcctcgcagccctccagccccagcaccccaccctgcgagatgcttggtcctgtgggcattgaggctgtgctggaccagctgaagatcaaggctatgaagatggggtttgagttcaacatcatggtggtggggcaaagcgggctgggcaagtccacgatggtgaacacgctgttcaagtccaaagtgtggaagtcaaacccaccgggcttgggggtgcccacaccccagacgctgcagctgcattcactgacccatgtcatagaggagaagggtgtgaagctgaagctgacggtgacggacacgcccggcttcggggaccagatcaacaatgacaactgctgggaccccatcctgggctacatcaacgagcaatacgagcagtacctgcaggaggagatcctcatcacccgccagcgccacatcccagacacccgggtgcactgctgcgtgtactttgtaccacccactgggcactgcctgcggcccctggacattgagttcctgcagcggctgtgccggactgtgaatgtggtgcccgtgattgccagggccgacagcctgaccatggaggagcgagaggccttcaggcgcaggatccagcagaacctgaggacccactgcatcgacgtctacccccagatgtgctttgacgaggacatcaatgacaaaatcctcaacagcaagttacgggaccgaatcccttttgccgtggtaggggctgaccaagagcacctggtgaacgggaggtgtgtcctgggccggaagaccaagtggggcatcattgaagtggagaacatggcgcactgtgaatttcctctcctgagagacctgcttatccgctcccacctccaagacctgaaggacataacccacaacatccactatgagaactaccgcgtcatcagactcaatgaaagccacctgctgccccgcgggcccggctgggtgaacctggccccggcctccccaggacagctgaccaccccccggaccttcaaggtctgcaggggggcccatgacgattctgatgatgagttctgaccaccggcggatcccggggctgctgggcttcctgagtccccagcggctctcaacacacacctatgtaccagagcatctattaaatgtgagccttgctttttatgaaaagctgtgctttgaaaacaaaaaaaaaaaaaaaaaa

SEQ ID NO: 1417 - DNA, 487 bp, Homo sapiens
  SITE (4): n equals a,t,g, or c
  SITE (31): n equals a,t,g, or c
actnacgggcagctctcgttcctcacctgtnccatccctcttgcakttcaacagcatgatcctttactgtgtgcccaagctgcggctcatgggccagaagttcagcgtccgggagaagatggacatctcaggcctccaggtgcaggatatcgtcaagccaaacacagcacatacattcatcataacgggaagaaaaaggtccctggagctgcagacgcggacagaggaagagaagaaagaatggattcaratcatccaggccaccatcgagaagcacaaacagaacagcgaaaccttcaaggcttttggtggcgcctttagccaggtatgaggaccccagcctctttccagacatgcctattcacgagcaccagccctgtgggagcctgtggtgaccaccgaaggcagttcgggtgcagcagggttcgagcccagaaaattatgcctcttaagaccagacgtggacaagggaggaagtcagagctgt

SEQ ID NO: 1418 - DNA, 494 bp, Homo sapiens
  SITE (194): n equals a,t,g, or c
  SITE (329): n equals a,t,g, or c
  SITE (345): n equals a,t,g, or c
  SITE (435): n equals a,t,g, or c
tccctcccttcccaccctactcctttcggctgctctggtgcccacccccagtgcctcgaggtcgaggagagctcctcggccccgcagracggggaggattctgtacagatgagcataacttgtgactgcaaggagcctgacaagtgctgctggagacacaagcagtgcactgggcacatcatctaccctttcgnctctgactgtgtccgccacagcctgcacctacactctgtcaaccactgcaactgtaattctaggctgaaggactcttcagaggatagcagcagctcccggggcgcgggcccaacctgcttccatgtcatcgagtncccttgctttgagctnacaacggaggaggagcatgtggagcgattccggtattgctggtgcaaaagctacagacctgtctctgttgcagtgatccaccattcactntaccatgagtgttgggcagatgatctaaattaaggagaggaagaggaggaggaggaaag

SEQ ID NO: 1419 - DNA, 603 bp, Homo sapiens
  SITE (296): n equals a,t,g, or c
  SITE (583): n equals a,t,g, or c
  SITE (595): n equals a,t,g, or c
agagccgaggcccacctacttcatctcctccaccgtgggcaaacgctgccccgaggcggccgacgctggcgacacccgcaagtggactttagtgggccatgagctgctcaacacggaggcgcctctcaagctggtgaacccgctgaagcacggcatcgtggtggactgggactgcgtgcaggacatctgggagtacatcttccgcaccgccatgaagatcctccccgaggagcacgctgtgctggtctccgaccctccgctcagccccagcagcaaccgggagaagtacgcggasntcatgtttgagaccttcggcatcccasccatgcacgtgacgtcccagtcgttgctgtccatctaytcctacggcaagacctcggggctggtggtggagagcgggcacggcgtctcgcacgtggtgcccatatccgagggcgacgtgctgccgggcctgaccagccgcgccgactaacgctgggggtgacctyaccaactgacctgatgcagctgctcaatggaaggcggggccacgcatttcacggacgaccacctggcacatcatagagcacatccaaggaagaantggtggctatgnggcctttc

SEQ ID NO: 1420 - DNA, 311 bp, Homo sapiens
  SITE (292): n equals a,t,g, or c
  SITE (309): n equals a,t,g, or c
  SITE (310): n equals a,t,g, or c
ggcacgagccagtcccagccaaaccccacatccaactggacttgccatgccccacgctaggctcctgcccacctcacccaggccaggccaggcttcctaggcagccagtgctccaggagccggcccacccctcctcccccatcttcacatccgcatggcagtgggactcagcccttaagcagcctagggctgttagggtacctggcccaggtgggtttgacatgccctttcccaggtagcagcagggacaaactggttgacacccagaggcagagttacagtgttccccacnttccctgtgtctttccnnt

SEQ ID NO: 1421 - DNA, 700 bp, Homo sapiens
  SITE (496): n equals a,t,g, or c
  SITE (554): n equals a,t,g, or c
  SITE (665): n equals a,t,g, or c
  SITE (671): n equals a,t,g, or c
ggcacgagcggtcacctgcagtcaccaggggcccagagggacgcacagagggagaccggctgcctgggtcccttctggctgcctcaccatcaggtgcgggatgaggagctcagcctcagccacagtgcgcaaggtgaagagttttgatccctcgcacatcctcgagccaggcagggcgcccggcttctatcccaggtagcagagtctcctatcccaggtctccgacggcgaccgcaaccctttgcccgtggaggacttcccctgtctaagggccattgggagtgggatggcctaatttctggggtcgctttctattgggcacttcaaacagtgctgggcaagggcagtcgtttgaggcagcttggggtgaagttcttagggaggaggtcctgtgcagctccgccagccccggtcaggcccaggcagccaccaaccctggtttctccatcacccctgacccctcccacagccccttctcgtggttgccaccgtctangcatgcttcaactttctacctgctgggtatccctatggggcacggtgtcggcccgcanaggctggctttggctgcttgtctctctgggaggggctgtgcggtggatacgtgaggaagctccgaggggagaactgtccgtgtgaaggagaagagcaatgccgccatcggnatggcncgtggctaaaatggtcacgtccagcgtga

SEQ ID NO: 1422 - DNA, 495 bp, Homo sapiens
  SITE (494): n equals a,t,g, or c
aagctgtgatagaaactttgaacaaggccttggacctccagtctcggatactgaagcgagttccactggagcaaccagaaatgattccctcccagaagcaactggcagcctctatctgcatccaatttgcagagcactacctggcagagaaagagtatgacaaggcggtacagtcttataaggatgtcttctcctacttgccaactgacaataaggtgatgctggagctggcgcagtcttacctgctccaggggcacctggacctgtgtgagcagcactgtgccatcctcctgcagactgagcagaaccatgagaccgcttctgtgttgatggctgacctgatgtttagaaaacagaacatgaagcggccatcaatctttaccaccaagtcttggagaaagcgccagacaattttttggtattcataaattaatcgatctctaagragragtggaamcttaaggcattcttcctttttaattgccaagaggtgnc

SEQ ID NO: 1423 - DNA, 348 bp, Homo sapiens
  SITE (10): n equals a,t,g, or c
  SITE (256): n equals a,t,g, or c
  SITE (340): n equals a,t,g, or c
aaacattagnataggttagctttctatttcacctaccatttttctcagagggagctgccagtcatggtattcgatattgttaccaagaaaatctttgtgtgtgtcaagcagcatccctgttttcagtgagaggtgaccagataaactggaaagtattttatctgtctttgtgacacagattatgtggttgtcatttttcaccaactttcttactagatcttgaaaatggtcttggtccaggcatgatagctcatgnctgtaatcccagcagttgggaggccaaggagggtggatcgcttgaacccaggagtttgagaacagcctgggcaacctggtgganccccgtct

SEQ ID NO: 1424 - DNA, 416 bp, Homo sapiens
  SITE (358): n equals a,t,g, or c
  SITE (363): n equals a,t,g, or c
  SITE (392): n equals a,t,g, or c
ggcacgaggttgctcgcctgtcatccctctcctcttactcgaggacaagtgacactgggaccggagtgtctccgttcccagtgtgaaggatcgagcctggctcgaggaggcgctcagggtggttcgggcccggcccttgtgagtggagggtcgttgcgcatcctcctcctcactttcttcctgccgggacgttctcagccgggaactgacagatcctgcttagcccggggcccagcactgagaaatctgggaaggaacgttgsttcaccgcacatgggccgtggccccattccttcgggccctttaggtggggatcgggttagcagttccagccacggcactgggacggggagcgttntcgtnccaagagaccgggcgatgagcaaagtttntttttattccaaactggaaaattt

SEQ ID NO: 1425 - DNA, 287 bp, Homo sapiens
  SITE (73): n equals a,t,g, or c
  SITE (154): n equals a,t,g, or c
gggcacgagagaagatgtatcccaagttgtccaggtgtkggggtaggtaggacacagagtagccctgggaatnctgcccaagaccccctcgtccccagtgattgaggaggagtccctttccccggtgtagtttatctgtcccaggggccttctncggcaccctctggatctgcttcctgatctcactctggggaactgcttggggagcttcacgtttcagtctcaaggatcgcgcagggcggaccctcagcagcctccagatctgcccagaaagtccacggtgccgg

SEQ ID NO: 1426 - DNA, 323 bp, Homo sapiens
  SITE (260): n equals a,t,g, or c
aaaagtatttgacttttgaacctagtcaatgatcaggtgctaaagtcaaacggagtcaactggtgttttccagtgagactgtggactttggcctgcttcaagagcgtgtgtgtgtgtgtgtgtacgtgtgtgcatgtgccatcagtcttttttattgtcatgtgawtggccttgcttggctcatgaatagagcagttctatattttcctgcaactccagcacatgcctttttacctccataacttctcctgcaccatctnccttgcaaattcttatattctttctcttttcactatcaagcctagtgttagttttggcctttt

SEQ ID NO: 1427 - DNA, 1181 bp, Homo sapiens
catattcttaacaacccggaaattatgcggcagacactggagtttttacgtaaccctgccatgatgcaggagatgatacgtagccaggaccgggtgctcagtaacttggagagcattcctggtggctacaatgtgctttgcactatgtacacagatattatggacccaatgcttaacgcakccaggagcagtttggcggcaatccctttgccactgccactactgataatgccaccaccaccaccagccaaccttcaaggatggagaattgtgaccctctccccaacccctggacttctacacatggaggctcaggtagcaggcaaggaaggcaggatggggatcaggatgcacctgacattagaaataggtttccaaactttctgggtattataaggctctatgactatctccagcaattacacgagaacccccagtccctaggaacttatctacaggggactgcatctgccctcagccaaagccaggaaccaccaccatcagtaaacagagttcccccatcgtcaccctcatctcaggagcctgggtcaggccagcctctccccgaggagtcagtagcaatcaagggaaggtcctcctgcccagctttcctgagataccccacagagaacagtactggacaaggtggagaccaagatggtgcagggaaaagctctactggacatagcacaaacttgcctgatcttgtctcggggctgggagattctgccaacagggttccatttgctcccttatctttttcccccacggcagccattcctggaatccctgagcctccctggctgccatccccggcttatccaagatctctgaggccagatggcatgaatccagctccacagttacaggatgagatacaaccacagctgccactgctgatgcaccttcaggcagccatggcaaacccccgtgccctgcaagccctgcggcagattgagcagggtctacaggtcctagctactgaagcacctcgccttctactctggttcaygccttgcctagcggggacgggtagtgtggcaagaggtatagagtctagagaagatcccttatgtctgaggatcctttccaaatcmactyctgaggggtyccagsactggactctgcaaarctgggcttcctttccctcctttcttccatatgctggaaggaatttaagt

SEQ ID NO: 1428 - DNA, 113 bp, Homo sapiens
  SITE (78): n equals a,t,g, or c
tcgggtgggggcctcactgtttgtsctttgtttgatgttgggtgggggggtcagaaagagggaagtggccattgccanggaaacatgggagcccctctggccagggggccagg

SEQ ID NO: 1429 - DNA, 556 bp, Homo sapiens
  SITE (143): n equals a,t,g, or c
  SITE (423): n equals a,t,g, or c
  SITE (457): n equals a,t,g, or c
  SITE (514): n equals a,t,g, or c
  SITE (520): n equals a,t,g, or c
ggcagaggggagccagacccccacaccatggcgagcgtggtggtgaagacgatctggcagtccaaagagatccatgaggccggggacacccccacggggtgtaggagctgctcccagctagtcccagaggctccccggagtgnaccagccgggccaaggggatcccgaagaaaaagaaggccgtgtcgttccaggggtggagcccagatgtcccatcagcccatgcactggtgcctgaacctcaaacggtcctcggcctgcaccaacgtgttcaytgttcaacctggycgccatggagcccaytggaytccacggggacagattccacagtggaagaccttcagcggccaattcamaytggytggrcccctkgcttcccttaccctaccctgggatccggatgacgcagacatcacggaaatnctgagttggggttcaacagtggttttggttccgngccaaagatttccattaaccattttgaagggaaaagaccaaccgggtttaaaccagnaagtgnaatttttttaaaagggggtttttttttgttttaggg

SEQ ID NO: 1430 - DNA, 477 bp, Homo sapiens
  SITE (476): n equals a,t,g, or c
  SITE (477): n equals a,t,g, or c
gggcacgaggtggagtctcaaactccatcatctgtgggaccctgttaggccgaagggagaaacaagagtgcagccaccacccctgagccacctgtggctctgctacccacaatttcactgtgaagagtcagctgcctgggccgtgaggtcactgccaccatgagtctkggcatcatggaagaggaagacctggccgagtacttccggctgcagtatggggagcggctgctgcagatgctccagaaactccccaatgttgagggggcgtcggagtccccatccatctggctactggagaagaaaaaggagacagaaatcatgcatcaaactatggtgcagaagaagaagatgtttcagcgcagaatgggaaaccctggaacctgcgctgggaggaactgggcgttaaggaagcccaactgaaggctcacatccagaagtctgagcagttcatccaggagaacggccagggggggggnn

SEQ ID NO: 1431 - DNA, 970 bp, Homo sapiens
  SITE (789): n equals a,t,g, or c
  SITE (862): n equals a,t,g, or c
  SITE (885): n equals a,t,g, or c
ggcacgaggcgaggtgcgctacgtgaaggagccatacatccagtcgcgcttctaccgggcccctgagatcctgctggggctgcccttctgcgagaaggtggacgtgtggtccctgggctgcgtcatggctgagctgcacctgggctggcctctctaccccggcaacaacgagtacgaccaggtgcgctacatctgcgaaacccagggcctgcccaagccacacctgttgcacgccgcctgcaaggcccaccacttcttcaagcgcaacccccaccctgacgctgccaacccctggcagctcaagtcctcggctgactacctggccgagacgaaggtgcgcccattggagcgccgcaagtatatgctcaagtcgttggaccagattgagacagtgaatggtggcagtgtggccagtcggctaaccttccctgaccgggaggcgctggcggagcacgccgacctcaagagcatggtggagctgatcaagcgcatgctgacctgggagtcacacgaacgcatcagccccagtgctgccctgcgccaccccttcgtgtccatgcagcagctgcgcagtgcccacgagaccacccactactaccagctctcgctgcgcagctaccgcctctcgctgcaagtggaggggaagccccccacgcccgtcgtggccgcagaagatgggaccccctactactgtctggctgaggagaaggaggctgcgggtatgggcagtgtggccggcagcarccccttcttycgagaggagaargcaccaggtatgcaaagagscantsgaccagctggatgacctgagtctgmaggaggctgggcatgggctgtggggtgagacctgsaccaatgcggncttccgacatgawgggccccctnaaggcagcatactggccaccatgtgccccgactcgggccctgagcccatcctggccttctacagcaagccgctggcaggccgcaa

SEQ ID NO: 1432 - DNA, 308 bp, Homo sapiens
ggcacgagagaaggcagtgaaattcctggcaaatttttacatcaatggaggcaaacactggacccatggtcacctgaggcagacacaaccagagcccacccagcccaaggcatctgtgctgttgttgggcccggagccggggatggcctgggatgagacacagcccccaaagatgaaggagatcccagttggcctcaggttacagacgggcaccccccaggagtccctgcccacctacacccagaccctgagggaactatwgggcggtggccgcaggcatggcagactttgtggttccagagcgaaag

SEQ ID NO: 1433 - DNA, 332 bp, Homo sapiens
  SITE (146): n equals a,t,g, or c
  SITE (244): n equals a,t,g, or c
  SITE (321): n equals a,t,g, or c
ggcacgaggaccttatggagacttccatgacggtcaatgtggtgggttcatccgggctctgcttccaggaaacacacctggggccccatatgcaaggcaacctgatggtgccagtgttcattggctgccccccaggcaagcgccgnccttcgacatcacctacacgctggaatacagccgcctgaagaacaaacactactttgactgcgttaaacgtggaacccggaggatgccctgctttctnttccgggacattttcttaccccttgttcttgattcaaggtttggtggacaggagattccggcattttccagggcagntatgttctgtt

SEQ ID NO: 1434 - DNA, 529 bp, Homo sapiens
  SITE (433): n equals a,t,g, or c
  SITE (529): n equals a,t,g, or c
gggcttccccgggaacagaagccagggtcacccaggagggatgacacagctgccaagagctctccyggcccagggagcagccggcaccatgaaccgrgcacctccctggttccaagccctgggccagactggaacatgtggggccagaacccaggaggatcctgaggagatggaaggcagcaaacaaaatcatgcacaatggtgaagggtgctctccctgacccatggggacccatggtaggacccatgggagggtggcaggatagagggcccatgagccccccccaggcaacagtgacagcaccaaatgctgggagaattaggggtcctggaaactctcatccaggtccgctgggaacatgacatggcacagccacgttggcagcccgttgggcagtggctcacaaagctccatggacttgaaccacacatncccaaagtgtcacagatattgaacccactgatttgcaaactgacatccacatgaaaccagcatgccaggttcactgcttgactcctcgtcactcan

SEQ ID NO: 1435 - DNA, 107 bp, Homo sapiens
ggacacgagtaactacagcctggggctggtgctcccaccctacagcaccttctacctccaagccaatctcagtgaccagatcctgcaggtcaagtattttgagttcc

SEQ ID NO: 1436 - DNA, 595 bp, Homo sapiens
  SITE (510): n equals a,t,g, or c
  SITE (520): n equals a,t,g, or c
  SITE (563): n equals a,t,g, or c
  SITE (571): n equals a,t,g, or c
  SITE (595): n equals a,t,g, or c
aaagccaaggggaccaaggccgggactgctggggtgaaggtccgggaggctgagtaaggggacggaagggcacaggccatggaaaggaatgacatcatcaacttcaaggctttggagaaagagctgcaggctgcactcactgctgatgagaagtacaaacgggagaatgctgccaagttacgggcagtggaacagagggtggcttcctatgaggagttcaggggtattgtccttgcatcacatctgaagccactggagcggaaggataagatgggaggaaagagaactgtgccctggaactgtcacactattcagggaaggaccttccaggatgtggccactgaaatctccccggagaaagcccccctccagcccgagacgtctgctgacttctatcgtgattggcgacgacacttgccaagtgggccagagcgctaccaggctctactgcaacttgggggtccaaggctcggctgcctcttccagacagaatgtgggatttggactttnttggggaacntctggtggcacttgcttgatacgtgggggccggcttaaccggncaacggtnccttggggatctatgcagcctggn

SEQ ID NO: 1437 - DNA, 145 bp, Homo sapiens
agagaggaggcgggcgtccgggaacgcccggaaggggcgaggccagcgcggggcggggcttatggagatcctctgactccaggccctgtcccctgagctctgccctcggatgtccgaccgcccagagcctgcatgcrccgtgggg

SEQ ID NO: 1438 - DNA, 457 bp, Homo sapiens
  SITE (11): n equals a,t,g, or c
gggcacgtagnccaaaatcaagtgtataaaggtctaatagctttgctgccctgcgagtccccaaaagcccagcagctgtccctgcagactctcaggactgcccagccaatcattgggaccacacacmscagcatcgtggactgcgtgctgaaggtgctgggcacgatgcacctggaagtccagtatgaagccatcgagttgatcaaagacctggtcggttacgatgtgcgccaggcgctgctcaagggcctcgtggcgctgctgataccgtcggtcaaggagatctccaaactgcaggccaagatcctcagtgacccctcggttctycagctcacccccagcctgccgatgtttttgcagcaggccgskgcgcaaggcatcggggtcytgcgsgaacgrcatgagatgcgaggagctctgactkcggtgtgcgtggctaatggccgccatgggaatt

SEQ ID NO: 1439 - DNA, 349 bp, Homo sapiens
  SITE (34): n equals a,t,g, or c
  SITE (332): n equals a,t,g, or c
agccagttcctggaggctgcggccacctccctgncaggctctgagcccccagaagcagagctttgttttggaggttctgtctgggtgcctcgagtaccggaagctgctgaccgtcgtggtggatgccttctacgtggaggatggccgactctgcctgcgggttgaccacagccgcttcgaggtgatctgctacctagccacattcctgctggaggaactcggcttccagctattctgtaacatcatcaagtcccagcccgtgggataaggatgtgcaagttcctcaggttcttcttcaaacccccctgcacctgtgctcatgggatcaaggntgagtggggcctaatta

SEQ ID NO: 1440 - DNA, 581 bp, Homo sapiens
  SITE (35): n equals a,t,g, or c
  SITE (180): n equals a,t,g, or c
  SITE (531): n equals a,t,g, or c
  SITE (536): n equals a,t,g, or c
ggcacgagtgttgccctgcacaacctktgawtttnctccatcaaaactggcaggcagggttacccctgaggagggggtgggggagaaggggtaggggtgggaccctatcatctcccagagggagatcaaggcagccatcatctgtcgaactagatggtcccaggaaggtggcgtcacatnctgcagccgcgtcgacgttgtggagcctccgcggaggacccaggagagccggactaggaccagggccctgggctccccacaytccccatggaggaagctggcggcctctacagagccccaagggcctcggccggtcctgggccgtgagagtgtccagtgccggatggagtgctgtgatgtgccagccgagacactcttacgacgtcctacacgacattgagttaccgcaagaaatggggacagcaacgtcattggagattttttgacatcgcccgttttgacagtcaacgtttgacgtggggttatttattcctgggaggtgttcccaaaggcccttgaaggaaccgtggntgttnatcaaccttccgtttcctgggtttccccatggggcgttggattaa

SEQ ID NO: 1441 - DNA, 606 bp, Homo sapiens
  SITE (334): n equals a,t,g, or c
  SITE (476): n equals a,t,g, or c
  SITE (489): n equals a,t,g, or c
  SITE (528): n equals a,t,g, or c
  SITE (575): n equals a,t,g, or c
gggcacgagtgctggggtctcaccctggggacacaggggagcctgagggacaacgggaaaagggcaaagtggagcagccgcaggaagaggacgggataacctcagacccgggcctcctgagctacattgacaagctgtgttcccaggaagactttgtcaccaaggtggaggccgtcattcacccccgattcctggaagaattgctttccccagatccacagatggatttcttggccctaagccaggagctggagcaggaggaaggactcacccttgcccagctagtggagaagcgcctcctgtccttgaaggagaaagggtgcgggagggcagnccctcgacatggcacggccaggttggactcaagtccttctgagtttkcagytggccaagaagcagcgagagaggtccctgacccccaacaaagggtcaacggtggaaaccttccaccccagacaggttgcccaggaaccctnagggacagggcanagtgcgcactggcatggccaggtccgaagaccctgctgngcttttgggatgtcaaggattcccccaggcttgaaaggctgtccggncaacctcttcttcccaggaccacaagaccca

SEQ ID NO: 1442 - DNA, 217 bp, Homo sapiens
  SITE (138): n equals a,t,g, or c
  SITE (202): n equals a,t,g, or c
cagggtattttgaagcttgagaagggagcatcaaagggagccgggtgaagatggtcaagtaatgcctttaatctggcagttgctgagggtggagagctgccagrctgggrgctaatggggaagagaaccgtcatttgncactgtatggttgggcaggttgtgtactgcacaagggtttccagccaagcagtggccctggctnctgagaagactgacg

SEQ ID NO: 1443 - DNA, 326 bp, Homo sapiens
tgtgctcactgcccagtagcttgggctcctgacactgatgacgagaagcctcatcagtacccagccatctgctcctaccactgggatgtccctgaggactgggaaggcttccaacacactcaggggacctgggttccctggtctcaggatgccccagagtcccctccccagaccatccgcttccagcctaccgtagaggaaaggcccctcaaaacaggcatatggtccgagctgggcctaagggcctatgtgtatcctgtgraaccccccamctcccagccctgaggttcctagscacaagracggttggggagggggcggtgcca

SEQ ID NO: 1444 - DNA, 1110 bp, Homo sapiens
  SITE (912): n equals a,t,g, or c
  SITE (1034): n equals a,t,g, or c
  SITE (1036): n equals a,t,g, or c
  SITE (1062): n equals a,t,g, or c
  SITE (1079): n equals a,t,g, or c
  SITE (1091): n equals a,t,g, or c
agacaccccggagcagctgtgggaagagctgtgggatcccctattgcatcacaaagcggccctggagggctggtctttattttgatgaggctgagaagggaaggctgcgggcatgtttaatccgcacgctttagactccccggctgtgatttttgacaatggctcggggttctgcaaagcgggcctgtctggggagtttggaccccggcacatggtcagctccatcgtggggcacctgaaattccaggctccctcagcagaggccaaccagaagaagtactttgtgggggaggaggccctgtacaagcaggaggccctgcagctgcactcccctttcgagcgtggcctgatcacagggtgggatgacgtggagagactctggaagcacctctttgagtgggagctaggcgtgaaacccagcgaccagcccctgcttgcaacggagccctccctgaaccccagggagaaccgtgagaagatggcagaagtcatgttcgagaacttcggcgtgcccgctttctacctgtcggaccaggcggtgctggctctctacgcctctgcctgtgtcacgggcctggtggtggacagcggggatgcggtcacctgcactgtccccatctttgagggttactccctgccccacgcagtcaccaagctccacgtggcgggcagggacatcacggagctcctcatgcagctgctcctggccagcggcacaccttcccctgccagctggacaagggtctcgtggacgacatcaaaaagaagctgtgctacgtggccttggagcccgagaaggagctttcccggaggccggaggaggtcctgagggagtacaagctgcccgacgggaacatcatcagcctcggggacccgytgcamcaggcgcccgaggccctgttcgtgccccancagctgggcagccagagccccgggctctcgaatatgggctccaagagcataccaagtgtgataccgacatccagaagatcctctttggggagaatgggcttgtcggggggcactaccctggntncacgggcttggatgaccgggtttttnaaggaacttggaaccancttgggcctccnaaggaacaacccccccatt

SEQ ID NO: 1445 - DNA, 826 bp, Homo sapiens
  SITE (698): n equals a,t,g, or c
  SITE (754): n equals a,t,g, or c
  SITE (783): n equals a,t,g, or c
  SITE (790): n equals a,t,g, or c
  SITE (794): n equals a,t,g, or c
  SITE (809): n equals a,t,g, or c
cgggctgctggtggacaccgcccgcacctggctgcccacccagccgcagaggaagtgcgccgtccgggtccagagccgccccacccccatcctgccgctgatctacatcagggaaaacgtatcggcctgcgccggcctccacaactccatccgctcgctggagcacgtgcaggcgcagctgacgctgtcctacagccggcgcggagacctggagatctcgctcaccagccccatgggcacgcgctccacactcgtggccatacgacccttggacgtcagcactgaaggctacaacaactgggtcttcatgtccacccacttctgggatgagaacccacagggcgtgtggaccctgggcctagagaacaagggctactatttcaacacggggacgttgtaccgctacacgctgctgctctatgggacggccgaggacatgacagcgcggcctacaggcccccaggtgaccagcagcgcgtgtgtgcagcgggacacagaggggctgtgccaggcgtgtgacggccccgcctacatcctgggacagctctgcctggcctactgccccccgcggttcttcaaccacacaaggctggtgaccgctgggcctgggcacacggcggcgcccgcgctgagggtctgctccagctgcatgcctcctgctacacctgccgcggcggctccccgagggactgcacctnctgtcccccatccttcamgctkgamcaagmarcaagggcttctgcatgggacccancamccccgacagccggcccccggctttanaacttgnccgnctggtccccaacaancggttggcccaagcctt

SEQ ID NO: 1446 - DNA, 113 bp, Homo sapiens
  SITE (45): n equals a,t,g, or c
cacgcagggacatctgctgtaggaggtttcccatctgagggtctntgtctagagacttctagacgttcttctgtccctgggctccgcaggagttgcgttttccttgaccaagg

SEQ ID NO: 1447 - DNA, 275 bp, Homo sapiens
ggcacgagcttgactggtgaggcccaaagccggtggccccgcagaggcgggagtggggccatggctgaggcgcctgggcccagtggcgaatcccgaggacactcagccrctcagctgccagcggaaaaaactgtcgggggaccatcgaggggctgctcaagctccgtgcytcagagtgtcccagttggtgctccaggccatctccactcacaaagggctgactytggcacttctkcaagaaggagctcggaaacgccggytacgaatgcggcagg

SEQ ID NO: 1448 - DNA, 588 bp, Homo sapiens
  SITE (566): n equals a,t,g, or c
  SITE (574): n equals a,t,g, or c
  SITE (575): n equals a,t,g, or c
  SITE (579): n equals a,t,g, or c
ggcacgaggaggaaccaaagggaaaagccaccttcccaggcacagccataacatccacctcactcaactgcttgtcaagttcaccaccaacacagagggggctcagataatcaagaaacaatgtcgagtgatgataaaagtaaatcaaatgaccccaagactgagcccaagaactgcgatcccaagtgtgaacaaaagtgtgagtccaaatgccagcccagctgtttaaagaagctgctgcaacgctgtttcgaaaagtgcccatgggaaaagtgtccagcaccacccaagtgcctgccctgcccctcgcagtctccttcatcctgccctccccagccctgcaccaagccctgtcctcctaaatgcccttcatcctgcccacatgcttgcccacctccctgccctcccccagagtgaggcactgtgggcactacccaaccccaccaccactgccacctccaccatgtacaacgctgtggggctggagactgaaaccatgaactgacaagtaaacgtgttcctctgctgtgmaaaaaaaaaaaaaaaaacttggggggggcccgggncccaattnncctntaggggggg

SEQ ID NO: 1449 - DNA, 348 bp, Homo sapiens
  SITE (7): n equals a,t,g, or c
  SITE (313): n equals a,t,g, or c
  SITE (346): n equals a,t,g, or c
gggcagnggtagattgcctggtctcgccgcattcaaaatgaggcttatgatcagtacttttttcagccccacattcctctycagaatggcctctgccctacagcacctggcccatgtggcaccccatgggcctgtcctctgctgttgtgaggtcgacctcasgacccagcacaggagctkgaggcgaggtgcacgcgaggctcttcacagcccaggaaggcagcctgtcaccctgctctycgagccaggggccaaggtgtggggggcacaggccatcctcatcctgccaggcccccgtttcaggagtggggtngtgccaatgcttccacttagaaccctggacttngg

SEQ ID NO: 1450 - DNA, 325 bp, Homo sapiens
  SITE (12): n equals a,t,g, or c
  SITE (279): n equals a,t,g, or c
gggcagaggcgncatggcacaaggtgcactcggaggctgagcgccttgaggcccgcttccaggatgtgcggggacagctggagaagctcaaggctgatatccagctcctcttcaccaaggcccattgcgacagyagcatgatcgatgacctccttggggtcaagaccagcatgggagaccgggacatgggcctcttctgagcctcattgagaagcggctggtggagctctgacagtgcaggccttctacatgcccagagcttaacttcctggccgacgntgccctcctagtgctgggccagagcttgaggacttccgaagaagat

SEQ ID NO: 1451 - DNA, 350 bp, Homo sapiens
  SITE (270): n equals a,t,g, or c
  SITE (343): n equals a,t,g, or c
aagggagtgtgatgtgacgaggccgcagagagctcagcccccaggatggacgggaaaccctgggtcaccgttcttggagggggacatcagtgcctggcacatagtagatgcccaaagaacatctgctgactgacctcacctaaagcatttgggcagttacccacaggtgctccatgacamcttytggccagcagaaaggacctgcagccaagtgctctkgtggctkctactgaacaccaaccgctactcccagccttgggggtgacaggnaaagaatgggaccgcagtgattgaaacttatttggggcaggaagcttggcctggtatgacctgaggggcagtnatgtcct

SEQ ID NO: 1452 - DNA, 226 bp, Homo sapiens
  SITE (190): n equals a,t,g, or c
  SITE (224): n equals a,t,g, or c
ttaattctattcctggagggcccagtggagcagggccatttgggacgccaggaaggtagaaggagcaccgctgccagggcatgtggtgtcccggaagatggccaaggcaggctgcccagagtggaaaggatggcaacacgtgccaggctgggatagtgacttgaagatgaggagcctgggctgggcgggncgcagcggcagggaaggccccacatcgagggttnca

SEQ ID NO: 1453 - DNA, 336 bp, Homo sapiens
  SITE (329): n equals a,t,g, or c
agcctggacctgggatcaggaaggggttgcagggagggatggaggggctgaaaaccctgggcccctgcggccacccccacccccagtgtcccccaaccccagcctccagcagccatggaggaggcctggaccagccctgccaggatttgtagggtggccctgcctgggccccatctcctctgctcactcagtgcagtcccagagacctttcccagtcccaggggcagggggcagtgggcccacagtgggagggcgargytcccgggtttttcttttccagccaggagcagagagcgagagacatttaggggccgagacaaggagacctnggaggca

SEQ ID NO: 1454 - DNA, 382 bp, Homo sapiens
aggaggaaggagcccctccctgggagccagacccccacaccatggcgagcgtggtggtgaagacgatctggcagtccaaagagatccatgaggccggggacacccccacggrggtggagagctgctcccagctagtcccagaggctccccggagggtgaccagccgrccaaggggatcccgawgaaaaagaaggccgtgtcgttccacggggtggagccccagatgtcccatcagcccatgcactggtgcctgaacctcaaacggtcctcggcctgcaccaacgtgtcactgctcaacctggtccacatgggttgaaaaaaaaaaaatttaaaaaaaaaaaaaaaaaaaactcgagggggggcccggtacccaattcgccta

SEQ ID NO: 1455 - DNA, 526 bp, Homo sapiens
  SITE (113): n equals a,t,g, or c
  SITE (468): n equals a,t,g, or c
  SITE (477): n equals a,t,g, or c
  SITE (513): n equals a,t,g, or c
gttctcgtcatactattatagtggttgagatcacagccttgggggtcagaccctgcccagctccaccactttctagctgtgtcttcttgggcgagccacttagccatctaagncttggtttccatatctgtgctgggggagagcagcagtgcccacctcgtagcgttgctgtgtggatgaattacggcctgcatatggtaggcgctgcataagtgcacccgtccaatctagggctggctggctgtaaaccggytcamctctcagaggaaagcttgggaggacaggaaagggtagacagcagagacagatcaatcaactcaatcatggagatcaatgacatgtgtggtgaccagagtgccctctggtcttaatcactgactcagacagaacagtgcacgccatgtgcttcaatgatacagcccttacatgctcacatttcaggtggatggagctctgcttctgtttgantcttcccantctgaattggttgtcactggggaggtggacacttantctgtgttcccca

SEQ ID NO: 1456 - DNA, 709 bp, Homo sapiens
  SITE (523): n equals a,t,g, or c
  SITE (570): n equals a,t,g, or c
  SITE (639): n equals a,t,g, or c
  SITE (653): n equals a,t,g, or c
  SITE (670): n equals a,t,g, or c
  SITE (685): n equals a,t,g, or c
  SITE (703): n equals a,t,g, or c
gcgacatctgctggctggtgtggcgtccagcactgatgtgtctaccttctctgaaggtgactgcaaggagcctgacaagtgctgctggagacacaagcagtgcactgggcacatcatstaccctttcgcctctgactgtgtccgccacagcctgcacctacactctgtcaaccactgcaactgtaattctagctttgaattggtgctgccagcccagtcccagctctgcacaccttgctctgctctaagagaaatggggaggaggtctgttggcctgaggcaggcccagcggaagcccactgtccctcaggcttctggctctgggtccctgggggagtgatgggagccaggctgagagtcccatgtgtggcaggctgaaggactcttcagaggatagcagcagctcccggggcgcgggcccaacctgctcccatgtcatcgagtccccttgctttgagctcacaccggaggaggagcatgtggagcgattccggtatggctggtgcaaaagctacagacctgnctctgtggcagtgatccaccatccactctaccatgagtgtggggcanatgatctaaatgaagaagaggaagaaggaggaggagggaaagcaagccccccattcccggacacaggtnggggccccggccanccggcttccccttggancctaaggcacccaancaatgggcccacttgggnaccccc

SEQ ID NO: 1457 - DNA, 1043 bp, Homo sapiens
ggcagagccatgggtgcaggtccacctccagggcctgcagaaggtggtgttccggagctggcagcaggcagcagctcatcagagatgcacagtgacccggccagagcagctgctactgcagagctacttccaggcctggtgtgaggttgtaagagacacgggggtgctccgggcccagcatcaagcctttcaggatggcctgaggagaagagcactgggggccgtgtttgccacatggcgggaagcccaggaagtggcagccggggcacaggagcagcgtgtggcccaggcctcccttgcccgctggagaagctgcgggcagcaaggccaggaagatgggcagcagaagaaggcccgggccccacaggccttcccagcatggccagtggccccgggcatgcaccatgaggcccagcagcaggcaggagagagcgctggggcccaggcagcccagtgctggacttggtgctggctctgtgggtgcatgagtcctgtcggggccaggtcagccgagcccatgcttcctggaagccgcgagcctgggtcctagaggcctcggtgcagtcggcggtgcgcggcggtgtccagcgagccatcctcacccagctccggccggctgagctcaggcgcttcctgcggacagtgcagctcagggtgcggctgggactgccaggggccggcaagacccgcagctgctggacacaggccacagagctggtgcctcccgcgccatcaytgcagtgcagcctgggtggacggaggaagccaaggggaacggcctgggytcagaggtgcagggaacattccytytgccctgccttccagctctggccacagtggcctggacagagtagctgggtcccaggcctgcccctgtggacgagggaccagggaccaagagcgcactccagccctgagcccagagcctgcaaagcccaaagcaaggcccataaacggaggctacgtgctcgtcctgcaggatcctggaaaagcaggcccaggcccatggctctgccttcttctggccctgaaaggtcacgaat

SEQ ID NO: 1458 - DNA, 605 bp, Homo sapiens
  SITE (245): n equals a,t,g, or c
  SITE (416): n equals a,t,g, or c
  SITE (559): n equals a,t,g, or c
tggaactgctgcaaggacttgatctttgacctgggtgaccctgtgagatgggagtacatgctcctggggactgataagctcagctgtccttgactgaagaagacgacatgggataaacgatgaggatgatgtggaaaatctgggcaaggaggatgaggataagagcttcgacatgccccactcgtggktggagcagattkagatctycccggaagcatttgagacccgctgcccgaacgggaagnaaggtgattcagtacaagagggcaaagctggagaaagtgggccccgtacctcaatagcaatggccttgtragccgcctcaccacctatraggacttgcagtgtaccaatattttggaagataaaggaagtggtaccagaaccgggaagacatgctggagctgaaacacatnaaacaagaccacagacctgaagacagactacttcaagcctggccacccccaggctctgcgcgtgcactcgtacaagtcccatgcaacctgagatgggaccgtgtcattgaagttttatgaaacggcccgtgtggatggcctgnttgaaagcgggaggagacacccagggacaatgaacagggtgattat

SEQ ID NO: 1459 - DNA, 1319 bp, Homo sapiens
ggcacgagggaagtcattgttcccgaatcctgctgctgagcctcaagcagctgtacacagaactgctgcaggagcatgggccccagggcctgaatgagcttcctgccttcatcgagatgagggacctggcccggaggtttgccttgagttttggaccccagcagctgcagaaccgtgacctcgtggtcatgctacacaaggaaggcatccagttctccttgtctgagcttcctccagctggctcctccaatcagcctccaaatctggcattcctggagctcctttcagagttttccccccgactcttccatcaggacaagcagcttttactgtcctatctagaaaagtgcctgcagcatgtctcccaggcacctggccatccctggggcccagtcaccacctactgccactccctcagccctgtggagaacacagcagagaccagccctcaggtcctccccagctccaagaggaggcgcgttgaagggcctgccaagcctaacagagaggacgtctcctcgtcccaggaagaaagtctgcagctgaacagcatcccgcccacgcccaccctcacctccacagctgtgaagagcaggcagcccctgtgggggttgaaagagatggaggaagaagatggctcagagttggattttgcccaggcgtcagcccgtcgcaggcaccgagaggtcaaggttcttgggtccacaatatttccagactccacacaacccttcaggtcctggcctgggcaaccagctgatgcgactcagccttatggaagaggacgaggaagaagagttagaaatccaggatgagtcaaatgaagaacggcaggatacagacatgcaagcaagtagctactcttccaccagtgagcgcgggctggacctcttagattctacagagctggatattgaggatttctgacaggactctgggcccctccccagctccactccctacctcaagaatgtgaccatttggaaaaggcaaagagaaaaggagcaaaatgaagcattcccccaggcttcagccctgggctctgaggggaaagagttgggcattgtttttctaacctaacctttccctctggggtagagaagccgagagaccctgtcctccctwatgcactgtggcccagtccccttgcctttttcctgttctgtttggagtggagaagggcagcacctctgtgtttaatggaaatagcccatagtctcctggatttttggaacatctttctcagcctattttgtgtcctaatgattcgctcaataaacatgtttgaatccamaaaaaaaaaaaaaaaaaatcaaata

SEQ ID NO: 1460 - DNA, 477 bp, Homo sapiens
  SITE (348): n equals a,t,g, or c
  SITE (428): n equals a,t,g, or c
ggcagaggttctgggcaccctctcacatcccagtctctgatcagggaaagcagggcacagccttgggaagaatggataagcatggtgtgaagacccccttgtggaagaaggaaacggaagagctccgggccgaggacgcggagcaagaggaagggaaggaggggtcggaggacgaggacgaggacaaccagaggccgctggaggacagcgcgacggagggcgaggagccgccgcgggtagcggaggagggcgaagccgcgagcggcgctcagtgtcctactgcccgctgcgccaggagtccagcacccagcaggtggcgctgctgcggcgcgcggacagcggcttctngggctggctcggccccttagcgcttcttggcggcctaacagctcccaccgacaagaagcggagcttccggaggagccgtncgtgcttgagatccgcgacgaccgcgggccggggggcttgtctttcttt

SEQ ID NO: 1461 - DNA, 437 bp, Homo sapiens
taatatttccagcgcccaccagtccctcagccaaagagcacactggaggcggagaggcagcatccaccagcccgctccccgcctccaggacagagcctcggtctgcatgggggtgacaggtgcccatggatttccatgctgcggcaaagggtcagtggaggttgcagagatgcgagatgacttaagtcaacaccagatacaagaggaacaggagctggaggcagacatgctagagcagaagccccaactccaagtggacctggacctggacccagacccagacccagacccagaactggagatcggacagrtgccggctttactggagtcagagctatacccagccctcaagcttgaagctgagctggacacggaagccaactcgaacgaggagtcttactttgaagaacccatgcagttgtattcaagatagagtc

SEQ ID NO: 1462 - DNA, 630 bp, Homo sapiens
  SITE (568): n equals a,t,g, or c
  SITE (578): n equals a,t,g, or c
  SITE (582): n equals a,t,g, or c
  SITE (630): n equals a,t,g, or c
agcgggtcttcaagatgacattccaccactcaatgaccttcaagcagatcgtgctggttggtcaggagacccagcggctctactgctcctcacagaggaaggaaagatctactctttggtagtgaatgagacccagcttgaccagccacgctcctacacggttcagctggccctgaggaaggtgtcccactacctgcctcacctgcgcgtggcctgcatgacttccaaccagagcagcaccctctacgtcacagaccaggggggagtgtattttgaggtgcataccccaggggtgtatcgcgatctctttgggacccttcaagcctttgaccccctggaccagcagatgccgcttgctctctmactgcctgccaagatcctattctgtgctcttggctacaaccaccttggcctggtggatgaatttggccgaatcttcatgcaaggaaataacagatacgggcagctaggaacaggggacaaaatkgaccgaggggaacccacacaggtccctctgtgtgctgtgccctctgtgccaacagggagtgctatacatctgtccagccanggcattgagnaganggcccctattgcaacttccagcagaagggtgtgggcttcttagcccan

SEQ ID NO: 1463 - DNA, 515 bp, Homo sapiens
  SITE (507): n equals a,t,g, or c
ggcacgagcactagttaggaagaagacaaaatggaagcccagctgggctacatggatgagaaagaccccggggcacagaagccaaggcagcccctggaagtccaggcccttccagccgccttggatagagtggagagtgaggacaagcacgagagcccagccagcaaggagagagcccgagaggagcggccagaggagacggagaaggccccgccctccccggagcagctgccgagagaggaggtgyttyctgagaaggagaagatcctggacaagytggagytgagyttgatccacagcagaggggacagttccgaactcaggccagwtgacaccaaggytgaggagaaggagcccattgaaacacagcaaaatggtgacaaagaggaagatgacgaggggaagaaggaggacaagaaggggawattcaakttatgttcaacatcgcggacgggggttcacggattgcacacgttttgcagaacgaggagcgggttgtttatcctntgggaaat

SEQ ID NO: 1464 - DNA, 343 bp, Homo sapiens
gccaaagagggtcagggtacaaagaagccctggaggtttctgcagacgatgcggctggggcggacgtgctttacctgagcagcccccagcaaggcagccagcccagcgagtccagcggtggcgactccagagggtcgaactctcccatcccccccacgcagaggacaccgacagcgatggggaggaaccacagytgtrcttcacggagccccagcagytcctggatgtcttccgagagyttgaggagcagaacctgttcgytgatccagaacagccaggagacggagaagaccytggaggagctgagccacaacctgaaacacaacccagttccgcatggaca

SEQ ID NO: 1465 - DNA, 1491 bp, Homo sapiens
gccaacatctcccgcaggaccccctaatcttcagggcagctcccagagcatggatccctcctgattccactcagcccgatgttcctcacagtcaagctgctcctgggccagagatgcagtctgaaggtgtcagggcaagagagtgtagccacgctgaagagactggtgtccaggcggctgaaggtgcctgaggagcagcagcacctgcttttccgtggccagctcctggaggatgacaagcacctctctgactactgcattgggcccaatgcctctatcaatgtcatcatgcagcccttggagaagatggcgctaaaggaggcccaccagccgcagacccagcccctgtggcaccagctgggactggtcctagctaaacactttgaaccacaggatgccaaggccgtgctgcagctgctaaggcaggagcacgaggagcgcmtgcagaagataagcctggagcacctggagcagctggcccagtacctcctggcarargagcctyacgtggagccagctggagagagggarcttgaggcgaaggcacggcctcagagctcctgtgacatggaggagaaggaggaggcagcagctgatcagtaaacgggccatcctacccatttgcatgctaaaattctcccggcctcatccttacgtgttccctggtgacttttcctactacttcctgctgatgtggatgcgtccacacccctttttgaaccttccaagcagctggagggtttttggatccctgtcccctcttgggcctgaggtcctccctctgaaatgcagagtgaaccaaccctcatcaccatgcttcccctagaagggttctgatcaccggagggcagccccaaaggccacagtcccctcctgtgctggcagctttgcccacacatacccagcagctccccaggctgaaagcagccctggcccagggtctccatggttctaggcagaccctctttctccttcgggacagaaagacaatgtgagttcattttcctccatcctcagaccgtgacatctcccctagkctccccagcagccaagaggagaggaatgtcaggtagctgccccttgccttctgggtgaggctgcccctgctgttctcctgcttgtgttccagcttaagggacaggcacagcagaggtgagagtgggaggagggcacgtaccgggtgccagccctggagccctcagggagacagacacagaccaagaatagcaggaaactgagcctcaggcagaaaaaaagttcagcaaagtcatacactccctgtggccagcgtgaacagagccatgccccaccctcccagactgatcagtcagtaggtatcacagctcacattacctgcccagcgctcccaaggctccctggaaggaaaaatggtatctgtcaatgaggatccttgccctcacagagcacgcagcctagatgcagagagctgctatacatgtgaaaagtaaagtggtgacatgaaactagaaa

SEQ ID NO: 1466 - DNA, 1024 bp, Homo sapiens
  SITE (93): n equals a,t,g, or c
  SITE (126): n equals a,t,g, or c
  SITE (177): n equals a,t,g, or c
  SITE (797): n equals a,t,g, or c
  SITE (990): n equals a,t,g, or c
  SITE (1000): n equals a,t,g, or c
  SITE (1012): n equals a,t,g, or c
  SITE (1017): n equals a,t,g, or c
  SITE (1022): n equals a,t,g, or c
tctcaggccccggctaaatggggaaagccccttgaggatggggccgtgttagcaggttactctcagtcctcagcacttccgcatccattattnctcttaatgaattaatatctgtgaggcgtgtgntataaataatattccctaactggatttaaaaggggagcttcctgggaattncaggctctttaaggagtgtggcccttgtcaccctggggaccagggccactgcggccagaggtgtcagccagggtgaggacctcttccttttctttgagagcaggactaaattaacaagctgaagccagcttaccttggatgtggatcattctggcagtgttcaactttgagacaaggaagtgtgcgacattattgtcagcggagagaggccccaggcagaaggtcacttcctgaggtgtctggggagcactgcggcaagagacccccatttcccagcaaatgcttccttamtcaatctttcggytacctggactttaytaccacatstacagagccmtcattggsttctaatgatgagcctgaggcaccggggcgscttytgratcatcagagccagatgaaattgtgtgttattgagacgtgctgttcccatctttgcaaagaggccatggatgcatgcaatgaaagcttttgctgagccgaatacgctgttagcacgaccgtctccccactgacgtattgcaccagacaaacaccagacgtcaaggacattgggaaagcaccaacatattcagccaggcagtgtggggatgcacccccagtcccgagatgaaaacctncagccagcccagcgcttcccagcagggagcacagaacaccatgaagcctcaagatgttgctttcctaaaacagaccagcgtggttcatggatttggggctctaagtgccccccatttcccttctcctagacctcgtccccagcatcgcgacgcttttggggctggagcacccagctttggaaggtaaactttnctaacctggnctcaaccttggnttcgnctctnaa

SEQ ID NO: 1467 - DNA, 575 bp, Homo sapiens
  SITE (491): n equals a,t,g, or c
  SITE (572): n equals a,t,g, or c
gtttaagtgtgactccaaacttccagcaattgaccaaacatcagtcaagcagaaacataaaagtaccatgactgtaaggaaagcagagaaagtggaccccagcgaaccctctccaggtggcagcagcaagcaccccctgttctgtgttgaatacaccccttactgctccgtcttcgctttctcccctgtcctgcagcccaataccaattactgctgcctcctcctgccactagtgccacctgcctccccagtggcccaggaacctcctgactgtcctctccctctggttaccgttccctccttcacaagcaccgcttcacctccccggaccccgtgcccgagtcccccgccgcgctgtgctacttccccatctcctgccccactccggctgagacccctgtgctgtgccttcagggccccagaaggcccagtaggatttacctcatgtggkaagtcactyttgcaaggcacacagcacagcgcaagtcggngagaggggacttcgggcttccggaaggcaggtggacaggagaggggccagaggccacaccaagaacaataccaggcggggnggg

SEQ ID NO: 1468 - DNA, 484 bp, Homo sapiens
  SITE (409): n equals a,t,g, or c
  SITE (416): n equals a,t,g, or c
  SITE (484): n equals a,t,g, or c
gcagcagccatctccttcctgcagaagcacgccgacccgctccacgacctgtccttcgacaacagtgacctggtgatgctgaaatccctccttgcagggctcagcctgcccagcaggracgacaggaccgaccgaggcctggacgaagagggcgaggaggagagctcagccggctccttgcccctggtcagcgtctccctgttcacccctctgaccgcggccgagatggccccctacatgaaacggctttyccggggccaaacggtggagggtgagtcargccctgsttcamccacgccagatctgctggaggktctgagtgacatagacgagatgtcccggcggagacccgagatcctgagcttcttcttcgaccaacctgcagcggctgatgarcttcggccsargnagtgttngccgsaacctygccttyagcctgccctgcgstcatgcagaacagccccagcattgcagccgctttccn

SEQ ID NO: 1469 - DNA, 766 bp, Homo sapiens
  SITE (685): n equals a,t,g, or c
  SITE (722): n equals a,t,g, or c
  SITE (730): n equals a,t,g, or c
  SITE (743): n equals a,t,g, or c
  SITE (753): n equals a,t,g, or c
  SITE (761): n equals a,t,g, or c
gcacttttggggaccttcatttaggtgagctgccacgtccggaggagggcagcaagaatgaaagacctctagttttccagactcccggagccctggtctctacaccacatggacgttatccacctcctctgtgtcctcccaaggcagcatttcagaaggtgatccacggcaaagccgtcccttcaaatccgtctttgtgcccactgccatagtcaaccccgtgagaagcacagccggccctgggactttaggacaagggtctcttcggaaagggcggagcagcatgagaaagaatggatccctgcagagacccctccagtccgggatccccactctcgtggtaggctccctcagacgcagccccaccatggtccttcggcctcagcagttccaattctaccagccacaggggatcccctcctccccctcagccgtggtggtggagatggggtccaagcctgccctcacgggggagcccgccctcacgtgcatcagcaggggcagtgaggcccggatccactccgcggccagctccctcattatggaagacaaagaaatccccatcaagagtgagcctctgccaaaaccggccgcatctgccccaccatccatcctggtgaaaccagaaaactcaagaaatggcatcgaaaagcaagtcaaaaccgtgagatttcagaattacagnccttctccaccaaacattacacttccatcccaacttncggaaagnctgaacaggcagncacccttaangcgtccancctgg

SEQ ID NO: 1470 - DNA, 1208 bp, Homo sapiens
  SITE (530): n equals a,t,g, or c
gcaggaatgacaccaaggaagatgtctttgttcaccagacagctattaaaagaaacaaccccaggaagtttctgcgcagcgttggagatggggagactgtggaatttgatgtcgtggaaggagagaagggcgcagaagccactaatgtaactgggcctgggggagtacccgtgaagggcagccgttatgcccccaaccgacgtaagtcccgccgattcatcccccggcctccctcagttgccccaccacccatggtggcagagatcccctcggcggggacaggacctggcagtaaaggggagcgggctgaagactctgggcaacggccccgacgatggtgccccccacccttcttctaccgacggcggtttgtgcgaggcccccggcctyccaaccagcagcagcctatagagggcactgacagggtagaacccaaagagacagccccattggaggggcaccaacagcagggagatgagcgagtccccccgcccagattccggcccaggtaccgaaggcctttccgcccnaggccacgccagcagcctaccacagaaggtggggatggtgagaccaagcccagccaaggtcccgctgatggttcccggcctgagccccagcgcccacgaaaccgcccctacttccagcggagacggcagcaggcccctggcccccagcaggcccctggcccccggcagcccgcagcccctgagacctcagcccctgtcaacagtggggaccccaccaccaccatcctggagtgattccaactcaactcaaaggacacccagagctgccatctggtatctgccagtttttccaaatgacctgtaccctacccagtaccctgctccccctttcccataattcatgacatcaaaacaccagcttttcaccttttccttgagactcaggaggaccaaagcagcagccttttgctttttcttttttcttccctccccttatcaagggttgaaggaagggagccatccttactgttcagagacagcaactccctcccgtaactcaggctgagaaggaaccagccagctcttacctcctcctggttgcttttcttgcccccaccccaagtttatttttgttttcccccggccccctacctctgaagccattttatgatctgtcatgtgccacctgagcctccagtaaaaacaaaaacaggctttcctgtgaaaaaaaaaaaaaaa

SEQ ID NO: 1471 - DNA, 547 bp, Homo sapiens
  SITE (543): n equals a,t,g, or c
  SITE (544): n equals a,t,g, or c
gctcgtgccgaattcggcacgagaagtgacctctggcatggtgctggggggccaggaagccccaggcagcttctgcctgtgtttgaacagagcctggaaccatgctgagaccctagatcccccagggatggggggcccccaagatggccgggatgcccccgtgctgctgtcagcttcaccctctctgggatccctggagctccaggacctgaccacccgctacctaccccgggggatgtgcatctacctggacccaaaggaggctgagcacctgggcacttccagctccctgcacctccggcataagcaggcgcagctgcaggcgctagagaccacagccaaagtcctcaagcagcgggtcgatagcctcaccgccaagctkcagggtgccgaagcgcyggacaccgtcagggacccagctgtgggcctgctgcgctcgtgcccccacagcctacctgccgsccccacgctcgccamccccacgcttgccaccccagcctgccctggarccttggggcccaactggggcagaggggcacctgnngag

SEQ ID NO: 1472 - DNA, 808 bp, Homo sapiens
  SITE (728): n equals a,t,g, or c
  SITE (751): n equals a,t,g, or c
  SITE (760): n equals a,t,g, or c
  SITE (793): n equals a,t,g, or c
  SITE (800): n equals a,t,g, or c
gccaacctccgttccggccccgtacccggaggcccagccgtgggcacgatgctgcccagctccatccagatttcgggggagccgctgtccggcgccgaggtgcgggacatctgccgcggscttcgcgacaacgccgtgcgcctgctctcactgcgcggctgccgcctctgcgaccgcgactttggccgcatctgccgggccctggccggggccacgtccctggcgcagctcaaccttaacctgggcgtcgtgtccagccccagccgcatcaagcagctggctgaggctctgcggaccaaccgctccatccagtccctcttcctgcatgggagccccctgacagatgcggggctggccttgctgaacccagccctggccctccaccctgccctcgtggctctggacctgggggactgcatgctgggtgatgaagccatcaacctcatctgtggcctyctgcccccagatggggccaaatctggcttgaaggagctaacgctgagtgccaaccctggcatcacccytaagggctggagccgscttgscattgccgkggcccacagytyccaggtccgsgtcctcaatctggattacaaccccctgggtgaccatgtggcaggaatgctggctgtagctgkggcctctagtcgtaccctagaaggtctagacttggagggcacaagggctcaccaaccaagtcagcttagaaccttgttggacaatggtangaaaattaccccacaggtttgcngaacctggnggttggcttgagaacagcattaggcccaaaagnttgaagnaaacagaa

SEQ ID NO: 1473 - DNA, 1372 bp, Homo sapiens
attcggcacgatgcagacccggggcaggggcggatggagcggaacggctaggggtcttgagaagcaatggccacagaagcccctgtgaatatagcaccacctgagtgtagcactgttgtcagcacagcagttgacagcctcatttggcagccaaactcactaaatatgcacatgataaggcccaagtccgccaagggacggacaagaccgagtctgcagaaatcccagggcgtggaggtgtgcgctcatcatataccatctccgcctccagccattccctatgagttgccaagcagccaaaaaccaggagcctgtgcacccaaatctccaaaccagggagcttctgatgagatccctgagctgcagcagcaagtacccactggggcttcctcttctctcaataagtatccagtccttccttccatcaacagaaagaacctggaggaggaggctgtggaaaccgttgccaaaaaggccagctcactgcaactgagcagtatccgggctctttaccaagacgagacgggcaccatgaagacaagtgaagaagattccagagctcgagcttgtgccgtggagaggaaattcatcgtccgaaccaagaaacagggctcttccagggctggaaatctggaggaaccatcggaccaagaaccaaggttgctgcttgctgttagatcaccaacaggccaaaggtttgtacgccatttccggccaacagatgatttgcaaaccattgttgctgtggccgaacagaaaaacaaaacctcctaccgacactgcagcattgaaacaatggaggtgcccaggaggcgattttctgacctcaccaaatctctgcaagagtgcagaatcccccacaagtctgtgctgggcatctcactggaagatggggaagggtggccctgagtccacagccacccagctgaggtcctgggtctctgagcaaaggagcatgcttgggcgttgtggcctcttaggcagcctgtttcaagtgccatgtggacctggtgcagctgggaagcttgggactctcgtctgcactgcgtgtcctctgaagcagtgaagtctgtgcctatgccgagcgcgctaagaagtctcccttccagctgttccattctctccaccaccagcgtaactggcaagttaccaaggttgttcctgaaacagcagtgatcatgacttctcctttccagagttttgggtccttctgaattaatggtccttttcgaacaccggcttgcctttacagtgaactgtgattctctcgaagccaatgctttcctgtctgtatttgatgcaggattaaacacttcccagagaggattctagtctggtaaataaccacagtgtaggaactatctaactggca

SEQ ID NO: 1474 - DNA, 766 bp, Homo sapiens
  SITE (692): n equals a,t,g, or c
  SITE (761): n equals a,t,g, or c
ggaagtttctgcgcagcgttggagatggggagactgtggaatttgatgtcgtggaaggagagaagggcgcagaagccactaatgtaactgggcctgggggagtacccgtgaagggcagccgttatgcccccaaccgacgtaagtcccgccgattcatcccccggcctccctcagttgccccaccacccatggtggcagagatcccctcggcggggacaggacctggcagtaaaggggagcgggctgaagactctgggcaacggccccgacgatggtgccccccacccttcttctaccgacggcggtttgtgcgaggcccccggcctcccaaccagcagcagcctatagagggcactgacagggtagaacccaaagagacagccccattggaggggcaccaacagcagggagatgagcgagtccccccgccagattccggcccaggtaccgaaggcctttccgcccaggccacgccagcagcctaccacagaaggtggggatggtgagaccaagcccagcaaggtcccgctgatggttccggcctgagccccarcgsccacgaaaccggccctacttcagcggagacggmagcargccctggccccacaggcccctggccccggagccgcagccctgagactmagccctgtaacagtgggacccacacacatctgagtgatcactactaaggnaccagagtgcattggattgcagtttcaatactgactacagacctgtcctttcatattatgataacacantttac

SEQ ID NO: 1475 - DNA, 508 bp, Homo sapiens
  SITE (248): n equals a,t,g, or c
  SITE (501): n equals a,t,g, or c
  SITE (504): n equals a,t,g, or c
gccagcactcactgaagaagacactatggaattctccgttttccagactagaaataagtaactcggagaaattaagaaaytckcccgacgaccctcaggcagtagcacctggccaggtttgctttctgaaccactaactccactcgcgcacgccacctttcctgcctgggcctcttgcgggtcgcaggggtggaagcctgacctgggccagggcccggatttcttcctcctggcctctgtcccaccgnccccggtgccaggaagcgcttttctctccccgagacccagasgcgccgaaagactygcgcggtcagttccctaccccacgccctgggctgtgcgttttcttgcaagcctctgccgagtgcggggaacggcgccgscagactcccccagaccgcgctccggctcacgcctgactagagcactctgsttcamaagggcgktctgcgcgttcttyctycctggtgtgattttcggtctttttcctctcatggcctnaanaacc

SEQ ID NO: 1476 - DNA, 1173 bp, Homo sapiens
gcaaagattgaagaggaactctttcaaacctttcaagtgccccctcctttccttaaagtcttttataggggtccccttcttggccatctccatcctgtgagtcaggactgaaagggcacagacaggtcactgccagcattgttggggcaagcctgcaagcacgcatcactggggatctgacatgacaatggccgcctgccccctctgagggctacaggacttaccccagtgggaagcagctaagcaggtctgaccagccgacctggacctggccaagggtcctgtcatccctcatggccaccccgccattccggctgataaggaagatgttttccttcaaggtgagcagatggatggggcttgcctgcttccggtccctggcggcatcctctyccagtattcgccagaagaaactaatgcacaagctgcaggaggaaaaggcttttcgcgaagagatgaaaatttttcgtgaaaaaatagaggacttcagggaagagatgtggactttccgaggcaagatccatgctttccggggccagatcctgggtttttgggaagaggagagacctttctgggaagaggagaaaaccttctggaaagaggaaaaatccttctgggaaatggaaaagtctttcagggaggaagagaaaactttctggaaaaagtaccgcactttctggaaggaggataaggccttctggaaagaggacaatgccttatgggaaagagaccggaaccttcttcaggaggacaaggccctgtgggaggaagaaaaggccctgtgggtagaggaaagagccctccttgagggggagaaagccctgtgggaagataaaacgtccctctgggaggaagagaatgccctctgggaggaagagagggccttctggatggagaacaatggccacattgccggagagcagatgctcgaagatgggccccacaacgccaacagagggcagcgcttgctggccttctcccgaggcaggcgtagccagcatgcaggtgcagggccctgtggtccagactcccctgggttgggattcaagtccagggtgagcccatgtgctggagaaaatacacactcattggtctccttgctttgaaagatccaataaagtcctgaggcaaggtttggaaaaccaacttaaaaaaaaaaaaaaaaaaaaaatt

SEQ ID NO: 1477 - DNA, 474 bp, Homo sapiens
atttttttttttttttttttttttacatttaaaggactatgattttaatttattaaattgctaggattggtagttttggtgtcattaaaataaataacatctccccttgttgctttctttttggttgttctttttctgcaccgcgaaggaaatacactgactattcatagttctcagtctcagaatgaggttttgcagcatctatacttttcagcatttcggttacatgatgctttcttgctttgtgcaaaccttgtagggtacctgggaaaaaacatccacttgaggtcattgccctttacagctctttacaattacatcagttttgaaggaacgccatttaaatttggtgtcagtgctcagcaagtgtaaggacgcagagtggaacagcagaatgcttacagtctttcaaaaacagtgtgtcctctcctcccccgctgtattatttaaattaccgttctcctcacttcgggc

SEQ ID NO: 1478 - DNA, 629 bp, Homo sapiens
  SITE (540): n equals a,t,g, or c
  SITE (557): n equals a,t,g, or c
  SITE (594): n equals a,t,g, or c
  SITE (595): n equals a,t,g, or c
  SITE (608): n equals a,t,g, or c
gcacaggcagtgggatctgagctggcaggaggggcggaggtgatgctaaggctctcctgaggaagcgaggtttgagctaaacctgagctattccaatcaagttctctgaaaagcaacaggcttctcactacctctatgtgagagcacacggcgttcgacaaggcaccaagtccacctggcctcagaagaggactctttttgtcctcaatgtgcccccatactgcacagaggagagcctgtcccgcctcctgtccacctgtggcctcgtccagtctgtagagttgcaggagaagccggacctggctgagagcccaaaggagtcaaggtcgaagttttttcatcccaagccagttccgggtttccaggtagcctatgtggwgktccagaagccaagtggggtgtcagcggccttggccctgaagggccccctgctggtgtcacagagagccaccytgtgaagagtggcattcacaagtggatcaagtgactacgcaractctgtgcccgaccctgaggccctgaaggtggaartggacacgntcatggaggcatatgancagaagatcgctgagggaagaacttaaggccaaggannaaggaagggggtnccttgaccaaggaaggcttgg

SEQ ID NO: 1479 - DNA, 583 bp, Homo sapiens
  SITE (498): n equals a,t,g, or c
  SITE (514): n equals a,t,g, or c
  SITE (530): n equals a,t,g, or c
  SITE (572): n equals a,t,g, or c
ggaaaaataacacggggcttcagagaggactttctggctggcagcagactccagattcccagggcccctgcaccctcctctgcccacagggcaccttaatggagaaggtgtgggaggagagccaggccggagtcagagcacactggtgactccacatttgcagcgtgccctgcctctctcctgaggcttggcaacgtgcaatatgctaagcaaactccccctgtccccgtccagtttctgaggacaagagccaccacctgtagcaaataaagacccagcaaccctttgactcatctttgtgagtctctggaatcagagggtagccacatcgctgagaggtggagtgaagcactcgggtgaaaaggtacaaggaagtcagggacaggagtgtggggacatcacctagacmatgacagagaaraggggcacaagcccgartgaggggagaaggggcccgcaagtcctamatcccctggcctgaagcacgcttcagggcanaaaggaaaaacactgnctttggggtccaaganaacctgagttcaaattctggttcaacacttgaccacctgggnaaccttgactg

SEQ ID NO: 1480 - DNA, 604 bp, Homo sapiens
  SITE (525): n equals a,t,g, or c
  SITE (548): n equals a,t,g, or c
  SITE (594): n equals a,t,g, or c
gtagaaatgcagaaagttggctgggcgtggtggtgggtgcctgtggtcccggctgctcgggaggctgaggcaggagacttccctgagcctgggaggcggaggttgaaatgagccgagatcatgctactgcactccagcctgggcgacaggacgagattctgtctcaaggaaaaaaaaaaaattgttatgcttttagaggatctgtgcatgttagcaatgttcttacattttgatggttttcatatattttttgctgctatattatggaggctaatgatcagaaagcatttttccgactccggttttactgtcttcaggtagttctctacacactgccttgkctttctaaaatacagatgkcctatgtgtccccagtcttcarggggtgactctcactgsccawtggggktcaagacgagkctctcactggctttctgactctcactgcactacttgttttgccctcatctcagttactcagctcatctctttctgccatggttttcctctgggcctttgtgtggncaatttttggtcctttcttctgnccatgtgcccccttaccccatgtgtttgggggataggcatgctttncctcttcctt

SEQ ID NO: 1481 - DNA, 574 bp, Homo sapiens
  SITE (507): n equals a,t,g, or c
  SITE (538): n equals a,t,g, or c
  SITE (550): n equals a,t,g, or c
  SITE (558): n equals a,t,g, or c
gtctaccagaagacctactgggccagctacaacataccgtccttcgagactgtgttcaatgccagtgggctgcaggccctagtggcccagtatggggactggttttcttatgacgggagcccccgggcccagatcttccggcggaaccagtcactggtacaagacatggactccatggtcaggctgatgaggtacaatgacttcctccatgaccctctgtcactgtgcaaagcctgcaacccccagcccaatggggagaatgctatctccgccgctccgacctcaacccggcaatggctcctaccccttccaggccctgcgtcagcgctcccatgggggtatcgatgtgaaggtgaccaagcatgtcactggccaggatcctgagcctgctggcggccagcggtcccacgtgggaccaggtgcccccgttccagtggagcacctcgccttaacggcctgctgacatggccagcagactctggaagtcgccctgtaaggttcatggantgaatctgcctgttgtgttcgcctgtgactngtaggtacccgncagcacgnttatcagcctctgggt

SEQ ID NO: 1482 - DNA, 1205 bp, Homo sapiens
  SITE (993): n equals a,t,g, or c
  SITE (1144): n equals a,t,g, or c
  SITE (1147): n equals a,t,g, or c
  SITE (1150): n equals a,t,g, or c
  SITE (1168): n equals a,t,g, or c
  SITE (1170): n equals a,t,g, or c
  SITE (1183): n equals a,t,g, or c
gcagcaaagggcatagatgaccacaggagagccctagggggaggccggctccaccagcagccccatacatggcactcccagggtaccccctgggcaacgtggatgacagcaggtctaaggacagcccagcaggagagccccaaggtcaggtcccactcacagcagatgtcttggcagtgagcagctctgtcgcatccactgactggcaggatatagatcaggcctccttcaagacggccacccccagggccatatcaacatctggagacaaagacaagagtgcagytgttccagaacacggccagaagacacccagaaaaatcacacctctgcttcccagccaaaatccaagtcccctgcaagtgtctatgagccttcagaatccagcgtgggacaggcaggttcaagacgcaaggacaagtcagagtctagtggttttcccaagtcacctcctgggtaaagacaagatgtcacaaatggcgagtgttcctgagagagagccggagtcagccccctctgccccgagtgctgagctacagtccacccagcacatggaggctcagcccgtcgagagtgatgctgaccatgtcacagcaggtgccaatggccagcatggccctcaggctgccagcaccaccaagtctgctgaggagaaagctgagcatccaaaggccccacaccctgaagctgaagctttaccatctgatgagtccccagtggcaatgggggcaaatgtggtggacagcttaggagacctgcagacttggttcttccytcacctycagcaggcagtgtgtccccgtcgcctggcccccacgaggtggccctggggagaaggcccctggaccccagcctgtacacggccagtgaggagaacagctacatgcgctccatgaccagcctgctggacaggggcsagggctycatcagctycctgcagacatcctggtgtggkccgagaccaccatgggcatggccatagccacaggcttnctggattccggccacagcacttgtggcaagacctgcttgcacaagcttcggggcccagcttgcgcttcggtccccaagccttggtggggaaagccgttcaagcttcgggcccttttccttttgggcttgggtggtcaaggggacccaagcnttnaanccccttggggcaaccaantnaaaccccgtggtngcttgggaagaccaagtgggga

SEQ ID NO: 1483 - DNA, 1012 bp, Homo sapiens
  SITE (654): n equals a,t,g, or c
gcacctacttcgactcctctccctgtcccagggaggggagaaaaggtctgggattcattgccaggaggggcttcccccaggatttcctacttctttctttactgctgtgcttgaagctcacaggagacccctcaagaggtggtcaccggcccacagcccaccccatcccccacccgccacccccaccgtaccaaatgctagctctgccctttcttctgtgtttttcccatcaagagagatggttgtggtcatgaagttcttccgatgggttagacgggcttggcaaaggattatttcctgggttttcttctggaggcaaaaaattaaaccaaccatctcaggacaccctgactccaagaaacactcattgaagaagatggagaagactctccaggtggttgagactttgaggttggtcgagctcccaaaagaggctaagcccaagttgggtgagtcccccgagctggcagatccctgcgtgttggccaagactacagaggagaccgaggtggarctgggccaacagggccaatccctactgcagctgccgaggacggccgtcaagtctgtctccacgctcatggtctctgccctgcaragcggctggcagatgtgcagctggaagtcatcagtgagttctgsctyartcagctnccaagtgaggacgcagtcacctttgaagactccggaggctgagttgctgtgggaggtgtacctggtgctgtgggccgttcggaaacacctgcgccggctgtaccgcaggcaggagaggcacagacggcaccacgtccgatgccatgctgccccccgacccaacccggctcagtccctgaaactggatgcccaaagtccctctagggggaaccccagacccttagagagtcctgacctcactcttacctggggtcccatatcagccccttcattccatgtattccagttgtaaaacaagtatcaaaatattgggaaataaatatcagatagttytgaaaaaaaaaaaaaaaaaaaaaaa

SEQ ID NO: 1484 - DNA, 749 bp, Homo sapiens
  SITE (536): n equals a,t,g, or c
  SITE (623): n equals a,t,g, or c
  SITE (646): n equals a,t,g, or c
  SITE (723): n equals a,t,g, or c
  SITE (730): n equals a,t,g, or c
  SITE (736): n equals a,t,g, or c
  SITE (739): n equals a,t,g, or c
ggtggaaccaacccagccgaccccccagctcctgcttagacaggccagcaagttcccgcctgcccaattcctggcagtgagcgagctctcagagaggcagatgctcctaggaggagaaagtattctcagagacagctacatgcgaaagcttccgaaggccgtggtgtctgcagcccaggcaggcctgctccggcagcaggaagaactggacaggaaagctgccgagctggaacgcaaggagcgggagctgcagaacactgtagccaacttgcatgtgagacagaacaactggccccctctgccctcgtggtgccctgtgaagccctgcttctatcaggatttctccacagagatccctgccgactaccagcggatatgcaagatgctctactatctgtggatgttgcattcagtgactctgtttctgaacctgcttgcctgcctggcctggwtctcgggcaacaagctccaagggagtggactttggcctctccatcctgtggtttctgatcttcactccctgtgccttcctttgntggtacccgacccatctataaggcctttaggtccgacaactctttcaacttctttgggttcttctttggaatttttttggcaaatangggatctacatcatccagttggntggcattcctggcctgggggacagcggttggatggcaagccctgctacactggataatcattccctggcatatcagncattatngatggnggnggcttgcttt

SEQ ID NO: 1485 - DNA, 677 bp, Homo sapiens
  SITE (570): n equals a,t,g, or c
  SITE (591): n equals a,t,g, or c
  SITE (603): n equals a,t,g, or c
  SITE (611): n equals a,t,g, or c
  SITE (652): n equals a,t,g, or c
  SITE (665): n equals a,t,g, or c
gtgcacatcaccttcttgagaggctccttcaagtcctcgtgcgtctctctgaccctgcaccggcagatggtgcctgcgtccatcaccgacatgctgttagaaggcaacgtggccagcattttagaggtcatgcagaaattctctggctggcccgaagtccagctcagggccatgaagaggcttctgaaaatgcctgcagatcagctaggtctgccgtggcccccggagctggtggaggtggtggtcacgaccatggagctacatgacagggtcctcgatgtccagctgtgtgcctgctccctgctgctgcacctcctgggccaagcgctggtgcaccacccggaagccaaggctccctgcaaccaagccatcacctccaccctgctgagtgctcttcagagccaccccgaggaggagccacttcttgtcatggtctacagcctgctagccatcaccacaacccaggagtcagagtcactgtcagaggagctgcagaacgctgggctgctggagcacatcctggagcacctcaacagctccctcgaaagcagggacgtctgcgccagcggnctgggcctgctctgggccctnctgctggacggnatcattgngaacaaggcccccttgggagaaggtccccggacctcatcanccaggtggttggncacctacccttg

SEQ ID NO: 1486 - DNA, 691 bp, Homo sapiens
  SITE (541): n equals a,t,g, or c
  SITE (555): n equals a,t,g, or c
  SITE (620): n equals a,t,g, or c
  SITE (630): n equals a,t,g, or c
  SITE (689): n equals a,t,g, or c
  SITE (690): n equals a,t,g, or c
gcggcaatggcgcccactcagaccccgtgacgaccctcaggcggggttccggatccggcaatggcgcccactcagaccccgtgaagaccctcaggaggggttccggatccggcaatggcgcccactcagaccccgcgaagaccctcaggcgggttccggatccggcaatggcgcccactcagaccccgtgaagaccctcaggcgggttccggctccggcaatggcgcccactcagaccccgtgaagaccctcaggcgggttccggctccggcaatggcgcccactcagaccccgtgaagaccctcaggcgggttcccgctccggcaatggcgcccactcagaccccgtgaagaccctcaggcgggttcccgctccggcaatggcgcccactcggctgtgtcaacgacccgtggcttcgtggctgtcctgggagccagcgctttacgcttgcacacttctataaatagttatacatttttttgagacagggtctggctgggttgcctaggctgtagtgcagtggtgtgatcacagcaacctncatctcctgcactnaagtgatcctcctgctagtctcccaagtagctgagactacaggcacgtgctaccgtgcccagctnatttttgggngtgtctgtttttttttttctagacagagtcttgcttctgtcaccaaggctggaatgcanng

SEQ ID NO: 1487 - DNA, 737 bp, Homo sapiens
  SITE (589): n equals a,t,g, or c
  SITE (688): n equals a,t,g, or c
  SITE (736): n equals a,t,g, or c
gggtaattgggttttcctcagacttgaggcgacgacacactcattggaaggggacgaggaatccagggtgtggcagaagactggagaggagctaagggggtcggtatgtggatccagtgaacccgtccaggtgccccaagaggctcgtgaatatggacggacccatgaggccacgatcggcctccctcgttgactttcagtttggagttgtcgccacagagacgattgaagacgccctgcttcacttggcccagcagaatgagcaagcagtgagggaggcttcggggcggctgggccgcttcagggagccccagatcgtggagtttgtttttctcctgtctgaacaatggtgtctggagaaatctgtgagctaccaggctgtagaaatcctagaaaggtttatggtaaaacaggcagagaacatctgcaggcaagccacaatccagccaagagataataagagagagtctcagaattggagggctctgaaacagcagcttgtcaacaagtttactctccgtcttgkgtcatgtgttcagctggccagcaaactttccttycgaaacaaaataatcagcaacattacagncttgaatttcctccaggcttctaggctatctacacacttaaagaagaactgcttggaatcagagctttgatggttttgaaagtcccttggaactttccnaattaaactggcccacttccccttggcataattgtgggagaccccttnt

SEQ ID NO: 1488 - DNA, 535 bp, Homo sapiens
  SITE (436): n equals a,t,g, or c
  SITE (502): n equals a,t,g, or c
  SITE (506): n equals a,t,g, or c
  SITE (517): n equals a,t,g, or c
gcttctgggtggcctaccgcaatgaggaccgctgggcgtggctcctgcaggacacactgggcatttcctactgcctgttcgtcctgcaccgtgtgcggctgcccactctcaagaactgctcctccttcctgctggccctgctggcctttgatgtcttctttgtcttcgtcacccccttcttcaccaaaaccggtgagagcatcatggcgcaggttgccttgggccctgcagagtcttcaagccatgasaggctgccatggtactcaaagtgccccggctaagagtctccgcttgaccctgtgcagccagcccttctccatccttggcttcggtgacattgtggtccccggcttcctggttgcttactgttgccgctttgatgtgcaagtctgctcccgtcagatctacttcgtggcctgaccgkggcctatgctgngggcctgtggtcacattcatggcatggcctcatgcagatggccaacctgccttggttacctagggncaanacctgttacancctgctgggtgctgcgca

SEQ ID NO: 1489 - DNA, 485 bp, Homo sapiens
  SITE (445): n equals a,t,g, or c
  SITE (460): n equals a,t,g, or c
  SITE (474): n equals a,t,g, or c
  SITE (481): n equals a,t,g, or c
gcaggaggatcctggggtggtcagaggcaaaattctccaagcccatgcacacagggcaaagtctaggcactgacctttggccgtgcactccctgtcccaatgcctgacatggggcctccagtccttctctgataccgggcagggcataatgagaaaggtgttcctggtacagagagaggccatggcacatgtttgtcactgtctgctgagcctggcacaaggagaaccagtgagggcgacctgagtccgagtcaaaaccattyctccccctgcagaagccgtcgyccccgtggttgggtgggttgcacttcctagatttggactgcgcccaccggatttttccaagggtttgggggagcttgtgggcccagcatcatatcaagagcagttgttgtgatcactgctgagtatgtactggggctcttgagtgccccaagcgccctgncaccaacaaaacttntctttaggatgcanatgttgngctt

SEQ ID NO: 1490 - DNA, 955 bp, Homo sapiens
  SITE (807): n equals a,t,g, or c
gctctgagctcatgaaggaaccaatcctttggaagcatgggaatctgcgaaatgtgctgatcttgatggatcaaagtgcctgggactccaacgccactctgaggcagatggccatccgagggctcggcaacacagcatccggggctcctcacaaggtgaagaaacataagcagttaatgctagaatctatcatcagaggcctgtatcacctagctcgcactgaagtcgtctgtgaaagcttgaaggctctaaaaaaaatcctggagctgctgacagaccgagacgtgagcttctacttcaaggaaatagtgctgcaaacaaggaccttctttgaagatgagcaggatgatgtgagattgactgccatcttcttatttgaggacctggcacccctaacaggaagaaggtggaagattttttttgctgaagaaataaaaaagagcctgatttcattccttctgcacctttgggatcccaaccccaagattggagttgcttgccgtgatgtcttgatggtctgcattccctttttgggcctccaggagctctatggggtattagaccgtctccttgatcaggatctaccaagggccagggatttctayaggcaattctgtgtgaaactggccaagaaaaaccaggaaattctgtggatcctccacacacactccttcaccttcttcaccagcacctgggaggtgatcaggagtgcagctgtcaaactcacagatgccgttgttctcaatttgaccagccaatatgtggagttactagacagagaacaactgaccacacgactccaagcanttcgtcaagatccgtgtattagtgtccagagagcagctgaggctgctttgcaaaccctcctgagaaggtgtaaagagacaagcattcctctgtaagccatcaagaaataaactgctggcttttcctaaaaaaraaaaaaaaaaaaaaa

SEQ ID NO: 1491 - DNA, 644 bp, Homo sapiens
  SITE (401): n equals a,t,g, or c
gcttatttaaagttcttcctttctaaaaatgggatcataataccaacaataagggtttgtgaggattaaatgagattagggatataaacatatctaggatagtgcttggagaacatagtaggcactcaataaataccaggtcttttctgctcttcttcatagaccataaataaaatatcaaagctagtaagtccaacagatatttccatttatttcagtggtatattaacagattgagacagttttcacaataagggaaagggaaagaaagcagttcacctagaagtacaaatttatccagcatctgatagtgaccaattacactatgattttatggctccagttctctgagtctatgcctaaaaaatggatgctaaagtgctaggccattagatatctgncaaaacattttatgctgaagaacacatattttgaaacttggagtgagatctggtcttggaaaattaaaactggggttcataaaaaagatttaaaaatagaataagggatctggctgggcctttctgggscmcacmatggaaacmttccmgaagaccaggaaaacggccccaaggkgggatcattacatttgggccccaaggcgccaaaagcttttctgggccttaaaaaatttttggaaattc

SEQ ID NO: 1492 - DNA, 723 bp, Homo sapiens
  SITE (514): n equals a,t,g, or c
  SITE (557): n equals a,t,g, or c
  SITE (577): n equals a,t,g, or c
  SITE (651): n equals a,t,g, or c
  SITE (673): n equals a,t,g, or c
  SITE (693): n equals a,t,g, or c
gcctaccattccccagaaggctgtgtcccccactgctccaaagaagaaatctctactcctccctgccccatcccagaaggctctgcaacctcacctacccaataccagatggcgctgagccgcctgcctcacgggggaagctccctggcgattttgacgtgttgccaacaggaattcctggaagagccgtgctggagagaagccagtctggagggaaaccggagccggtggtgacggtgcgcacccaggagacagacgtggtggagatgacgactcaggccaagtccccggagtcgcccttcaccgtgaccaagaaggagtccaaggacatcctgattagccaaaccgaggaggtgaccctggaggccttcaggggccaggggaagttggaggactgggcccactgggcaaagcttgaagagaggtccccggacctgcctggcgtgagatccaaggagttggagcagcggaagagatgggtcaaggccaaggaactggccgtcgagggcccctnccaggagcacagcaggcccttctctgtggaagcgctcaccctnaccaagctcatgatcacggncaacttcaaagagcagcgctcgaaatccgctttggctcacttccttctggctcttgcgacttcgcagcgtcggncacgtcaatgatggcttagtgncttccgcccggcagctgtcntactgagggaagcagtgtggcagaagagca

SEQ ID NO: 1493 - DNA, 843 bp, Homo sapiens
  SITE (660): n equals a,t,g, or c
  SITE (828): n equals a,t,g, or c
  SITE (835): n equals a,t,g, or c
gtgtgactcctctgttcctggcaccctgtgcatccttagccatagcttacaagagaacagctggttgtgatggcaggaggccctcccaacaccaaggcggagatggaaatgtccctggcagaagaactgaatcatggacgccaaggggaaaaccaagagcacctggtgatagcagaaatgatggagcttggatctcggtcccggggtgcctcccagaagaagcagaagttggaacaaaaagctgctggctctgcttcagccaaacgagtttggaatatgactgccacccgacccaagaaaatggggtcccagctgccaaagcccagaatgctgagagaatcaggccatggggatgcccatctccaggagtacgctggcaatttccaaggcatacgtttccattatgatcgcaacccagggacagatgcagtggcgcagactagcctggaagagttcaatgtactggagatggaagtcatgagaagacagctgtatgcagtcaaccggcgtctgcgcgccctggaggaacagggcgccacctggcgccacagggagaccctgatcatcgccgtgctggtgtcggcagcattgccaacctgtggctgtggatgaaccagtgatcgcccarcgcggsctycgtattggagccctycctgcttncccttctttctttctctttcccargccgcactgccttgccctttcatytccagcagcctargagcgtaggatcattttcaactctggtaggctctactgggaggcaggtactgactggaggcctgstgtgcaactgagaggatgctggctgaatgcmccttgagggtnaagatgncggattgg

SEQ ID NO: 1494 - DNA, 699 bp, Homo sapiens
ttttttttttttttttttttttttttttttttttttttttaagaagggtggtcattgtatatttgaaggacactgagttgtggggaggggctctcaggcccaaggatggaggcagaaagccaggccaagcagggtcaagggcatgccacaggctctcaggagcgggcccagccccatgagcagcagcagcagtgcgtcctggaggctaagttgtcctgagactgtacccatttgcaggagtagagcctcctgctgtccaggaccttcaccggccccctgactctggcccctggtgagaagtttgcgctgtggcagagtgtgacctgcgggcctatggagcaggtcaaaggtgaggaagctgaccagaagcagcagcagggctgggccagtggtggaaaagactgcctggattgtcagtcctagtgcccccagccataggacactgtccaggagctgggcccagctagggccccaggtggatacaggtggacgcactggactacctgacccctccccagcacccaggccccttggaggaactgggatcggatcctcacgtgcttcgggtctgggtaagcagagccgggtcatggagagaggtggaggtgacgggaagacctagtgctgaaaaggattataagggtgagagtaggggaaggggtagggcccgggcagacagaagggtgagctcagagtggc

SEQ ID NO: 1495 - DNA, 1368 bp, Homo sapiens
  SITE (659): n equals a,t,g, or c
  SITE (944): n equals a,t,g, or c
  SITE (958): n equals a,t,g, or c
aatgtctggcagtgggcasagtgggggtgcgggggtgtaggtgccaagcgccatggcttagacccgagattggagtccggccgccccccgacagcagccgcctcctgccccccgtgcgccctaggcgccaccatgtcgggagacaaacttctgagcgaactcggttataagctgggccgcacaattggagagggcagctactccaaggtgaaggtggccacatccaagaagtacaagggtaccgtggccatcaaggtggtggaccggcggcgagcgcccccggacttcgtcaacaagttcctgccgcgagagctgtccatcctgcggggcgtgcgacacccgcacatcgtgcacgtcttcgagttcatcgaggtgtgcaacgggaaactgtacatcgtgatggaagcggccgccaccgacctgctgcaagccgtgcagcgcaacgggcgcatccccggagttcaggcgcgcgacctctttgcgcagatcgccggcgccgtgcgctacctgcacgatcatcacctggtgcaccgcgacctcaagtgcgaaaacgtgctgctgagcccggacgagcgccgcgtcaagctcaccgacttcggcttcggccgccaggcccatggctacccagacctgagcaccacctactgcggctcagccgnctacgcgtcacccgaggtgctcctgggcatcccctacgaccccaagaagtacgatgtgtggagcatgggcgtcgtgctctacgtcatggtcaccgggtgcatgcccttcgacgactcggacatcgccggcctgccccggcgccagaaacgcggcgtgctctaccccgaaggcctcgagctgtccgagcgctgcaaggccctgatcgccgagctgctgcagttcagcccgtccgcaggcccttccgcgggccaggtagcgcgcaactgctggctgcgcgccggggnaytccggctagaanccsggtggttccagccattcctgcagccaagggcactgggccagggcggcgcacgcgcaagargcgcgcttcgagggaatatgcgaagctgccgcgtgctgctgcacatgcgctttttcccttccgcttccctccctttcttcccacgggggartccgcagttgcccttgttcggaatccacgttccccgcgatcccgggagctggaggcgcatgcgcatccgcgattccctgcgaccaggccccgagagggcgagaccagaggggacggaagcattgcgcctgcgcggaactctcagcctctgcgcggagggcgtcccttcccaaccagccgtgggtgccaggttcccggttggaacctgcaataaactcgctgttcctcgcaaaaaaaaaaaaaaaaaaaaaactcga

SEQ ID NO: 1496 - DNA, 957 bp, Homo sapiens
  SITE (792): n equals a,t,g, or c
  SITE (822): n equals a,t,g, or c
  SITE (894): n equals a,t,g, or c
  SITE (905): n equals a,t,g, or c
  SITE (916): n equals a,t,g, or c
  SITE (935): n equals a,t,g, or c
  SITE (949): n equals a,t,g, or c
gctgcagtctagtgggcagcgggtcttcaagatgacattccaccactcaatgaccttcaagcagatcgtgctggttggtcaggagacccagcgggctctactgctcctcacagaggaaggaaagatctactctttggtagtgaatgagacccagcttgaccagccacgctcctacacggttcagctggccctgaggaaggtgtcccactacctgcctcacctgcgcgtggcctgcatgacttccaaccagagcagcaccctctacgtcacagaccaggggggagtgtattttgaggtgcataccccaggggtgtatcgcgatctctttgggacccttcaagcctttgaccccctggaccagcagatgccgcttgctctctcactgcctgccaagatcctattctgtgctcttggctacaaccaccttggcctggtggatgaatttggccgaatcttcatgcaaggaaataacagatacgggcagctaggaacaggggacaaaatggaccgaggggaacccacacaggtttgktacctgcagcggcccatcaccctgtggtgcggcctcaaccactccctggtgctgagccagagctcagagttcagcaaggagctgctgggctgcggctgtggggctgggggccgctcccaggctggcccaaggggagtgcctccttcgtcaagctccaagtcaaggtccctctgtgtgcctgtgccctctgtgccaccagggagtgcctatacatcctgtccagccacgacattgagcagcacgccccctatcgcactgcnagccagcaggtggtggggactctgagccancctgggggccagagcacccaagacccggggatggccargctgcaggagacctagcgatcacagtgcaacgtnagaccgacganaataagaacangtgagcctatgcgaaaagnttttgagctgcatntaaggtag

SEQ ID NO: 1497 - DNA, 574 bp, Homo sapiens
  SITE (450): n equals a,t,g, or c
  SITE (454): n equals a,t,g, or c
  SITE (518): n equals a,t,g, or c
  SITE (574): n equals a,t,g, or c
ggatcagggaaagcagggcacagccttgggaagaatggataagcatgcaggactgycctgacctcctcccggcccgcaggtgtgaagacccccttgtggaagaaggaaacggaagagctccgggccgaggacgcggagcaagaggaagggaaggaggggtcggaggacgaggacgaggacaaccagaggccgctggaggacagcgcgacggagggcgaggagccgccgcgggtagcggaggagggcgaaggccgcgagcggcgctcagtgtcctactgcccgctgcgccaggagtccagcacccagcaggtggcgctgctgcggcgcgcggacagcggcttctggggctgctcggccccttagcgctgctgggcggcctaacagctyccaccgacaggaagcggarccttccggaggagccgtgcgtgctggagatccggcgacgaccgnccgngccgcgggggcttgtgcttgctgcgagctcctcttytgcaagaaatgcaggagtcttgcacagncacccarcctatgtggcgcactgcgktctggatcamccggatctkggtaaagcggn

SEQ ID NO: 1498 - DNA, 1752 bp, Homo sapiens
gtcaccgatggccagagactccaccctttagctacacttgtggcgacccatccacctacagagtcaccttccccgtctgcccccagaagctgtcactggctcctccgagtgccaaggccagcccccacaaccctggaagctgcggggagccccaggccaagttcctagaagcattctttgaagaacccccaaggaggcaatccccagtgtccaacctgggctcagaaggagaatgtccgagttcaggggctggcagccaagcccaggagcttgcagaggcctgggagggctgtagaaaggacctgctctttcagaagagtccccagaaccacaggccaccttcagtcagtgaccagactggggagaaggaaaattgctaccagcacatgggcaccagcaaaagccctgctccaggattcatccatctacgcaccgagtgtgggcccaggaaagaaccgtgtcaggaaaaggctgcccttgagagggtacttcggcaaaagcaagatgcccaagggttcacacctccccagctgggygccagccaacagtatgcatctgacttccataacgttttgaaggaggagcaggaggcactgtgcttggatctgtggggcacagagaggcgagaggagaggagggagcctgagccccacagcaggcaaggacaagctctgggggtsaagagagggtgccagctccatgagcccagctcggcactgtgtccagctccatccgccaaagtcatcaagatgcccaggggtggcccccaacagctggggacgggggccaacactccagccagggtctttgtggccctctctgattacaaccccctggtgatgtctgccaacctcaaggctgcagaggaggagctggtcttccagaaaargcagttgctaagagtgtggggctctcaggacacccatgatttctacctcagcgagtgcaacaggcaagtgggcaatatccccgggygcctagtggctgagatggaggtggggacagagcagactgataggaggtggcgttctccggcccaagggcacctgccttctgtggcccacctcgaggactttcaggggctcaccatcccccagggttcctccctggtgctccaggggaactccaagagactcccactgtggactccaaagatcatgatagcagctctggactatgatcctggggatgggcaaatggggggccaggggaagggcaggctggcgctgagggcaggagacgtggtcatggtttacgggcccatggatgaccaaggattctattatggagagttgggcggccacaggggcctggttcctgcccacctgctggatcacatgtccctccatggacactgagcaagcatccttgcccaggtagtggcctctggctgctcacaccctgccagaggagaagcaagcgttcagaccctcacaccagcacccctcctcaccaccataagtagcatgtgctccaagtgccactgtgttaaactgatggtagtccttaagygtcccctaggctctgaaagtagcaggacttaagcctgagttatttgcaaaagcaaacacaacaagccaacccctgagagtctgagaagccatttcaaagttgctgataactatggcaggtatacggagaagcgcctttttctgtggccaatgtgtgttttctctgggaggttaaggttatctgtccattgccttgtacgaaagtctcaagaaaagtctacatcttaaaaaaraaaaaaaa

SEQ ID NO: 1499 - DNA, 532 bp, Homo sapiens
  SITE (319): n equals a,t,g, or c
  SITE (407): n equals a,t,g, or c
  SITE (472): n equals a,t,g, or c
  SITE (474): n equals a,t,g, or c
  SITE (522): n equals a,t,g, or c
gcagaatttgtctgtaatgaccaccagagctgggaggagccaagctttctcatgtcaggagatgaagccatgcactgtgttagggagctgaggtttggatattcacccctcccaaattcacgcaaaattcccaacacggcagtattgagaggtgggcctttaagaggtgattggattatgaggtgtctgtyttgaagaatggattaatgccttcaagggttaatggattaatcctctcatggattagtgggtaatcacaggagaggggctgtgtctctacaggaagaggagagagctgggccagcatgctcagcacctnaccatgagatgacccctcaagactctgtggagagcccccaccagtaagaaggcctttggcagatgccggcactttgaccttgaacttnacggccttcgggaattgggaagaaataaattcattttaaaaaaaaaaattaccccagtttcaagnantttggtatatgccaccagataacccaactggggacattaggatgtggncagaacttga

SEQ ID NO: 1500 - DNA, 879 bp, Homo sapiens
  SITE (495): n equals a,t,g, or c
  SITE (556): n equals a,t,g, or c
  SITE (873): n equals a,t,g, or c
gcagcggccaactcacactggctgggccccctgcctcccctaccctaccctgggatccggatgacgcagacatcacggaaatcctgagtggggtcaacagtggattggtccgcgccaaagactccatcaccagcttgaaggaaaagaccaaccgggttaaccagcacgtgcagtctctgcagagcgagtgttctgtgctgagcgagatctggagagaaggcggcaagaggcagaagagttggaggggtactgcattcaactcaaggagaactgctggaaggtgacccggtctgtggaagatgctgaaatcaaaaccaacgtcttgaagcagaattctgccctgctggaggagaagctgcgctacctccagcagcagctgcaggatgagacgccgcgacggcaggaggccgagctgcaggagccggaggagaagcaggagccggaggagaagcaggagccggaggctggcctctcctggaacagcctgggccccgncgcacgtcccaaggctgcccggcccgccagggagtcccgacaaaccctcgcggcacacggnctggtccccgcargctggggaatggggcctmgggctggcgagggcccctacgtgagcsarcaggaattgcagaagctgttcaccggcatcgaagagctgaggagagaggtgtcctcactgaccgcccggtggcatcaggaggagggggcggtgcaggaagccctgcrrctgctcggrggcctgggcggagggtcgacggcttcctaggccagtgggagcgggcacagcgcgaacaggcacagacggcgcgggaacttgcaggagctgcgaggtcgrcggatgaagctgtgcaccatggtgggagcggttcaacagtntctgtg

SEQ ID NO: 1501 - DNA, 1151 bp, Homo sapiens
  SITE (40): n equals a,t,g, or c
  SITE (52): n equals a,t,g, or c
caggggtgccgccattctacacccccacgggctacgggancccttgttcagnaagggggcgcccccatccgctacaccccggacggccacctggcgctcatgagccagccccgagaggtgagggagttcaacggcgaccacttccttttggagcgcgccatccgggcagacttcgccctggtgaaagggtggaaggccgaccgggcaggaaacgtggtcttcaggagaagcgcccgcaatttcaacgtgcccatgtgcaaagytgcagacgtcacggcggtggaggtggaagaratcgtggaggtgggggctttccccccagaagacatccacgttcctaacatttatgtagatcgcgtgataaaggggcagaaatacgagaaacgaattgagcgcttaacgatcctgaaagaggaagatggagacgctggaaaggaagaggacgccaggacgcgcatcatcagacgcgcagctctggaatttraggacggcatgtacgccaatctgggcataggcatccccctgctggccagcaacttcatcagtcccagcatgactgtccatcttcacagtgagaacgggatcctgggcctgggcccgtttcccacggaagatgaggtggatgccgacctcatcaatgcaggcaagcagacggtcacggtgcttcccgggggctgcttcttcgccagcgacgactccttcgccatgatccgagggggacacatccaactaaccatgcttggagccatgcaggtttccaaatacggcgacctggcgaactggatgatccctggcaagaaggtgaaaggcatggcggtgccatggacttggtgtccagtcagaagaccagagtggtggtcaccatgcagcactgcacaaaggacaacacccccaagatcatggagaaatgcaccatgccgctgaccgggaagcggtgcgtggaccgcatcatcaccgagaaggccgtgtttgacgtgcacaggaagaaagactgacgctgarggagctctgggagggcctgacggtggacgacatcaaaaagagcacggggtgtgcctttgctgtgtccccgaacctcaggcccatgcagcaggtggacagtgctcctctagagagctgcgactttaattaaaaacaacaggaaaacaaaa

SEQ ID NO: 1502 - DNA, 1801 bp, Homo sapiens
  SITE (85): n equals a,t,g, or c
ggtagcgagaggcgctagctgccagctccagcagcccagatcgcgcatatttctgcgtggcaccggtgcggatgcggctgtaaancagtggtcaccgcctccgggagcccacttctatgtggagaggggagcacccagagagggtcttaggagtcctcccatggcttcacagaagcagatggaggtagtgaccaaaggaactgggttccggcgccgccccaagaccatcacttacaccccggggacctgcgagctgctcagagtgatgatgaaggaatccaaactgacggaacatccagcagcgccacatcatggacatcatgaaaagaggagatgctttgcccctacagtgcagcccaacatccagccagagagtcttaccttccaagcaaatagcctcgcccatctamctgcctyccatcctcgcagcccgtccccacctccggcctgccaacatgtgtcaagccaatggggcctacagccgggagcagttcaagcctcaagccaccagggatttggagaaggagaaacaaagactccaaaatatctttgccacggggaaggacatggaggaacggaaaagaaaggcccctcctgcacgacagaaggctccagcccctgagctagaccgatttgaagagctggtgaaggaaatccaggagaggaaagaattcctggctgacatggaggccctgggacagggcaaacagtaccgaggaatcatccttgctgaaatctcccagaaactccgggaaatggaagacattgaccacagaaggagtgaggaacttaggaagggtcttgccaccacttaatctgtctccagagacgggcagggtagcccaagctcgaccactggagtccactcctctgccaggcagggccatcctcaggccagcccatcctaccagccttctgccacgtcaggtggtggcatagcactgccctgcagtaccccaaggcatactcagcagcctagcccctgccccggaatgcagatggagcctctgagactcacagccccgtccgcagagaagcaaagcccgagcatccctactaggacatgtgtctaaaggtatccactgggcctgcttcccaccacttctgacctgtggcctgttcatttagttttctgaattcaggaatgaatatgattcctttcttcctgttttaggatttacttatttgatttcttaccgccttaggcaagtattcaaccacaatgattaactggccaataaaacatatttaacgtgggtcattacaagcaccattttgttttcagagggataagcttatttgttcaaggcattagactttgtcaagcccagatggtttctagctacctgtttgcatatttcaagtggcaacgggaaccaacctcttgggcaccccatggctggctgctgtggcgggtgctgaattccactctgttaatgatctcaataaacctctgcaacggttcattatccctctgtgaaaactaagtctcaacaagataccacaaccaagggcatttacctggcaagcagtgcattcaggattaaaagttggctttagctttatgtctttccactatacccatggccacagaaagaaacatgaaaaggtgggagcgacctagagccctggcctgggagttccaatccctgcatgtgccgcgtgacctttcttgggcaaaacccaccagctccgtgcttgtgcatctgcgaggccctgctgggaaggagtcacctgacaccttgtcctgtacacagcacatctgtccccctcccctctggctcctgacacccacggatcc

SEQ ID NO: 1503 - DNA, 260 bp, Homo sapiens
ctaatattttcaaattaggaaaaatttgaagctctcacaagtaattcagcattaaatatgagaatgtactaaagcatagggtggattgaggcactgtatgttatgctactactaaggtagtagcaaaataagctcttatgggtgttatctgctgccaggatggccagattgawtcagaaacaaagtcaagatttcagctggtcaacctgttttatttaggacaatgtttggcaaattggagagtgtgacctgtaagtggg

SEQ ID NO: 1504 - DNA, 283 bp, Homo sapiens
ggaaatccgtttaacccaggagacagaggttgcagtgagccaagattgcaccactgcactccagcctgggtaacaaagtgagattctgtctcaaaaaaaattagtttcagagttccaaatattaccactcctgtctcaaattaggtttaaggcactcctgtgaacaggcagattctataggtataaattaagatgtcatttccctagagaggctaagaaataaatacattcaacaaatatttgatgaattaaaggaatgagatgaagatatctggagaaaacg

SEQ ID NO: 1505 - DNA, 318 bp, Homo sapiens
  SITE (113): n equals a,t,g, or c
gtgtgctgcagtatttattgttaacatttgtgactcaaatgtatccactccctgctttggttgctctggcctgcaagtaggccgtactaattctgtagttggtcctagcttgnctttgtctttaccttgcatgcgtttatgtcttaatgcacctattaggattccttgcttttatcacaggtttcccatttttyctgaaaaaattacagtaattattaacgcagaacccaggtaaattaaaaaggtttgtatgctttatgaatttttagtaagtactcatggttgataacagcaacagagggaaacaaaagggtcagt

SEQ ID NO: 1506 - DNA, 574 bp, Homo sapiens
cactgaggggagtactctctcttccggaactttctcagaaaactctcaaagcacccacacttcagaaagaaattttggcgctaattccaaaccagaatgctcttctaaaggacttggatattcttcataattcatcacagatgaagagcatgtcaaccttcattgaagaagcctataagaaactgggtgcatcttaaagagtgttttttttttagattgttccatattaatttaatgttcgtgaatttgtaaaactgttaacctatgattatatgtacagaggctaaggcttctgcaggatttattatctcctgatatgcactttaaaattagtctttgtagttctatcattagcatctagtgtagttctgaagactgtttttagcagttgccaaatctaggaaactaacatttatattgctgtatctataagtatttgcctaaaaccataaaataggaattgccttaaggatctaatagtttataatgcctgaatggaactcatttattggttaacagctcatatcaggagctgtgataagtaagtgtttacatacactgtctagtgcataaa

SEQ ID NO: 1507 - DNA, 263 bp, Homo sapiens
  SITE (11): n equals a,t,g, or c
  SITE (164): n equals a,t,g, or c
agcgtaggcgnactacagagaaaccgcgcttcactgcacgagccacatttttttcaccgcacaccacacacacactcacacgcacacacagaaagacacacggaaacatccaacagtcgcacagaaacacacacagccaggcagctcctgaggctgcgcggttntgctctctgccaggaaacccctccggaaagagagcgccccggggaaacacaggcaggccgtacctcgaaatcccagcggggacaactgtcagggagacg

SEQ ID NO: 1508 - DNA, 306 bp, Homo sapiens
ggacacctaccaccccagcccctcctaacagggccctattcattcatccaccgaatggcaccgtgtccaagccaccttaaccagctctggtcactggggtggtcggggtctgtcaccagcctggacagtaaccgttgttccaaacaaacatgacgaagacgaagactatggcggtgccttaaaaccctggcagcctgtggtgttggctttccagatggcttcaggactttcccacaagcagcaggacccagcgctgttcggctccggttcagcatgatggatggtggaagatgacttcttgggggg

SEQ ID NO: 1509 - DNA, 261 bp, Homo sapiens
  SITE (200): n equals a,t,g, or c
caagagggtagcccactcccctgaagagtaagtcccaggcctggcagcattcaccacaaactgactggagagtccttgggccttagctgaacatcagcagtagcctggcggcactctccatgggcctgtggtagtagtggccatgagcagcggctcctccgcatgtggaaagcagatggaagaggaggaaggactttttnttgtggcttgaaggccagctttagctgcaggagtttagagcataaggtagacttctaaggt

SEQ ID NO: 1510 - DNA, 310 bp, Homo sapiens
  SITE (235): n equals a,t,g, or c
  SITE (274): n equals a,t,g, or c
  SITE (296): n equals a,t,g, or c
agcaatttgaggctctgtcatcagtttctgctacgtttcaaagatcctggagaagcctagtgttgtgtcaagacgccgatggacccatcacagtttaatccaacctacatcccagggtctccacaaatgctcaccgaagaaaattcccgggacgattcaggggcctctcaaatctcctccgagacgttgataaagaaccttagtaacttgactatcaacgctagtagcgaatctntttcccctctatcggaagctttactccgtcgagagtctntaggagcagcagtcctcagggnaatcgaagatgagt

SEQ ID NO: 1511 - DNA, 270 bp, Homo sapiens
  SITE (96): n equals a,t,g, or c
cccaccttggccttccaaagtgctgggattacaggcgtgagcatggtgcctggctatcctaatataaaacgaattcttttcatgctcactattttntcttcttgcctcctttcaaagaaattagtgtctctggattacctcactaaacatgtacagtgatactcatattcatcccaattttttaaataattgttttctctctgtaattttttaaaggagtttgtgcagttaatggtctgttatatgttgttggaggggatgatgggttcc

SEQ ID NO: 1512 - DNA, 327 bp, Homo sapiens
  SITE (34): n equals a,t,g, or c
  SITE (290): n equals a,t,g, or c
agggggaaggtggagtagaatgaggaatgaaatnatctttctcatatgcttattatataagtgggtccggaacatgttctcacctcaaggttaacaaatacctaatgcaggaaagaaaatacatagccatggtcccttcctcaaggactttataattcagtgagatgtaaagatgagtgcttaagtgtatgcacctgattattgtctcttcattgccgcataagtcgggaaaagggggtcacttgcagcggaaaaatgggccactagatggcaatattcaccccatagtnaccaaacagggttacttgggcatccctaattatgttc

SEQ ID NO: 1513 - DNA, 266 bp, Homo sapiens
  SITE (40): n equals a,t,g, or c
ggctcctctatcctgtggtcctgagctgtgtgcccttctnagtctgaggggcctaacctagagcagktttccatagtgagaaaattcaatgtagcagactactgagaaactactgtgttgctcaggctttgtttgaggtcctgtatatacagcactgaaaagagagataaagtccctgcctgcatgcattctggcggaggagacaagcaagcaatgaacaaattagcagraaacctagttttagtgaaaattgctgtaaagaaatt

SEQ ID NO: 1514 - DNA, 316 bp, Homo sapiens
  SITE (299): n equals a,t,g, or c
agctccctcagcctttgggggtaggtttgcataggcgtcctccccgtagaagaggtggagtcaggatttgcacccatatagtctagctccagagtatgtgctctgacacataggctatccttcctgaagagtcagtcaaagaaatcaggataaagagaaagactgwtgagccagtaaacacactgattctctacccttccgagaagaggaaaaatcggaacctctttggccttttccaggttctttgttctggccagwttcatagctaacagccactggtkaggtctkccacagaattnctgggggagtgttatgt

SEQ ID NO: 1515 - DNA, 325 bp, Homo sapiens
  SITE (121): n equals a,t,g, or c
  SITE (261): n equals a,t,g, or c
  SITE (283): n equals a,t,g, or c
aattcggcacaggtgggaagacagggcgggacaagcggcttcgtggctgcattgggaccttctcagccatgaatcttcattcaggactcagggaatacacgttaaccagtgcacttaaggncasccgatttccccccctgacccgagaggagctgcctaaacttttctgctctgtctccctccttactaactttgaggatgccagtgaattacctgggactgggaaggtaggggtccatgggattcgaattgaattcattnaatgaaaaaggtgtcaaacggnacagccacatatttgacctgaggtttgctaaggaacaagact

SEQ ID NO: 1516 - DNA, 177 bp, Homo sapiens
aattcggcacaggaggaatataagccagttccagagctcttagctctaagtagcttcatgggctgccagccaacctggmaatragctactcttgggtcaggtgcccatcctgctctaaacagtgtcactcctacctgaaacatcatttagctttcctgggcatgggacstytggtac

SEQ ID NO: 1517 - DNA, 427 bp, Homo sapiens
  SITE (339): n equals a,t,g, or c
  SITE (398): n equals a,t,g, or c
  SITE (419): n equals a,t,g, or c
aggaacagccagtgatcctcagatggtgctggatctgggtcatcaattcttgcaagtggaatggcttctactcctaacactcccagcttctttctcaatgagaaagaaagcatgtgtatgtctgtttatggcgacttcaggtggggcctgtgcgtgtgccggggtgtctctgttggagagaggagaggaagctctgatgcctcgtccccagcttccctgggaaggtcgtgatatatatcaaatgccattcttggaaactccttgaaataaccagcatcttttggctgttacgtggggagagaaggaggaggttggaagtttatctttgacttctgcccncgatgtttagccttccttcccgacagctactgtggcgcatctgccccacaccttctccncagctcatatggttggggggnttcccagg

SEQ ID NO: 1518 - DNA, 392 bp, Homo sapiens
  SITE (332): n equals a,t,g, or c
  SITE (343): n equals a,t,g, or c
  SITE (373): n equals a,t,g, or c
aattcggcacagctagcagttaaggtatattttttgttttacattgagaaagaagcaacacataggaaaagctaaaataaaggatttaacaaatccaacaccagcttaccttttgagtaatataatttaggtgaggacacagtcacttcagttttttttcccttctgtatgttcctacagtgtatgtcattatttgatctagtaaaataacctgaataagagaaatttcatagaagctccagaatagaattggaaagctggcagagatggtactgaaccgtattctcctagattagtatttttcctaagtaagccaagttgtttttttgagnattttgttttncgcattaaggaacccagggttttatttttngaggacaaggtaggttttt

SEQ ID NO: 1519 - DNA, 126 bp, Homo sapiens
  SITE (106): n equals a,t,g, or c
acacattccccttggaaaataagatcgtstttctagtcttttgggctgaagaattattccaagcatacgcttttttcatctttctgaaatgccaggtgttctgagnaagtaggtatttacatctgg

SEQ ID NO: 1520 - DNA, 253 bp, Homo sapiens
  SITE (116): n equals a,t,g, or c
  SITE (251): n equals a,t,g, or c
aggatttgaagacatttttctggggaagtaaaacactaaatcagcattattttccaaagcccagaaaataacttaatagattgtttttaaattactgttttaattcagcttgtcangatattctgaatagttcatgtaggaatatcttactattttgcagatacttttgtataaatagttgccagtgagaaatgttgcaactgtgtcttttcaaatgaagtaaataggagagctagtataggcgcctgaanga

SEQ ID NO: 1521 - DNA, 1309 bp, Homo sapiens
  SITE (1173): n equals a,t,g, or c
ggagcagcctccctgccacctgccagtccctactcagtgccgcccatccctgtgctgctgtgcctgctcagagccatctggctccctgggatttgagtctgctgtttctcctctctctctctgcaggggtgctgatggtctgtatagtgattggtgctcgaaagctcggggtcaacccagacaacattgccacgcccattgcagccagcctgggagacctcatcacactgtccattctggctttggttagcagcttcttctacagacacaaagatagtcggtatctgacgccgctggtctgcctcagctttgcggctctgaccccagtgtgggtcctcattgccaagcagagcccacccatcgtgaagatcctgaagtttggctggttcccaatcatcctggccatggtcatcagcagtttcggaggactcatcttgagcaaaaccgtttctaaacagcagtacaaaggcatggcgatatttacccccgtgcatatgtggtgttggtggcaatctggtggccattcagaccagccgaatctcaacctacctgcacatgtggagtgcacctggcgtcctgcccctccagatgaagaaattctggcccaacccgtgttctactttctgcacgtcagaaatcaattccatgtcagctcgagtcctgctcttgctggtggtcccaggccatctgattttcttctacatcatctacctggtggagggtcmgtcagtcataaacagccakacctttgtggtgctctacctgctggcaggcctgatccaggtgacaatcctgctgtacctsgcaraagtgatggttcggytgacttggcaccaggccctggatcctkacaamcaytgcatcccctaccttacagggstgggggacctgytcggttcaagctccgtgggccacactgctgctgtgccaagaaggtgtacagmctccccaggatgggcctcatacaacccttcatctgcactcaacatttaatcgtgtccttgctgtctttttattttcctttttgtttgttagcaaaaacctctatttagatttcaataatcagagaagtgtaaaataaaacagattatattgtacttgaccctttatgtctttaaagatagttaatgcaaccctgaggcttggggtctataaataacaaaagcatctggntttctctagtgcagtgtttctcaaagtggcttcagctagaaacgtcagtgtcaccaaggaaacttgttagaagtgcaattattatccctcaacccctgggctgactaagcaaatcagcattcttgggagtagagca

SEQ ID NO: 1522 - DNA, 307 bp, Homo sapiens
ggcagagctagatcatttgccgcaccttctacgtcagcacttgcttcttcactttgtacttagataatgaaaccagcttctttttttaaaccccgtgaaacaaattctacagctttttttcttttgcagctttcccacgtctcttagtcatcatagaatgacagagagttaggtccttgctctagattagatttggcctaagggaacattgtggctgctttgttcttcaatccaggctactgaagttttctccatgttagccataagtctgtttcactttgtwatatttgtgtgtcactgaagtagg

SEQ ID NO: 1523 - DNA, 441 bp, Homo sapiens
ggcacaggattttggggcagagaattttgcaacacgtggtagtgaactgtgaggagtttgaggggtctgaagactgaaagagtcgaatggtttgttggcagtctgtgtctgtgtggagtgttgcaggacgagtggaaatgactgtttccaagttcatggcaattcagaaggcccttcagccagactggttccagtgcctctccgatggagaagtatcttgtaaggaagcaacttccatraaaaagggtcagaaagtctgttgaccgatcacttcttttcttggataactgtctgcggctgcaggaagagtcagaggttcttcagargagtgtgatccattggagtgattgaaggtggagatgtgatggaagagaggytgaggtccagcacgagagacagccagcggcccttggktgtttccctctggatggttttcaagga

SEQ ID NO: 1524 - DNA, 361 bp, Homo sapiens
  SITE (246): n equals a,t,g, or c
  SITE (344): n equals a,t,g, or c
ggcagaggacaaaactcctgggtaaaatttgttcttgggtctcgtgcccataactgaatcaggaactgccgagcagaaggggtttcctggttggccagccagggtcccttgttccccttcggtagcagggcaggccccatggagaaggaatagtaagagggaggagcacatgggcaggccgggcgcacaccccagaggcatgagcgtcccatttgtgtggggtgagcacagaggtcaggagggcantgcaggaacaacttccctcttaggccaagaaatctgaaacttggaaggcaatgggggagccttagtgtgtttttttagcttgaagtaggagtcaacgnttttaggggggatttgg

SEQ ID NO: 1525 - DNA, 355 bp, Homo sapiens
  SITE (314): n equals a,t,g, or c
  SITE (323): n equals a,t,g, or c
  SITE (329): n equals a,t,g, or c
ggcagaggcttctgttgggcttttattcctttttaatttctaacttcatgccccaggcttcactgctgcatctgtccctgctgcagactgatgcagaacactctggaactgtagaaggaactgccagaagactgtgtcacccatgtttgtccttgtgccagcaggagggtcacgtgcatagtggtgtatagactacacttagagagatgctcaattctgtattctgctgctaagtaaatactttcctgtttgtggggttgaattttttttggacttttctttacagytaagaattgaaatttattgaggttctnaattaaatnttaagnccatttaaattgcccccattttcttc

SEQ ID NO: 1526 - DNA, 420 bp, Homo sapiens
ggcacgagcttaagaatgttatgggactgtagaagagaggaggagcatctactcagacaggtaagggagtgtcagcaaagcctcccaagaatatgtaatagctgagtatttttttttgaggcacattgtagctccagcctttacgacagagtgagactcttgtctcaaaacaaatcaaaacaacaacaaaaacaagtgggtttgttgggacaccctgaagcattgctgcttccgaagcctctttctccagggtgctcctgcccagcccgtatctcctccccttccctggaccccctccctgcctgatgctcggagacggtggctgccctgttacamccagmcctccaccctgaagaacgstgsttagtattcagytgaccatgcctgagacaaagggactttttgagtcttgttgactcc

SEQ ID NO: 1527 - DNA, 303 bp, Homo sapiens
  SITE (290): n equals a,t,g, or c
  SITE (298): n equals a,t,g, or c
gtgagatggatgcctcctccaaatattcttggaattcaacttttaaattgtgttaaaaatgcattttaatagtggcataaagtggtttttttcttgggacttttttttggagacatcccaagacataattggtaaataatgcagataatcaagcatacagaggttgtctgaattaaaaataatatatgctgacaaaaagcaataaatrttatttgtgtgtgtatgagcttatgatttggttgtaaaagcaatttcaaaagatcattgggaaaaaaataggggraaaaccngagttgantgttc

SEQ ID NO: 1528 - DNA, 305 bp, Homo sapiens
  SITE (176): n equals a,t,g, or c
  SITE (272): n equals a,t,g, or c
  SITE (279): n equals a,t,g, or c
  SITE (287): n equals a,t,g, or c
ggcacgaggggaagctgaggaatttgtattttataacattctttaattctggagtgagactggggcccatgtcacctgtagtaaggtggtagaataggagcttragaagcataagaaatatttamctcaattcttgagtgtttcttgaaggttaggcatcgtgctaaaacttgggnatatgaagataaataaggcatgatcttctgcaaacaactatactttgtgggtgaaggamcagrggacaaataagctcagaaaaggtggcacttggntttggcnttaggttngagggcttgagggggtca

SEQ ID NO: 1529 - DNA, 342 bp, Homo sapiens
  SITE (329): n equals a,t,g, or c
ggcacgagctcgccttcatctccttaatcgttgttgtccaattacatatatacgttttacatataaacatgcagtaattctatttacctccaaaactgcttgctgggaggatgtagtgggggcttgtgctaaactccctcctggctgggacacttgaacctgtcctcctacaccacccataggaactaaaagatttgattccacataaggctgcaccactgtggggaaagtacccaggtgtagccagtacttctgtcggcatgggaggggataggactgtaggaatggatgcaaacagaagccacgtttggagagggaggcatatttgnatctcccgggtac

SEQ ID NO: 1530 - DNA, 387 bp, Homo sapiens
  SITE (355): n equals a,t,g, or c
  SITE (377): n equals a,t,g, or c
  SITE (385): n equals a,t,g, or c
ggcacgagggactttagttttttgttttgttttgtttttctttaaaattaattgcttccctcttttacagcccagccatctaatcagtctccgatgtctttaacatctgatgcgtcatccccaagatcatatgtttctmcaagaataagcacacctcaaactaacacagtccctatcaaacctttgatcagtactcctcctgtttcatcacagccaaaggttagtactccagtagttaagcaaggaccagtgtcacagtcagccacacagcagcctgtaactgctgacaaggacaaaggtcatgaacctgtctctgctcgagtcttcagcgttcaagtaggccaggggaagtccntcaactggtccccatcatattnttatggtngt

SEQ ID NO: 1531 - DNA, 449 bp, Homo sapiens
  SITE (380): n equals a,t,g, or c
  SITE (432): n equals a,t,g, or c
  SITE (435): n equals a,t,g, or c
ggcagaggagaggcctataacctgcaggaacgggcgggccttgccaactctggcctggggtgttggctgttctggaagaagtagctgagaggctgaatttggctttggtggcatcactggcctgctgggtgtggggccctgccgggatatccatggcctgaaggtgacatctggagtgagggtgacctggactctgacgcgccacacgatcggcacccagcctgctgatgtccaggaaaccttgaatctggrtttttggggaccccgcactgccggccccaggtgcctggcaaaagaagtaagacggtccctttagaggaagacagcgtcaggccgaggcctcgggtcatttctacaaatcaccatcttggtgcggggtncatcacatgcaacagaggtaaccaggcagtcaaggagatgcgcaaaacgcanaancagggaagcagtgg

SEQ ID NO: 1532 - DNA, 334 bp, Homo sapiens
  SITE (298): n equals a,t,g, or c
  SITE (313): n equals a,t,g, or c
atccacacaggtgagaagccctacaaatgccttgaatgtggaaaaaactttagtgaccgctctaacctcaatacccatcagagaatccacactggagagaagccctataaatgccttgaatgtgggaaaagctttagtgaccattctkaatctcatcactcaccagagaattcacacgggggaaaagccctrttaaatgtggagaatgttggaaaagcttcaaccagagsttcaaaccttctkgaaacatcagaggawtccayttgggagggaaatcctgaccatgttagtgagcctngggggaaacttttgncccaaaggcccatttttttag

SEQ ID NO: 1533 - DNA, 445 bp, Homo sapiens
  SITE (296): n equals a,t,g, or c
  SITE (403): n equals a,t,g, or c
atgactgcccaagtagaaaacctaatgagtagtcagaaatatggtggtactgaagaaaaagaggagtgatattgctgttacttttagtataagaatttagcagatttgcttcacatctgttaaaagtttccagcctgaagagcctttgacaccaaggattaagcagtcaaggagttcattctaattttaatatcagtttattaatcttacctgtttattcattttcagaaagatactcaaagcctgagctcaaaaatccttttgatgtgtcttggggtctttgtataatggatccnggtggatcatgttttcttatacataatgtaaatggtactgtcctactcagggtaagctttacattaaacttaattccctcctttcaggttgttaaagggaatggctncagggagccagtggaaatggtggaacatgtgctcccctaacc

SEQ ID NO: 1534 - DNA, 563 bp, Homo sapiens
  SITE (558): n equals a,t,g, or c
ttcggcacaggcatttgccaaagtcatttttttagtagtagacagttctaatttacattagtaatctcttcatatacttagtatttattttttctgtcaagagcaatgagagttaattagaggagataataataaagttgttcacgtggctgtctgctttgaaagggaatttcagaatttgactggagtttggatctccctcctacctagtattaactttgccataagcatcaccagcaggtggcagcagttcccatgttctaaaaatatcgtcactagttaagacaggtatagagtatgttgttttgttacagaagtagatttaatttctggtatttaaattttcctcattatatttcattatagtctgttttatactttagtagacagaatggtatctaacagtactatcaaggcaggaacagcagtattatcagaaatttttaaatactcaaaagtgtatgtgaaccacagttgacatcttatgcaattgttacatagtagagtgcactcctgtagtggacttaaccttcaccaccaagtagggaaattaagtgnatata

SEQ ID NO: 1535 - DNA, 340 bp, Homo sapiens
  SITE (339): n equals a,t,g, or c
aggctttgaatgtgttgttccagatttaacataagtagtaaataacataaaataacataaaacagtatttttaggattcatgaatagttttgtaggagttatttagaacaggaaagrgtaaattggaaattttacctagaaatatacatcttgtgtataaaaattgataccttatgaacacattaatgaagactttattttcagtttttaggagatcagcgacaaatctttagtggaaggcagaaagtccataagtcctttctggatgtcttttktacttgtgttgtttcaagagttttagttwaaataggaagtaggcaatgtaactactgagtatcnc

SEQ ID NO: 1536 - DNA, 432 bp, Homo sapiens
ggcacgagaaaaaaggaatctagacttttgtatgaaatcccaatgttgtcaactgattcaaagtaaattcactatggagactaaagaaaacgagtttccagtttttagtctttggtctatgtccatccatttcctctaagaaattcttcaatataggttaagcatgggcttttatgtcgtatttagaagttagtagtattctctgttcctgtttaaattggtcttaaattctgtacctgttggattttgtgtctttgcatattcttgtgtttcaccatttgtgataaggctatattcaagtttgaatatggttttctcttgaaccctttgctgcaaacctttaatcaaaatyatttagttraaaataaattggtaagatttgatatttaaaaagatatagataacgtgaaattatgtggcgtaatagtaaaa

SEQ ID NO: 1537 - DNA, 682 bp, Homo sapiens
ggcagcgttctggttttctggatggcagcagaggacagggagatgatggaagcccggggtgcgggagaaagttgcccgaccttccccaagatggtgcctggtgactccaagtctgaagggaagccaagggcttatctggaggcagagtcccagaagccagactcctcctatractacttggaagagatggaagcttgtraggacggaggctgccaagggccgcttaaatcgctgtcccccaagtcctgccgtgctaccaaaggccaggctggcgacggacccaaacccgcagagctgcccccgacccctgggactgagcgcaatcccgagatggagctggagaaggtgcgcatggagttcgagctcacgcggctcaagtacctgcatgagaagaaccagcggcagcggcagcacgaggtggtgatggagcagctgcagcgggagcggcagcacgaggtggtgatggagcagctgcagcaatgagcggcgccccgcctgttttcaggaggcctccagaacttcctgctgccccagaaccagtttgccatgttcctgtactgcttcatcttcattcacatcatctatgtcaccaaggagatggtcttctttctcttcgccaagcactacctattctgcattgcagccattttgctctgtttgattaaaactttctggtcataaa

SEQ ID NO: 1538 - DNA, 300 bp, Homo sapiens
acaagaaatatctcttcagtgtcgctacaccactggcataagaacttaagagtagacactggcagacacacatgtcttacgatcttattgaaggagttaaaaatcacttaccctggaattgtaacttcatggagtcaaaacaatgawactaattaggaaaagaagaagaaatggcagtaaagagggcaaccatcattccacccagcccaaaaggrataagrggaaaccctcatctttcaggattctcaagrtacagagttttcatggagtggtgaatggaaaggtggcagcagccgcatt

SEQ ID NO: 1539 - DNA, 314 bp, Homo sapiens
  SITE (271): n equals a,t,g, or c
  SITE (296): n equals a,t,g, or c
  SITE (299): n equals a,t,g, or c
catggatggggagcagctagagggagctagcagcgtgaagagggaacgtgaggctgcggaggagggactggcctcagtgaaaaggcccagaagagaagccctgtccaacgrtaccactgaatctcttkctgccaacagcagaggccgggagaagcccaggcccttgcatgctttggccgctggtttttcccctccagtaaatgtgactgtctctccccgttctgaagaaagccatacaacgacggtttctggtggcaatgggagcgtgttncaggcgggcccgcagcttcaggcantgnttaacttagaagcca

SEQ ID NO: 1540 - DNA, 350 bp, Homo sapiens
  SITE (185): n equals a,t,g, or c
ggcagagccacttgccatctagcagagctggatgcttcccttgagcgctctctgctcctcccccaggtatctaggctgcctcccatctcccccactggcatttgaactttaagagcctggtctttgtgcttgggaatccaatggcaaaggcttcccataactagcactccataaacaacttttgngcaaaaattcaaattcccagtggttcagttgcaccaattaaagactaagtatttcagtcttttcatccctttttttctctttggaactacccatacataatacaatggrtacatttaatttttccagagttgttaaatggtatatagaagtcttaaaaactattt

SEQ ID NO: 1541 - DNA, 321 bp, Homo sapiens
  SITE (91): n equals a,t,g, or c
  SITE (243): n equals a,t,g, or c
ccaaaattaatcatcatcctacatccttgtttttcaaattctcttgcttaaatttaatacagttttatttcttctcaatgtattcctatangatgtgtgcgtgtctgtgtgtgtatgtttgtgttaaattaaaagggctttaaggtaaaacaaagaccagatttttccatcaataacaaataaaggtcttattaagtatcaaactttactaataatttcaagaatacaagcaatcaagtgggntaggagatataagaaaacatttaggctatactgcagaactccctagtttcctgctttcagcattgtatccatgctttt

SEQ ID NO: 1542 - DNA, 210 bp, Homo sapiens
  SITE (98): n equals a,t,g, or c
  SITE (106): n equals a,t,g, or c
aggcttctcgtttcatggataaaggccacgttaatatccatggcatgaaagaggtctagggaactccaaggctacttacagtagggccgatagaggtntaggtganagcagataattcctattctctaggccccgcagcttcatgggtgcaagccgctttggtactcatggtggcacttgccaagttgtccagaacttggggatgcaagg

SEQ ID NO: 1543 - DNA, 1221 bp, Homo sapiens
  SITE (1191): n equals a,t,g, or c
aaatgaccagctgctgcccaggaagttgaacacagaacccaaagatgtgcctaagcctgtgcatcagcctgtaggttcttcctctacccttccgaagatgccagtattgaggaaagaaaaactgcaggatctgatgactcagattcaaggaacttgtaactttatgcaagagtctgttcttgactttgacaaaccttcaagtgcaattccaacgtcacaaccgccttcagctactccaggtagccccgtagcatctaaagaacaaaatctgtccagtcaaagtgattttcttcaagagccgttacaggtatttaacgttaatgcacctytgcctccacgaaaagaacaagaaataaaagawtccccttattcacckggstacawtcaaagttttaccacagcmagtacacaaacaccaccccagtgccaactgccatctatacatgtagaacaaactgtccattctcaagagactgcagcaaattatcatcctgatggaactattcaagtaagcaatggtagccttgccttttacccagcacagacgaatgtrtttcccagacctactcagccatttgtcaatagccggggatctgttagaggatgtactcgtggtgggagattaataaccaattcctatcggtcccctggtggttataaaggttttgatacttatagaggactcccttcaatttccaatggaaattatagccagctgcagttccaagctagagagtattctgggagcaccttattcccaaagggataatttccagcagtgttataagcgaggagggacatctggtggtccacgagcaaattcgagagcagggtggagtgattcttctcaggtgagcagcccagaaagagacaacgaaacctttaacagtggtgactctggacaaggagactcccgtagcatgacccctgtggatgtgccagtgacaaatccagcagccaccatactgccagtacacgtctaccctctgcctcagcaratgcgaagttgcctttcttcagcagccagtaacctctgaattctgggcccctgggaacttttaggacccaaccttatttgtggttttgaatccttctttcttggaacaaactttagggagaaaactttttggattctttccagctttggggttaggattttaaatttgggcccccagtggaaattggggcaantttaacggtttttttccattttttttcaaa

SEQ ID NO: 1544 - DNA, 286 bp, Homo sapiens
  SITE (27): n equals a,t,g, or c
  SITE (29): n equals a,t,g, or c
ttgaaaacttactgtgctcaaggcacnanacggggtagttttatacacattctcccatttggatttttcaaagacaacatctaatcatccccagagaaatttcagctgagaagacaggatgatgaagtgccctgggggccagagtccagacaagtattttggcacctccaaggactcgcagaacacagagaggaaaagagagaccctgttatctttccgcagggtggccstttcaaaytytcagagatgggaattaagatttcctttggtattagtgggcatttga

SEQ ID NO: 1545 - DNA, 464 bp, Homo sapiens
  SITE (435): n equals a,t,g, or c
  SITE (446): n equals a,t,g, or c
  SITE (449): n equals a,t,g, or c
  SITE (454): n equals a,t,g, or c
ggcagagtgactactgacataaatttaatgatgctgagaattgacaacttctattaatttttgtgaatattgcttggagaaggtttaacgactccaccaaacattaggaccgtctcaaccaaatactaaaaaggggtccatttcatttacatttcctgttgccatcaagaatggctctttaatgagttttccgcagcaggatgtagagacacagatgccaagaaacttgcctttattttcttggaagcatatatccttggcaatgggcacatattaatatgatgagtgaactgaaactcaagaatctaactgccttcagaaaagtgacatctgtatgcacattcatttccagcaatttcccagatttctctggkatttggctttctttaattttttcaggtattttttttctcttttcaawtttgagagaggagntttgtaaaaanacnggggnctttttgggg

SEQ ID NO: 1546 - DNA, 1537 bp, Homo sapiens
ggcagagctgtccactcatgccattttctctcttgtctagtatttcattaggatctaaagttgtctgagttaaatgcacttatgtgactcatgtgtcctcttagaatcccaaatagggggaaaaagttttggtggtttttgtttttttttcattttctgttggattacagaaaaagaatgggacccattcaggtctcgatttccaaaggtaaagatggaaggctgggcagactggcttttgttacctgacatgccgtaggtgagcttagaggaagaaagaaaacaatttttatttggccaaaacagaacaaatgctgaaaaggaaatcttgtttttttcctaaagccaaatagaaatgatttgggtataatttaagagtccttgtgttgtacagatatggtgactgatgtasttattaatactaccaacttaktcatcaagcctcaattttcctttacctgaaggattaagtgaaagcttttggagttcatgatgttcagtatgatcagttaaccttaacctctgagcatcctgaagcaaaatctaaataatgcagctattaccactggtggtccaggctctggtgaagccctctgagcccaggaggaagagaaagcattgtccagaggtaggaacacagtctgggagcccagagctctgggaggagtgggaaaatgctgcttcctgctgcttgcttctaggcacctgcttccgccatctcacttaccatggctagagatgggggtgagactggggaaggacaaaagcagggaacagataagggatggaaatcagaagggaatatagaaagaactctggatgtggagaaatgccggtacctgagcattttgtatcaatgggagtaccctctgtaactgctcagtaggttacaaatgaagagtccaccagtattagaaacaatttaaacttgccagtaccaactgggatgtgtgccttcaatttgaaaattgtatgttttattttttaaatttgttaacagcattaatttatagagtattgatgtcatttatgtttctgaggtgtttcaacacaattttggatcagctgcctgtttgcaaaaacataatatatttctgttaaacagttcttcacctaacagcatattgctcttataactggtagagctgtttcaaaggaagttggtttctggtccaagttttgacctaaaccatgtccatcttctattaccagcacttacaagcactgtgaaaactgatcatgacaaataagtaaaatttgctacattaaacatattgcctcagccattactaagcgtccacttgtaaagctggacacagtttttactttatgcttcattttgattttttatccgtaagacataaattagaaggcatgaggtggccctttaaggataatctgcaaatatacacattttaatagtcatccatctgaaatcgatccacattccagrgaagattcagtattgtgctgtgtgaaataagcattcccagaaaaaaacatttatgctaataatacmacataacctctgsgttaa

SEQ ID NO: 1547 - DNA, 512 bp, Homo sapiens
  SITE (457): n equals a,t,g, or c
  SITE (478): n equals a,t,g, or c
  SITE (483): n equals a,t,g, or c
  SITE (484): n equals a,t,g, or c
  SITE (511): n equals a,t,g, or c
ggcacaggaatactttcattttgatcttctctatgctttcctggaggctgaaatgcatctacctgatattggactcagtttcctgagaccaagactatgtgttagggtcagaaaggggaatagctacaaaaatagatgatgagagagattattattagatagtataaccctctggaacttctaggatagtcacatactcacttgtcccgtttaaaagtgtaattaggcattttccaattggtttgctactactttcttattcaatcattatgttgtatgtaagaagagaccaaagctttaatgactttrtttattttccttatctgaaataattaaacctatctttcagggaattatgctaactttttgaagtagcatatgtgaaagtcctagcatgtcatccttaagaatatgccatctacatggaatatgtgctaatatgattcttggaccctgnacccctaactattaatatatnaatgnnttttccccaaaatttaaggggaatttnc

SEQ ID NO: 1548 - DNA, 408 bp, Homo sapiens
  SITE (345): n equals a,t,g, or c
  SITE (372): n equals a,t,g, or c
  SITE (397): n equals a,t,g, or c
gcaccccgccttgtagtgacctgtcggcacgtgtcccctcgggaagcagccagggtcctggtgcgctccaccacccccaagagtgtggccatctggggccgtgtggtatttgccactcaggagacatgtccctatgacatagcagtggtgagcctggaggaggacctggatgatgtccccatccctgtgcccgctgagcacttccatgaaggcgaggctgtgagtgtggtgggctttggcgtctttggccagtcttgcgggccctcggtgacctcaggcatcctttcggctgtggtgcaggtgaatkgcacgcccgtaatgctgcagaccacgtgtkctgtkcanagcggsytccagtgggggaccctyttnttcaaccacttagggaaacttcttnggataattacc

SEQ ID NO: 1549 - DNA, 222 bp, Homo sapiens
acgcggaatttggggwcttctgtgcttaggagcagaaagagcccaggaggggcctgttcctttacttcttgggggaaacgcaatggtggrcctgacttctcatgacgggaaagctactccaccttctctgtactcctggrggggagtcttgttcacatgtttaccagcggccaggacaaggaagagaaaagaaatgagccgtcagactgctacagcattacc

SEQ ID NO: 1550 - DNA, 268 bp, Homo sapiens
  SITE (137): n equals a,t,g, or c
gggactttgggtttgctgtggtgtccttgtctcctgcaggaccggccgcagcatggacgctcccaggcggtttccgacgctcgtgcaactratgcagccaaaagcaatgccagtggaggtgctcggtcacctccctnaagcggttctcctggttccactctragttcctggaagaatccgaagtagttcgccttgaggtttggctggtggaaaagatcttcggccggggcggagaacgcatcccgcacgtccagggtatgtcccaaat

SEQ ID NO: 1551 - DNA, 712 bp, Homo sapiens
gcggcacgagcggcacgagatttaatgtttccaaggttagacgttcactttttgagacgcttgagtagcttttcacttaattgactagcatgtatgggtttctttacccaggtccacaattcactacacaggtccagaaaaaaagctgatctctgaaaagcactaggagaaggcagctagagagggagaattctaattaggccggggtcctctgtggcttgaatgactgaataagtttttatagtcttcaattcagtgactkccagattcttcccaaagaaatttctagrgatcaagagtaggctctttcggaagtacttgcccgtattacactttaattttacaaaccaaacaacagcaattcaaccaatcaaacaacaaaaacaatccaaagaaagagacttggacataggcatcaaggaatcatttcactttataatttaatagaacactggtgkatcattcattaattctgaaagtgagaactaaatgtaaaataattttgtaaggtttgtgaattgttgcctaggtattctggtgatgtttactttagtgattttatcattaatgaaagcaatgtgtttttttagaaaacatattattagggttcataacgttgacattctgttggtgcaatcataatctcctgttttgttttagtcctagctctacagttgaatgaatccaagctcacctccaggccttttgctat

SEQ ID NO: 1552 - DNA, 356 bp, Homo sapiens
  SITE (146): n equals a,t,g, or c
catgcaccaccaagcctggctaattttgtattttcagtagagacagggtttttccatattggtcaggctggtcttgaactcctgacctcaggtgatccacccaccttagcccccaaagtgctgggattacaggtgtgaggcacctnacctggcctagatttctacaaacttaatagggcagatattaaccattttacttctttcaatgactcttgtatcttcagacctgaaactgattcagagaccatggagcccagaaacccaatcagtgtaacaagtgtgcattgagtagacatggagacatgagaatctccacttctctttttctcctcttgctaaaatgctcacaattgcag

SEQ ID NO: 1553 - DNA, 565 bp, Homo sapiens
  SITE (47): n equals a,t,g, or c
  SITE (433): n equals a,t,g, or c
  SITE (552): n equals a,t,g, or c
  SITE (563): n equals a,t,g, or c
  SITE (565): n equals a,t,g, or c
ggagctccccgcggtggcggccgctctagaactagtggatcccccgngctgcaggaattcggcacgagaacaaaataggcttcatgcaatctattgccattgctagaagaataaataggcctagcagatgggcaacttgggttgttagaataaggtcattcttgcagaatatggcacttaaattatctccagctgtaatgtcctaccatataatccagaggttgcatagaagcagagttgtcacagtctctgtagcacgtttgtgagaattctctaggcaggcccagcccttctctagaagtttgaatttcactcccaccttgttgctggggtaccttcttcagggtacatctaaacacagtggccttatacagaaatgttgttcaacccacacagtgctttaaaaaattaattgccaacatttaaaaatcanggagtttcacataaaattcagacttcttggttccctttaaaaatgagaagctaataaccatgagttgaattcccacaagtcaacaatgagctggaatctaatatggatgggcctcttancttttaccagngn

SEQ ID NO: 1554 - DNA, 419 bp, Homo sapiens
  SITE (266): n equals a,t,g, or c
  SITE (381): n equals a,t,g, or c
  SITE (388): n equals a,t,g, or c
  SITE (391): n equals a,t,g, or c
gtaagttgcccaggttaggctcaaggatctgcccgcgttggcctctcaatgtagtgggattacaggtgtgaggcactgggtgggcgcacccttcttaagatattccagttgtatttgtgagttccccctgtgtccagagtggcacggggcctgggccgggacgggaggtcgcagccatctcagctcagcccctgcagcagggatcacaaaggggtggccctgaggctgatggcccccagggcagggtgcagggaggagggaytccntcagttaattgttacacaggtccagagtctggcytcccggaggragagcgatggggcargagctggcaggggaggggcaggatgcccaatcaggtggtgccaggggcggccccgntccaggnctnaagcattccccggcccggggaaccgctg

SEQ ID NO: 1555 - DNA, 444 bp, Homo sapiens
gatctgtttggttattgctgaactagaagctataagctagctactcaataaaggaaacatgattttggtataatttgttataccaaattgcatctttattataatattgtttattgtaagagacttcagtctaaaataattgttcttggattgcatccaagaaccaaaaggctgaggttattatgcggttcttctgtgatatcaccccaaatgatgtgttgaggtaccagtgtttattctcagattttattttcttttatgacttttcagctctagcaataagttagaaactgtctgaaaatattactttaaatacaattcagaaactttaaaaatgttgggtttttttggtccacccttaagccctgagtctgtgactcttgagagtgcatgaacactgaattacagctggcaacgtggaggaattattatttacatttgggg

SEQ ID NO: 1556 - DNA, 1159 bp, Homo sapiens
  SITE (746): n equals a,t,g, or c
  SITE (748): n equals a,t,g, or c
  SITE (1137): n equals a,t,g, or c
gtgatcccggctgagaattcgcacgagacccttggggactgattgcagggttgtgggaagtcctgagtggaagttggttacggsgtaggagaggggtcctgagtggaaggaagctggtcagagtgggacggatggactgaatggaaattggaatagggagtgaggcggagttttacgcaagggtaccgtatccagttttgggctggaggatagttgcaagtattgtttggtcagtgctatttctacccatctgcaccacagtatttataattttcagcaggattgattwgtttcatcctatacagtggctgtctgattctttcagtgacctgtatagttcctatgtaatcttttacttcctgctgctgtcagtggtaataataataataagtattttcaatgtggagttctatgcagttgtgccttctattccttgctccagactagctctgatagggragatcattcatcctcagcaactcatgcactcatttattcatgctgcaatgggaatggtgatggcctggtgtgctgcagtgataacccagggccagtacagctttcttgtggttccctgcactggtactaacagctttggtagccctgctgcgcaaacctgcttaaatgaatatcatctttttttcctactgctggagcatttatgggctatagctatagcctcctgtattttggtacaacatgaactatctccatttcccatcatacagcaatacaagttcttgcgntntaggagatctctgctcttattagttaaacacagttgtgtggaatcactgttcctggttagaaatttctgcattttatattattttcttggctatattcccaaagcttggattagcactgctatgaaccttcacatagatsagcaggttcataggccacttgacacagtgagtggcctccttaaatctctcgttaccctaccatgccctggctggtgtggtgtctttctcctgacgacttggtatgtctcatggatactcttcaaaatctatgccacagaggctcatgtgttttcctggttcaaaccaccatttggcaagaaaggggtcagatgagtgccttcccaaaaagtggttaaaataagcaatcctcccccccaatcataaagtntttaggcccttgcagggaacct

SEQ ID NO: 1557 - DNA, 856 bp, Homo sapiens
  SITE (2): n equals a,t,g, or c
tncagtctttacaaaaatagaacttctcttggtatttataaatctacggccatggtctatgtgcatgttacaggtagaaaagccatatggggcactccttttggttgctcaggccttgattgcctgtcatccaggkcccttggtctgagaagtctatgcggtcacctcagagccgctaagcaccttcagtgggcccatcccattggcggcgtactcctgctggagccgggcacggtaatagaagaggtaggaaggcaacaggaatcccaggagtgagaatagcaggaggccccagattcacctttagggcaaggagagagaaacagagtcaagtaggtagtcatctgcccttagcctcccacagggaggagaaggcggccatttttctccaggtcctgagccagaataaatacagctagtacttattatgtgtagtcattgttccaccagtatctcacttaatgttcagcaattctgcaaagtggctgagatgagacttctcaggtataacaagtggcagggcctggtggtgcccacaccatatggcactcactaggtaggtatgaggaaggcacagcactgtaggagtctgggctggtcaggctgctcccgaaatggggccttctgggctcacccctctgacctttggagatgttaaccaatgggatcccgttcagggtggcgagaggaggctctcagacacagttcaaggaactgggatgcacagcctggtggacagaaggcttggaaggcccaggacacgcgggctctgactcggttcacatcccactctgcattactcactgtgtgactttgggcaaataatggcaattcttactgagtgcctccttctcac

SEQ ID NO: 1558 - DNA, 455 bp, Homo sapiens
  SITE (339): n equals a,t,g, or c
  SITE (389): n equals a,t,g, or c
  SITE (402): n equals a,t,g, or c
gcacagcacagagaagaagagggaggtgcgtagggccgtggctctgccctggctttcctggccccatatctggaggtggagggccacagagccacagtgaatagggcagaaaacctgcaagaggctagagttacacttacaaggcagcccaggcccactaatgcaggtttctttgccaactttatccaaaagttgaaatcacatcactgaaaataatacgaattgggtagtagccctagttagcttcatgctgatcagaaaccgatgggcgattgttgtcattccaaaaatgggttgaggaaattcttaccaacttcagagttctagtctggggatgantgtctttagggtctgttgatggggaaagtaaggaaagcattcacaggttntagaagattgggnacacatgactgcgttggcaagcttgcatgttattgattgcatgcctttttttc

SEQ ID NO: 1559 - DNA, 407 bp, Homo sapiens
  SITE (356): n equals a,t,g, or c
gccttcccacccctgtctatacccagagagcaggaggcaggactgattagctccactggatcccagatgcttgaggttctcattctttgagggtcactttcgaaagctgttttctgggataaacaaagtacgccttcgcagtttcctgcctgatccttcctccagcaagtaggtcacatcaatggctgaaaacagaaccaaggaggctcatcaaaataccaatctcctactccttattccagatttgagctctaaggagagcacacgaactcaatgattccttttctgacctataagcaatttagcccatcctccaaccctacgtgaaaaaggtggtctttagaggrgrtcatctnaccttccagtttcamtaccargwtacaactaaaagaagcctttaaaagact

SEQ ID NO: 1560 - DNA, 473 bp, Homo sapiens
  SITE (173): n equals a,t,g, or c
  SITE (261): n equals a,t,g, or c
gattatatataggtagtcttgggcctataggtaatctctttggggcttttaaaagaaatatacaaagattttcctacctttctgtgtattcttacaaataaatgttaagactcatggcctggggaaggaggagaaactcattaagggagcaaattgcagggagattcctgaanaatcagtctctgagccagtccaggcactttaattttgtctggccctggcattattattgtaactgagtagaaggccatgagatcatancctctccatagctcccgatagccatcaaaggtgactggcttctattacttttgaagtgacaaccacatttgaagatggtatagactgaccactgattgtcaaaactagtccaaaataaaaccattcatccatacttacttctgccacataacttgcagatgccctgcagcaaaaataaattagctctaaatttctggtgagcacaagtcttc

SEQ ID NO: 1561 - DNA, 594 bp, Homo sapiens
ttttttttttktaagagttaagtggttttttttctttattcaagtaatcatttagactctaatacatgataatggacaaccatgtgacaaagtactgtagtgtatggtttggtgtagcctccttgcctctaggatgggattttttccaggtgattcttcaggatctgacatcgatgcccaacacaggctttccaatggcaatgcatgagttctagaggtcactgccccatctttcttcaggtgctgtgtgccattttctcccacccattttatcctccattacttataaaaaccccactctaaaattcaacctatgttataaaattaacaaaatcaggagttagtacacatttttccacaatgataaaattaagactcataatgtactatcttgtttcgtctaacttttggaggatttatataatctctaaagagtcagagtaatacataacacaaaacatgcaaagaaccttatcactgggtgtatgtaatacgctgggaattgctaaagtactcaaaagcttaattttcttggaatagcaactgtccactgaaaactatagtattcaaacaaaaggttatgtgttaatacat

SEQ ID NO: 1562 - DNA, 371 bp, Homo sapiens
  SITE (337): n equals a,t,g, or c
gttttaaatgaatagatgatgatgatacagtcatgcgtcacataaccacagcatacactcacacacatctagggtaagtagtatggccttttgcttctaggcctgaactgtaagttggtggactgaatactgtaggcacttttgcaagtggtaagtgtatgtatgtatctaaacatagaaaagggagagcaaaaatacggtattccaatcttaagggaccactgtcatatatgcagtctgtcattgcccaaaatgtgcactgtgtgtatatattttgtatgtatatgcatgtttttaatatttttgatagaccccaaaacaatctgatttaagttgnatatgcttagtaacttatttagagatacgcattt

SEQ ID NO: 1563 - DNA, 606 bp, Homo sapiens
  SITE (566): n equals a,t,g, or c
  SITE (579): n equals a,t,g, or c
  SITE (605): n equals a,t,g, or c
gggctgaactgacaagaatatatctttaacaatgtgccatctatttatcattgtttaaaaatattcatgctaaagaatgacacgctgaagtgagagtgaaattttgcaaccaatggatgtgtttctcattttgcggtggtgatgcaaattgtcaggtaactcattctgtgtccttgggcagcagccgagaaattgctgtgtgactgcagtgagaatgagctcggtatttgagtcactgaattcagttgcatcttactctgtgccagctaatatcatttgaaaaaaaattttgttttgctgccactctcacccccaccaaattgaagattccatctgctattttatctcttatgaagggttacatttcttagttcagtatcagcaaaaatttctctcctgaaaaactgacatctttcttttagataatgaatataaataagtcarcctgacctttttccctgtcatgtgtatcaagaagacaagggccmagttttatgcttcactctgatacttaatctacccatcaaatcttggcttttgkttcagtctagaaatcataattttgnggggataaatggntttaagaatgatggtaaaaggaaggna

SEQ ID NO: 1564 - DNA, 1067 bp, Homo sapiens
  SITE (997): n equals a,t,g, or c
  SITE (1002): n equals a,t,g, or c
  SITE (1065): n equals a,t,g, or c
gccagaagtcaccagaatacccctcacaagagactactcagcaaatggaaacctcaacaagtgaatctgagagacagccagtgaaattgggagccgatttctcaggctccagtttatagaggaggcttttttttattaatggaagcacaaaatcctgctttatttctacccacagccttatcgctgctgacgyattatacggctgaggaaagatcmasaatgtgagggaaacccatgcccttaacaaaaacttctcttctgaaagacaagagctcaccccaagaaaaaaaggactgggattgaacagagcaggaacacttggggtaaaggagaaaagctttagatacaagaaagaggtggccaatcccagaaagtacaggagcaaggactacacagaccgaccacagcaggggaaaggcctctccagctgtggagttcagaaagctactctgacccacaactgcccgtacgtagaacatcctgctgaaagaacaggaaaagatgctgatcacaccctgtacaaagatattgcggggagaaagtgaaccagataacctcccacagataatgaaagcacaccagaaaaacattcctccaggcagatgaaaactgtgtcctgatgtttctgagtgatctcaaaggaattagaaaaacgacagaaactactaaagaatggtataaattaaaaatgtttaaaaagctcaggttaaaagtgactagtcaacagaaaaatatgaagagagttgacaggactcaggaggaaataagaaaaaaaaaaccagatatttctgaaatgaaaatcaggaacacaagaatgaaaatacattaaggtaaataaggaagagataggagaaaaatggagtcagaggagactcaaacaaatagagaagaagttgtccagagaagggataaagaagttaggcaaagaagatcaaacttacgtataatcgtagtgccatcccacacccttcccagaaaaaaaccgtgggattaaccngttantagaaactgtggtttccgggaaaactggttaaaattaagcttggaacttgttatagtgggaangg

SEQ ID NO: 1565 - DNA, 404 bp, Homo sapiens
  SITE (378): n equals a,t,g, or c
  SITE (404): n equals a,t,g, or c
gatttttatttatagcaaaatgcagaacatagtttcaatttctaaatataaactgttttttagaatttcatcctgtgagatacagtgccatagtgttgggagaagtatgttccaaattcagaagtacttctgtagcatcaaattgatttcagtgactcagcatttcaacaagtatttaccgagcacctattatgtgcgcaggccctttcctgggtgctggatatctaatgttgaataagttagacattctccaagtattactgaaaagttgaaattctgtttttaagaccttctatgattaattcttcacatgatgttcaagttttgtgtggcctggggtataactgaaagtttcataagatcactacgtcctatttncatatagatcaaataaaagactcttn

SEQ ID NO: 1566 - DNA, 486 bp, Homo sapiens
  SITE (389): n equals a,t,g, or c
  SITE (446): n equals a,t,g, or c
  SITE (448): n equals a,t,g, or c
  SITE (473): n equals a,t,g, or c
gaccactactacatttctacttcggagaatacccactttaaaaatcagagtggcgtccaagaaagaagtcttcgaagccaacctgaaaaccgagtgtgacctttggcacctgatggtgaaggagatgtgggctgggaagaagctggccgatgaccacaaggtgggagacgcgggtcccctctgccctttgctgtggctgcctcaggggcctctcgccacctgtgggtcctgtggcagtcctcagctgtgagtgctcgggctcgggtctgagtgtcttaagcagagtaagtttgtcggacaccatcttgacagaagcattgaagatgtggtctgtgtgacccagcgagaggcctcacggtgctacggaagagcatgatgagaaaacgcanggcggtctgggcaggtgtgggtgccccactgcccgctccagactggcgacatcccananagtggggccttccgggggccggacngtgcttggtgctg

SEQ ID NO: 1567 - DNA, 342 bp, Homo sapiens
gaaaaaacaatttggccactcttcaagttgaacaacttttcaggtgcttatgagccactgtgttctcacgcgagcgtcttctgctcgctctctgctcagttgttttctatcagcttctgtagcttttgcattgattttaaagagctctttacgttttaaagagagcaaacttttctctatgagttcaaatacacacactttaatcagtgtcttttcagcttgtaaatgatgtgttctgctatacaaaagtttcaaaatgttcgtgggcaattttctctgtttatttgggctttgtgtcatagttagattatgaaaacattcacccctgttttcccttattat

SEQ ID NO: 1568 - DNA, 779 bp, Homo sapiens
  SITE (777): n equals a,t,g, or c
  SITE (778): n equals a,t,g, or c
  SITE (779): n equals a,t,g, or c
gctggagctccaccgcggtggcaggccgctctagaactagtggatcccccgggctgcaggaattcggcacgagcagctaacaggctgattttctggcctttggagaagtgattcaaaatagtgtagattttctgcatagatcccatttttgtacagaattgaatgggatggaataggtaagcaaaagtagaagcccatttgagttttacatttgattccacaatttggtttcaggtaggcttggtaatagactatataaaccagatttgcctattttgattttcrtatggcttttttttctgtaagttttcagaggattttttaaatcacagaatcatactaaatgatatttagcctatcaaaacttccaaaagcccacaccaccagttcctgactcaaatttgaagggtttttagacaggagggtaggattaagtaggtgagtttaattaaagcttaaccctaggtaagagtaaatgagaaatattacggcaataatggaactgcttcactgtttcttggtgacttcctcactctaatgttttaaagmggcaacaaaagcttgtggtgccatttcagtaaccacggtgttgttttagatgcctttataagctcagtttcccctgttcttaagtgttggaatactgtctttaaaactaggaaaaatgcaaaatattggaactggatatttttgtgtgtagttggattactcttccattgagtggaatggatggaatacctgtgaggataggaaattagttctgagatctagttcccnnn

SEQ ID NO: 1569 - DNA, 553 bp, Homo sapiens
  SITE (450): n equals a,t,g, or c
  SITE (515): n equals a,t,g, or c
  SITE (523): n equals a,t,g, or c
  SITE (550): n equals a,t,g, or c
  SITE (553): n equals a,t,g, or c
ggctctgtggccacacatgacccaggcccactggccattagacactttggcagggtggccaaagaaattctttgtgctgaataaaattaatgtgtaaatgcggcggtgctccaagggcagtgttgcatgaaagggcaatagaaccatggctcctgataaacagaagcctgttaagcagcaaggtcaaaagccagatgcagaagtcagaattagccgggtagactttttatttcactttccccccccttttttttttgccagtggactgccaactgttctcttaacagaagggcagtttttgagtaaatgaagcaggacttgatctgggttgtcataaattgtctctccctcaagaggtaacttctcgtgtttgccagttcagaggtgtagggagacatctctgatgtgtagatgtcctagtttggggtgcagggtggctttgggtctganagcctgctgttggccactgggtgcgcgtgggcttctccacatgacaagacgggaatgctgtgaangaagccgntgttccgcttgggatgttggccgaccnccn

SEQ ID NO: 1570 - DNA, 587 bp, Homo sapiens
  SITE (523): n equals a,t,g, or c
  SITE (553): n equals a,t,g, or c
  SITE (567): n equals a,t,g, or c
  SITE (570): n equals a,t,g, or c
  SITE (574): n equals a,t,g, or c
ggttttttccatcttgtacattgggctcctgacaagattttatgttttcctcaacagtttaagaatctccaggaaagtgagctgcactcccttggtactttgtttcccctgatcaggggttttggtcagttggggatgcttcaacaaggcgccgtagactaggtggcttgtaaacgatggaaatttacttctcaccattctggaggctagaagtccaagaccaagatgccagcatggtcaggttcaggggaaggccttcttgcaggcagcagactgccaactgcttgttcttctcatgtggtggaaagagagctcgctaacttcctggggtcccttttgtaagggcataaattgcattcgcggaggctctgcccccatgacccgatcgcctcccaaaggccctacctycaaaggccatcacattaaggattagatttcaacataggaagtctgggggacacaggcatttagttgataatatcaagcttttacatctggaaaggaccctgtgaatccgactcangaatggttggtaaaagttggaaaggtattnggcttgtgactganganaagnggctttccctttg

SEQ ID NO: 1571 - DNA, 448 bp, Homo sapiens
  SITE (419): n equals a,t,g, or c
  SITE (434): n equals a,t,g, or c
  SITE (437): n equals a,t,g, or c
gaaatttttttagtgataagaaccagccaatagtttggaaaaattagtttggaaaaatttcaaaactaattatactttttggcccaagttttaaaatattggggaaatgaactaggtatggtttattttcaacagagaatgaaaaagtataaacatatcactggatatatttagtgatgagttcttattgccaagtgttttcatgagactgctttatttcaaaaatgcataaaactaccaaaactgttgacatttaattgcatcaatttacatcagctctgattttgttatagatagttattgccttccattttactgagagaagtgtaattgktttcaaccttatagacaacatctggggaagatgtccagacttyacaaaggtacttaagamcaattcaggtcyaakaaktctttgncaaaccccctcgganttnggttaccctgc

SEQ ID NO: 1572 - DNA, 432 bp, Homo sapiens
  SITE (382): n equals a,t,g, or c
  SITE (391): n equals a,t,g, or c
  SITE (397): n equals a,t,g, or c
  SITE (432): n equals a,t,g, or c
ggggagatggcctctgcacgtaggacgaccacagttgagaagcgtcggtcctccctgcatcctagccccacccgagtgtggattttagcgctgagcttttcttctggctgagcagtagccgctgttaggcaccatcttgtagtgctggaagtcgctgccaccactgcaccaacagttgccaacctgacagaattagatatgagcctcatcctcccaagtttggaagaagagcttatgttcagcctctggcgtccactgtatcccaccaagttggggttgtcgggaatgtcccgcccctccaccacatctttcaggcctcagtttcccctctgtgaaatgagttccctccagctctgatggggccgtctgtggaggaggctanagactgtanctttgncttgcactgatctgctatgtggcctgggcctcaan

SEQ ID NO: 1573 - DNA, 420 bp, Homo sapiens
  SITE (276): n equals a,t,g, or c
  SITE (375): n equals a,t,g, or c
  SITE (390): n equals a,t,g, or c
  SITE (406): n equals a,t,g, or c
ggttcattataaatgacaaaagccactcttgttactccagaaatcccaaggcttttaagaaatctgggccaaaaactagggacaaaaatcaaatatatatatattgcaattttatatatatatatatgtgtgtgtgtgttatgccacagtgccagccctgggctgggaattgaagataaaaggatgagcaagacagtgtctctacccccacagaggaagaggagagggacagggcacagttgagaatgaccactatagacattctataggaggaanggggctggcactctcaactgcattggctgctggccccggctgaccccgaggaggaaaccctcctgcaaacagtgttgagaatcccagccaggctcttangattgcacacagcangtgtgccccacaggancctggtgagatcca

SEQ ID NO: 1574 - DNA, 431 bp, Homo sapiens
  SITE (316): n equals a,t,g, or c
  SITE (374): n equals a,t,g, or c
  SITE (393): n equals a,t,g, or c
  SITE (419): n equals a,t,g, or c
ggttttatctcttgtaattttccaaccttttgaagaagttgagagactggggacttgcccaggaaacaagacaactagaggtagaactgggttttgaacacaacattctttctccagggcctgtgctcttgattccagcctgttccatggaaaatgttcaccaaaggctaactcagcgggtgtccttgagcaccactgagccattcaagggcaaatcaatctatgttcagaaacaaatggaaatgaagactggaaaacaagaaaatcagatatggattcactggttattctcctgcctgttgcccaagggctgtanaagatacagagagaaagtaccacccagatcccgtttcaaataagtatttgctgctcanatgttaagcgtgtggccanggatggcctctgctgcagcattcggncctgtcctggca

SEQ ID NO: 1575 - DNA, 311 bp, Homo sapiens
  SITE (296): n equals a,t,g, or c
  SITE (302): n equals a,t,g, or c
  SITE (306): n equals a,t,g, or c
gtgcttcctgggcaggacttggtctgggggagcaaggggaggagcctatgggctgggaatcaagtcttgcctcccctgagggtgtgaggaagtccagaacactgccctctccctcttccctaattggtaccccccagtcccagtgctcggtgatgggaagatccagtgaaaggccacatgcttagactccccaggcagagctcagctctacttctcacctgctctggggccctgggcacacagctcgcctcagaatctccaggtctatattttgaggggtgaggctgtcctacctncattgntgancccct

SEQ ID NO: 1576 - DNA, 285 bp, Homo sapiens
  SITE (269): n equals a,t,g, or c
  SITE (283): n equals a,t,g, or c
ggccccagccatcttcaccttgaagcagcattagggacaagagcactgaatagggagccaggagttggttttgtacttccttgccgggtgaccttgggtggtcctgagcctgctgagcttcattgtcagcctataaagtgaggggtgggcagggggattaactactcccctaaggcccttcagctctaaaagccccarggcttttaaaaagctctcttggctgagccaacctcccgggccctggagatcccagttctgctgtcccccanagggcctggagcanca

SEQ ID NO: 1577 - DNA, 411 bp, Homo sapiens
  SITE (366): n equals a,t,g, or c
  SITE (406): n equals a,t,g, or c
  SITE (411): n equals a,t,g, or c
ggtttaatcctctttagaagatggcttataatcaactatagaactagcaggtgttcttaaatgcaggtttctaataactttggaaattgtaacattggaataaaggaaacaacttttagaactctcattaagaggtggagtgttcatgaatggaatgttcagttaacaggagttaactgaattaactgaaccaatagaaaactgaagtaatctttttaactttgattaaaacacttctgatcttttgttttgtttttcagagtcaaggaaacttttcttttgagctagttacagcttttaacagttgaggtactcctatgaacaaaatttggaacatatttatttctctctacctgatttcttcanaatttggaaactagttttgaatgttcttaacttacagcantatan

SEQ ID NO: 1578 - DNA, 389 bp, Homo sapiens
ggatgccacatgacagaaggggtccatgtagaatttcgtttcttcctggaagtcccaaggaaacctgcaagtattatgataactaggaaggaaacctgcaagtattatgatgaactgggaaggaaacctgtaagtattatgatgaactagatagaactacatgtctctcatgatgaaatgcatctccctctgtttaacaggatatggggagttttaggacagggaagaaagtgctcaattagaaagaagcaaagacaattactctagagtggagctggccttccagtcctcaagactggggagcagcagttggggctcattagtgaagagtttcatttttttcattttctgaacagggctctccatggtactgaaggcttctttggggg

SEQ ID NO: 1579 - DNA, 444 bp, Homo sapiens
  SITE (393): n equals a,t,g, or c
  SITE (401): n equals a,t,g, or c
  SITE (430): n equals a,t,g, or c
  SITE (437): n equals a,t,g, or c
ggaagaaatagactatactttttaaagatagaaagcatggcatgccctccaaaattaacctagtggaacatggtgtgtaaagtctcccaaacccatcaattttagccttactttatagtaataaacactttttattgccaaagtaaattaggacaatgatctgggtaaaataatgctcttgagctggataagaaagactttgattttcttgccaaatttaaagcaatgaccttcgttctaagtgtgaaagcagcatatcattgttgtataaagacatgagtgaaccccactgaaactcttycaccgtgaggttctgtcataccagctcaaatagtgagtaatcaggaatggttcaatacattaaacattcttttggcatggtgatccttttgncaggtcanaatcattatgactagaactgaaaattgantgccagncatggca

SEQ ID NO: 1580 - DNA, 448 bp, Homo sapiens
  SITE (420): n equals a,t,g, or c
  SITE (431): n equals a,t,g, or c
ggccccctcagatcttcgaaccatccagacttttgttaagaaagcaaagtcatccaagagaagggcagctcaagcaggtcccacccagccaggacccccaaggtccactttctctcgtctgcaggcccccgacagtgctaccttgcttgagaagatgaagctcaaggactctctctttgatctggatgggcccaaagtggcatctcctttgtcccccacatccctgacacatacctcccggccccctgctgctcttacccccgtgcccctttccagggggacctctyccatctctcgaaagaaggaccgaaagaaccgaaagttggggccaggaactgggctggytttgggtgcttcgragsctcggcactctgggatgggaaagaraytcgaatmagaagacagaacgagtaaaaaggnacgggggatanctccactctggctccag

SEQ ID NO: 1581 - DNA, 425 bp, Homo sapiens
  SITE (352): n equals a,t,g, or c
  SITE (385): n equals a,t,g, or c
  SITE (393): n equals a,t,g, or c
  SITE (406): n equals a,t,g, or c
gctttgttccgtggtggcacacaaatcttggcttgctgtaccatcattggcaaacctcatcatatcacagttgggtgtgtttgtatgtgtgtragcactagtgtgtgtgtgtacatattcgtgtgtatgcacactttgtgtacctgtgtacatgtgattgtagatgtacctgttgtgtgtaaactctgttaaaatgaaatttgcttcgcatttaatgtgcaactttgaagtagtgtaatatttatctaaaggttttcactacttggttttaatgtctttgaacgtgtacttctatcttcaagcaaacttatagtaccgtgttgctaaactaactttttccaaagaaccgagntgaccttctatttttcctggctaccacccaaangggatggngggctcttttttncctcttggaaatggggctt

SEQ ID NO: 1582 - DNA, 392 bp, Homo sapiens
  SITE (292): n equals a,t,g, or c
  SITE (369): n equals a,t,g, or c
  SITE (371): n equals a,t,g, or c
ttggggacatcttaaccctgtatgggttgatagacctttcaagtctgtctactagaaaattccctcaaatcttatttcakagaaagtmtgggctgacttgacaggactgatcagttttatcagtgacacatcttatcatttaaacagtgcaagagttaatggttggttattaagcactcagtaaaggttggtgaacatgtacatacaggactagatctctcctctgtaatccactctaaataaatacttcagtctggttacaaaatcttaatactgtactgaagatttttgncagctgatcattggattacatttgggtaatttatcattacatctatgcttcattatcttcactattcttcacagctnancttttatcgtttcattcacaa

SEQ ID NO: 1583 - DNA, 598 bp, Homo sapiens
  SITE (491): n equals a,t,g, or c
  SITE (495): n equals a,t,g, or c
  SITE (582): n equals a,t,g, or c
  SITE (598): n equals a,t,g, or c
gcccaaaattagattatatttgaattagtaatccagaattagataactcctctaatccaaaacctaattcacttaccttcttctcacaagactttttaagctagtctctgctctgttattgtgcggttccatttccatggtggctgagaaggttgtttcacagttgtaagtcactttccatctcttcaaaacagatttgatgtaactgattagtcactcctttccctcgacatttatattctgttttgccatggtacttgktgtgcatcatttttttctttctccggcagaatctcccagatgggaacctctttgtgctctttaaacttcagaggtgtaacttgggttcatttgcttgcgtttgcataaaaacttttgattcctaaagaagccggtggtatatcagaacaaaagtcggtatgacaatgacatttagatttggacagaagttggtgactgaaaggtagagtcacatcctaatttttggtaanccgnggggaagggtcaaaattaataataccggtaacataatttaaaacattttcaaggttaagggtcggttcataataaccgaacctgganaaattccgggcccccn

SEQ ID NO: 1584 - DNA, 478 bp, Homo sapiens
  SITE (334): n equals a,t,g, or c
  SITE (382): n equals a,t,g, or c
  SITE (433): n equals a,t,g, or c
  SITE (455): n equals a,t,g, or c
ggtggaactctggggaacatgccaatagttgaaacgtattttgaggaagcagacactgggaagaaatagaaaaagaagttggttaaaaataaagtattataagaactgagaaaagaaagaatttcatgaaggagtaggtgtcagtaatgtccaagaccagaagtcacatgagatactgactgactttgggaatttggaggtcacttacctgtagtagtttgggataggggaacatttccattggaatggtaatttgcatcctgccattgccacttatttattctgtgacttgggaaagcccttttacctttgactcattgtctgtaaagaggangttggcctctttaatggggttcaatctatgatctgtggagtgccagangttcataaaaggtaccttcaggcccttccatcaagaaatcaagggtaaggncagatatttgttggtgaggganggattaaaagtcctctacccctg

SEQ ID NO: 1585 - DNA, 518 bp, Homo sapiens
  SITE (496): n equals a,t,g, or c
  SITE (503): n equals a,t,g, or c
  SITE (508): n equals a,t,g, or c
  SITE (513): n equals a,t,g, or c
  SITE (516): n equals a,t,g, or c
gacccggaaataaacccaaatagttacagcttagaaaacagagtaagttttttttgtagatgcagtaaatatgaaaaatattcaatccaaaattaactctgtaaatgtcagagaattcacagtagaaatgataaggcactggcacttcagactacactaaatcagagtgttgagtaaaaaaaataatttcaatctaaaatttagataagttatttgcatataacttaaaaaagaggaggtgattttttggagaattataattacatttgaagtatactttttgkatacttcaaatatcaaaaaaattamcatcacmatattgaaaaaaattacmgactctgaaaagcaaataaggatgtaattcaactctcaagttacttcatgctcttcattcctactttatttacatgkgaaagcatgcgatcaattgttgctgcatcagagatatgaaagatcctttttatagatgggcattatttatgacctttttcatatnagagaanggttnttaanatntt

SEQ ID NO: 1586 - DNA, 501 bp, Homo sapiens
  SITE (461): n equals a,t,g, or c
  SITE (478): n equals a,t,g, or c
gcagctgtctgctccctagcagccggccttcgggtcgggcgtctccgccggctactgccgcttcagttctcccggtgtggccacgagtcggattttggatataagtaatgtgcaggtttcttacatgggtacattggatgacactgaggtttggggtactgttgatcccatcatgcaggttgcactgctgtgatccatcctcatctcctaaagatgcatcctgacttatctccacacttgcacactgaagaatgcaacgtcttgattaacttgcttaaggaatgtcacaaaaatcacaacattctgaaattttttggttattgtaatgatgttgatcgggagttgagaaaatgcctgaagaatgagtacmktagaaaacaggaccaagagccaggggagcatggcattgcaatgcggaaagaaactttttaatcctcccagaggaatcccggaaaataaanttgtattttccacacgnatgcccttgggtggagagaagaa

SEQ ID NO: 1587 - DNA, 576 bp, Homo sapiens
  SITE (575): n equals a,t,g, or c
gggcccctattcaggaccattctgtggccgtgccagagtgcatacggatttcacgccaagtccctatgacactgactccctcaaaatcaagaaaggagacatcatagacattatttgcaaaacaccaatggggatgtggacaggaatgttgaacaataaagtgggaaacttcaaattcatttatgtggatgtcatctcagaagaggaagcagcccccaagaaaataaaggcaaaccgaaggagtaacagcaaaaaatccaagactctgcaggagttcctagagaggatcatctgcaggaatacacctcaacacttttgctcaatggttatgagactctagaagatttaaaagatataaaagagagtcacctcattgaattaaatattgaaaacccagatgacagaagaaggktactatcagctgctgaaaacttccttgaagaagaaagtaagtgtgtacacctactcttctccccagctgataatcagtttaatgkaaatagtataatcattagaaacaaagccccagtttatttactgrgawcatgaaagcacgcttttcccataaaataggna

SEQ ID NO: 1588 - DNA, 484 bp, Homo sapiens
  SITE (434): n equals a,t,g, or c
  SITE (463): n equals a,t,g, or c
  SITE (467): n equals a,t,g, or c
  SITE (470): n equals a,t,g, or c
gtaataaaccacccaccacctggcactggtaagttactccatgaatgatagctgtaactgttaaccctctaccaggtactatctcaggtccctagaagcaaggcctgagggagacagacagggcatgggaagagtgagcaaagacgtggctcagctggcatctggcctgcagctgccccacccgagacgagacgggtcagcttttggctgtaggtggccacaggtggaacctctgaggcattttctggcaaggtggctccagctgggacagttcgcagaactgcactgcagagcggtgagaagaggacagccaacagccacagcagcaaggcagtcaaggggcctgggcgccaccacagcgatggcgatgagcccatttacagggacgctcaagtacaaaggcacattacatgtgcctaagaccttaacatcanaggctttggcagcgtctcctgaatatggngcangangttggtatggtcca

SEQ ID NO: 1589 - DNA, 430 bp, Homo sapiens
gaccaggagaaggaggcgacaggcatgtcaattagtagggggaaaatccaaatgtcagaaatatgggggagagagaaagcacgcaggcagtggatgcaaatacagggaacagagtctttcaattcagataattaaacggatgcataaatyagcacccttgcctctctacaatacgcaggcgatgccatgcagttaattatcagccaagaccagcatgaaagtcattttatgatgactctctgatcctaatataacagcacctgacagattgagccccctytaatgagtactctctttgtacaatcctctctcaggaacactaaatcatttgcttccaagtacagctgcctgtgaagaaggggtggggctagatcatgcatcagaaacctgctcttgtgaaatcaggggctgtcctgtaggccttttggga

SEQ ID NO: 1590 - DNA, 228 bp, Homo sapiens
  SITE (93): n equals a,t,g, or c
  SITE (216): n equals a,t,g, or c
ggcagagcggatcttactatgtcagttgttggttgtggtcggaaggttctggagtcatagtaagggccagcaagggtgatgtttgtccctcanctctaatgtcgaaaagagcgtctgtggctaccttagttgctggagatcccacacgtggccagagccagaggtgggggctagagccctggtttccttcttctgcttcctgtccatgtgctgaangagctgtttagg

SEQ ID NO: 1591 - DNA, 380 bp, Homo sapiens
  SITE (368): n equals a,t,g, or c
  SITE (375): n equals a,t,g, or c
cagacataatgatggcaggagctggagcagmsacctgaggacccagagctcaaagccacatgttgagaagggcagagataactgtatccactctggactgctgacctttgaactattatgttatttccagggaaatgcaaaccaaaggatgtggtctctgatctaatccttagagaatgtgaccatgaagacacttttcctacctggtaaacaaaagataatgagaaaagtgaggttggaagttggtttactgagccaggagctattaacaggtgctggagcaggggtgtgatctgaatgaccagagggaagggactgatggrattgggtgggtgaragcytccaggccctttaggctttttccctgnctttatnaatgg

SEQ ID NO: 1592 - DNA, 308 bp, Homo sapiens
  SITE (98): n equals a,t,g, or c
  SITE (222): n equals a,t,g, or c
gtttttttttttttttttttaaattctattcataccttccaaagagcagctttgatttggttctttagagacattccttaggggggcatatgcttttnaagaactattttccccctcaactggggctgcggcatccccttgcagctaaaccaccacaccgcaatccgaccgaaataaagctcgcccctctcatcctccaggtccacgatgatttttttacgngtctcccagcagcatttaaacggacagttcagcagctcttttgcggctggggacaccggcctgtcggttccccctgccctacccag

SEQ ID NO: 1593 - DNA, 349 bp, Homo sapiens
  SITE (219): n equals a,t,g, or c
  SITE (270): n equals a,t,g, or c
cgagactccgtctcaaaaaaaaaaaaatgagctgaacgtggtggtgttagtattttattctgtttttctgcaaatctttactgaactgstcattatgcaccaaggactctgctacattctaggaattcaaaaatgaacgagagagttccagtcctcagatagctcataatcaagctgtgtaatagtcaccggataataaaatgtaatgagatgcattgnctaaagtatggagaggattctccggtggagcattaaagggaatagtgtctnatgctcttttttttgcagactttatcttttcatttatcatctatttcatagttctaatgcaagcactgtattgcccctt

SEQ ID NO: 1594 - DNA, 310 bp, Homo sapiens
  SITE (237): n equals a,t,g, or c
gaaaagaagcccaaaccaaggcccccagagaggtcccccaggcccctttgggtccctgagcctcagctggagatccggcgcagkagaccaacgcctgccatgctgttccggctctcagagcactcctcaccagaggaggaagcctccccccaccagagagcctcaggagaggggcaccatctcaagtcgaagagacccaacccctgtgcctacacaccaccttcgctgaaagttgtncagcgcattgctgagtctcacctgcagtctatcagcaatttgaatgagaaccaggcctcagaggaggaggatg

SEQ ID NO: 1595 - DNA, 323 bp, Homo sapiens
atacatcttaaaatcagaacactgttccctaacagtcacatatatatcagtgaaatcgaattcattttaaagaaatttaattattcactgtagtttaatttactatatctctwaattctaaggtgttgaatataaattaaatttagatgttagccagatatcccattatttcacttatcttaatatgatacatgtaaataattctttagtcttagcttctttctttgatagtaaactcacacatatttgtggggtatttttatttaaaatgtgttcaatttttaattatataaagtaccacctctcttttcagccatgtaagt

SEQ ID NO: 1596 - DNA, 272 bp, Homo sapiens
  SITE (38): n equals a,t,g, or c
gcaatgtgcacttcataacgtgtttaaaaatgtaagtnacgtgcttctgcatttttcctggaagatcgcacgcacttaatcaaatcacactgtctcacaccgggtttccaaaaactgacatacacccaagcaacatttccgacaacatggtaagtagaaaattgtgattatttccttacataattatttcagagaattttgagtaaatacagacattcccactgaaacttggaagttataaaaccatgtactacacagctctgagggttctt

SEQ ID NO: 1597 - DNA, 226 bp, Homo sapiens
tgatcaggagctctggtcccagggaggaaactgggtttatgtggaacatttaatagccacataaggagacaatgaaagaagtgaccctcggcagagcccacctkttgccaaatacatggcttttccagttggggctgtcagaccagtgggggccaggggctycccaagcctggtgtcagcagkagcccctccaggttcgctcaggggaaaggggctttgttggaag

SEQ ID NO: 1598 - DNA, 385 bp, Homo sapiens
  SITE (296): n equals a,t,g, or c
  SITE (327): n equals a,t,g, or c
ggcagagttgggtttttaggtataggtgaggtccgttttattatctcccttaaaagaggttttaggtcatcctcgtgttgcaggtcatctgagccatacctgcagcctcagtcggggacgtgataccacctgtgaatgggtgcagggtttggcctgcaacatcttgcatgtccaaaccgtgaactacctttctgaaatgacttttcctgtccctagagccacagcattaggagaggtggacagagggattggtccagtagcacttcaagtaattcccacctcacaaggcagcacantctcatttttttcagtttctctgttgggcanttttatttagtggtcaaatttagtgttttttggcatattaaaattttatttggggttt

SEQ ID NO: 1599 - DNA, 329 bp, Homo sapiens
  SITE (313): n equals a,t,g, or c
ggcagagactgactgaatggatcctcctcttggccgaggactttccaaagtcaacccaaaaaattagtttaggccatgatgggsaggggggtcagacatgcctcatgaaaccctttggagtgcaggcacagctgaccagcattgacattaaaccagagagaccttgagactgacaaaacaggctctttgtagcgataagataccaaattccaacctgactctagcatagcatcacatgacagatagcaggccctgaargaaattcaaagtattttcccccmaaataggtttctttggcatwttttgaagtggncctggaaagctgttct

SEQ ID NO: 1600 - DNA, 348 bp, Homo sapiens
  SITE (348): n equals a,t,g, or c
ggcagagctgtcagtcattttattgctcatgggtctctgttgtcttttttgtactcaagcagtcagtcttccagataaccaacaattctgcaaatatccagaaatgttcagcaaatgctgagrcctcctttggcttgagraagtcactgcggtcattgtgcctctgggcagctcatcctttctggccatgaaacagccgcaccagaactcccacgcaacctgtgtccccagggacaggccagcagaatacagaggacagtagttcatgtgcgtaagagccctggctgtggagagcaaatctcagtggccaccatatkgctagctgagtgaccttgggcaggtcacatn

SEQ ID NO: 1601 - DNA, 254 bp, Homo sapiens
aatacaacacccgcatcgccctgccccttgccacttccaaggacaagttttttgacgagagagtgaggaggaggacaacgaggtagtgacccgcgcatcactcaagatccgttcccagaaattaatcgaaagtcacaagaagcaccgtcgctctcggaggtcctagactcgtcctgacacccaccaggcggcccccttcggagcccccgatccctccgggtctagcgcargccccacgggcccctttcagggtt

SEQ ID NO: 1602 - DNA, 560 bp, Homo sapiens
agggagctgtcaggctgggatcccgggcagcgtccgccatcgcgcgccaacgggccccgccttaccagatggtggcaaagcagccggtgtggcgctgaagcacgttgggatagtagaacattgtccctctggtctttcaccctcgattccaccagatccccgttcggatctgagtcggaattctttagggcacagaattcccaacaccttggagagaagtcaggatttggacttctctggtggcaaggtgggtgcacctagaaagccaagttaatgaggcaacgaacaatgggcagatacacaattaccaggataactgagacgcaggagatgggcgcccctctctgtggaccctcggtggatccgcacgccacgtgatgcgtcaaacttgagacttctgggttgggttccaggttggagatgcagagctccaaggggacgtccgggccggaatccagagcaggtcccgagggagcacggtgtcctccacagcaggcctcggtcctcgagcgctgggagcgatgtcagcccctgggccttgcactggcttgggcggacgc

SEQ ID NO: 1603 - DNA, 354 bp, Homo sapiens
  SITE (253): n equals a,t,g, or c
  SITE (294): n equals a,t,g, or c
  SITE (303): n equals a,t,g, or c
aaaggatgttttgactcaacactagtttccacgtgtttaatccaaactcagttgttgtttaaattgttaaatttctaatacacggtccactgggtaaaccatgtattaggctaaactttycttttycttttctttttttttttttttttttttgagacagggtctcattctgtcgcccagtctggagtgcagtggcgtgatcatggctcgctgcaacctcaacctcctggggtttcaagcaaatcctcccatntcaggcctcccaagttagctggggacttacagatgtggcancaccaggcnggggtaaattttcgggattttttttgtttggacaatggggggcccttttta

SEQ ID NO: 1604 - DNA, 182 bp, Homo sapiens
  SITE (161): n equals a,t,g, or c
aaagaaaatctaaggggagtttacccagtctgtatgggagccatgcagatgattcattttggctctttaaaagasctatttttaaaaatagaagtaggactgctgagaaaaaaatagtactttaaagtatacatgggttggccaggcgcggtggctaacgnctgtaatccctgcactttggg

SEQ ID NO: 1605 - DNA, 366 bp, Homo sapiens
ggcacgagctggtcctttagctcaggttgactcaatggcatcatggtgaccttagagcatccaagagtgcctaattttccactagagcataatgaaacataaagcatgaacttcataaatcttgattataagagtgggmtcctcattcttgaaaatccaaaatggaaaaacgtsggwtggtgtggttcaggtaaaagacgmtgcagtgrctttwtggaggtcacttatttggtagatgtgacaggttacaagtggcagaaacggtctgatccaaggyttgatcacagaacaccctgagaaaatgtgtaaaggaaagtagtgcatggctgagttaaagaagtggagataagcctgggaaaggttagg

SEQ ID NO: 1606 - DNA, 303 bp, Homo sapiens
ggcacgagggcccctggaccggagctgccatctccagtcctacccactccaacgctggctggtgccgggggccgggaacgctccgtacgccgcccgccagtgtgggagccgcactggggcaagatcaggtgggacagcccaaagactccgggccaagttcctgggggactcggcggagatggaagatgattctcgaagtctccatttcctttaattttgaagttatctttcagtccttctttcaatgctgtgaactgagtgctttgcttgattattggtgcttgctggatcctggactaataa

SEQ ID NO: 1607 - DNA, 112 bp, Homo sapiens
agcgaaggacctggaagttagtggatacatttttgggaggatgttaaaaagttgtaccactcaaaagccttcactgtgcaacttcggggacaccgagaaggccaagaaacag

SEQ ID NO: 1608 - DNA, 324 bp, Homo sapiens
  SITE (95): n equals a,t,g, or c
accaaagcaaaaatgaacaaatgggataacatcaattttaagtttctgcacagcaagggaaacaatcaacaaagtgaacagacagcccacaagantagaagaaaatatttgcaaacaacccctctgacaaaggattgataaccagaatctatctgggtgcggtgactcacatctgtaatcccagcactttgggaggccgaggcgggtggattgcctgaggtctggagttcgagaccagcctgggcaacgttgtgaaaacctgtctctactgaaaatacaaaaattagccaggcgtggtggcacgtgcctgtagtcccagctact

SEQ ID NO: 1609 - DNA, 344 bp, Homo sapiens
  SITE (233): n equals a,t,g, or c
tgatcagcttagtgggcctcagacacagtttatgtttcatggtactggggataaaaaatatcttgatgaagcccttacaaagagccctgagtggaggtgctgaataaacctaaactaatagggaggaagggaaaaggagttacaggtgctaacacttttaatttttttattttttatttataaatagagacaggatctcactatgttgcccaggctgttttcgaactcctggnctcaagcaatcctcctgcctcagcccctcaaagtactgggattataggcatgagtcactgtaccgggccaggtgctaacaattttttaacactttgcatgtatcattcatt

SEQ ID NO: 1610 - DNA, 280 bp, Homo sapiens
  SITE (128): n equals a,t,g, or c
  SITE (269): n equals a,t,g, or c
aaaattcttcctgatatctgttgaagtatgcattaagaaaataggggcattgcctggaatttaaactggctgcctagatctttgtgtagataccactctgtactgtctgcttagacatttggcttttnactataccccaagtgattaagctctaggtattcaatggacatatcagaacatcatcaatttatagtagggaggaatgtctttcatactgaccaattcctatactaatggtcagttatgtgtgaaatctagttataatcaanggttttttggg

SEQ ID NO: 1611 - DNA, 367 bp, Homo sapiens
  SITE (34): n equals a,t,g, or c
aaacaacggagtctccggtcattgctgatacttnctgacccagtgtgggtacccattaaagtgaaagtwtccattttactttacgttcaaatgtaaaggctgaaattcggaacatttttaacaaagcattttaatgagtgctttgatacaacaacattttggctcttctgagggctctgtttttattgaagataaaattaccttaaatgtttattgctctgagacagcccaggatgagagaattacaaaaaagaatggatttatagagaggrcacaatgttttgaacagtagagtctggagacaaacacatttaagrgttaaatattttttaaaacagttgttaaggctgggcgcggtagtcacggc

SEQ ID NO: 1612 - DNA, 372 bp, Homo sapiens
  SITE (319): n equals a,t,g, or c
  SITE (367): n equals a,t,g, or c
aattcggcacgaggcagcaagagacggtcatcattttagaagactatgctgacccttatgatgccaaacggacaaagggtcaaagggatgcagagagagtcggagagaacgacggttacatggaaccatatgatgcacagcaaatgataacagaaattagacgacggggttccaaagatcccctggtgaaggctctccagctgcttgacagtccctgtgaacccgcagacggtggcctgaaatcagagaccttggccaaaagacggrttccaaggacctyctggggaagccgccacagttttacggcattcctacgggnctgcagaaggggggcccagggcagaggggaagskgcgggccccmaganagccg

SEQ ID NO: 1613 - DNA, 386 bp, Homo sapiens
  SITE (364): n equals a,t,g, or c
  SITE (368): n equals a,t,g, or c
aattcggcacgagcttaatgggtgcagagtttctgtttggagtaatgaaagggttttggaaatagataatggtgatggttccacattatgaatgtaattaatgccactgaattgcactccagcctgggtgacaagtgtgaactgtgtctcaaaaataaataaataaataaaaataaaaatttgaacttaaaatttctgtgtacatttctattttcttatgagaaattgctgaaaatggacttattctaccaaaggggtacaagctttatgaaggctcttgatacgtactgccaaattgctttctggggaaggttctttccattttatgstcccacaagcagtatgttagrgtgtccttttaccnattntcactagcactggattta

SEQ ID NO: 1614 - DNA, 331 bp, Homo sapiens
aattcggcacgaggcgatcgctccatccggggaaggcaggcgcgggtaccctattttagagtcacgcatgttgaggttattgctccaagactcaaaagggagtcgggaggattcgagcctggaccttttgagctccccagtatgggcaaactcaaaggagctttgttgtccccgggtcgtgatgtcgctgtgatgatgggctgggaagcaagtggaccccagcgcctcgccgtccacatcttttaagaatggaacagccaggggtggggcgagggtggcctgtctccacgtaaagtaggagtttatagataaggaaactgaggccacatgg

SEQ ID NO: 1615 - DNA, 280 bp, Homo sapiens
  SITE (252): n equals a,t,g, or c
taattcggcagaggctttttagtgaatcaaaggtacccttctgcctgctttcaaggtgcccagaaaccaaattgttaaggaagatgttgcttggtgaaaaagatttgggtgttctgtggaatatgtcaaccaggcttggaggattattgttgtttctgtagtaggtacagagtatcctcacctgttctggataacttaaagtcaaaagatttaaaatggctcatcagcaccaatttgttttttgacaaccgngatttacatatatatgtgtgtctgtatt

SEQ ID NO: 1616 - DNA, 400 bp, Homo sapiens
  SITE (360): n equals a,t,g, or c
  SITE (398): n equals a,t,g, or c
aattcggcacgagtgagagaacaggaaacctgccgagaaaaagatcgataagcagacaattacaccaagccaacttcagtgcaatcgttaaagcttacacatgggtgcacgcttgggagccgtgagctaccatgttaaaaggccaacttcctaaggaaaaatgatggaaagagatcccgagatcctatgaaatggaagagggaggacaacccagctatcccaacatcccagctgaggccagccacacacgtgactgtytgcaaagcccgtcgggcctgggtccagctcaggttgcagattgttggcaagtaaaacgtttgttgtcgttctgattcaaaaacatggrgacaaagcagattntagggtttacagtcaacaatagacctacagttaaggantt

SEQ ID NO: 1617 - DNA, 279 bp, Homo sapiens
atttatttcaagggaattacctttttaatttgattagaaggatgtgatttatggcaatgaaatatttgcactatttaaacctgtttatctaaattatttttatatatctatatgtagatatatacccacttttttaaaggttggcatgtttgaggacgagacaggagtccaagtggctggagtagaaggaagacggaggctgttacaacatgaagtcaagtagggcatcaagttaggtattatggaaggcagggaggcaggatgggggcagggacatag

SEQ ID NO: 1618 - DNA, 353 bp, Homo sapiens
  SITE (305): n equals a,t,g, or c
  SITE (315): n equals a,t,g, or c
aattcggcagaggctccagtcaacagaattaactgagccttccttgaatcatcccagcccaggtgccagaagtgtgagtgaggaaaccttcaggtgatcacaacccccagctgttcccatcccccacagcttttgtgtcttcccagctgaggccgcaaacgtcatgaaacaaagacgagtcatccccactgtgtcctgccgaaattcatgacccacagaatccatggaacttcatawaatggttattgctttatgccactaaagtttggtgtagctagttatgcagcaaaaggtaactagtatanttttgataanaacactatgaaagatgtaattccaaaaatgacacacag

SEQ ID NO: 1619 - DNA, 504 bp, Homo sapiens
  SITE (19): n equals a,t,g, or c
  SITE (22): n equals a,t,g, or c
  SITE (302): n equals a,t,g, or c
aattcggcacgagctcgtnggnagccatagtccttggattcccatgtctcaggacagaaactaagtctttttccctcatcccctacctcccatgtcagtacccagtttaccaggccctctactcaaccaggccctcatcaatactcttgaaagatctgactaggccaaggtttaagtagctggtcatgacccagtgaaatgcacacgargaagcctttgtgtgttaacagtgaagtttcagaaagcatgcaggtgggtccttgtggccctcaaaccacctattaagaaggcaaaggggcccntatatatagaatttgctactatttgtctgctattcccatgaccttytccaagtcttcttctccctattctwtwaaaaaagtcactgtcacattgcaagwtaargataattgtttatcgggatcagayttgtcatgggcgtcaaatggsaagggctagtataaaaattggaggatggggtggggcagcagagtggggttagca

SEQ ID NO: 1620 - DNA, 192 bp, Homo sapiens
ctgggaatcctgcctcggggcctctcctcggccatctctctctcccatagtctccatgttgggcagggaggggcttggcctaaaagcccatgctctccccacaggtggatgtggacctggccaagcagtgtgcagacctgcctgaggaggatgaggaattgcgcaagaagctgtggctgaaagatcgcacgg

SEQ ID NO: 1621 - DNA, 311 bp, Homo sapiens
  SITE (85): n equals a,t,g, or c
  SITE (120): n equals a,t,g, or c
agagcagatggaacaagtcctcctgccctacagttgaggagaacagcagggtccagagggccattagggttagctagtgtctgtnccacttctcaggaaggacaaggggcctgcttgtgnaggaagccccgctgcccaagatggcatttcccccactttgggaaaatcatgttctcttctcatgtgcctgataggttgctgttacaggctgtgtgctggtctcgatagcactaaatatatcctggtagatttggcctttgtggtsttaaagctaaattgctaaggggggctttaaggtttgttccccaatt

SEQ ID NO: 1622 - DNA, 353 bp, Homo sapiens
  SITE (1): n equals a,t,g, or c
  SITE (5): n equals a,t,g, or c
ngctnccccagagctgctccaagctcctgcatctyttagccccctttgcttcctcagcctccagagaactttccatcagctgtccctcgcccagccttgcagacgcggtgacttcacgcgtgacagctgcagcctttgttccaagtgccgtgttgggcatccaccagcaacaatatgcgggttacctgatttacttcttttaatacacttcaggtaattataactgcataaaagagaggacaaattggcaagtaattacaatgttaatttggcaacgttttatcatattgtggaagcgcaatttcctctctaattgtattgggggggacacatttatctgtggttcagttact

SEQ ID NO: 1623 - DNA, 354 bp, Homo sapiens
  SITE (186): n equals a,t,g, or c
  SITE (272): n equals a,t,g, or c
  SITE (337): n equals a,t,g, or c
  SITE (349): n equals a,t,g, or c
agggaatgccaaaaaaacaaagggcaagtcaaccaaggcattttgagaacatgaaattgcttcttggtgggaaggctgggccccaggrgtatccacaggctcaggccatgcccctccccgcacccacctcctgtctccctccctccctccataggrgtggggggcccctagkaagtgctctgcctncattccctgttcgtaggaaggtgcaggagaggaggtgggtcaagcttatgggtttcttggtaaagagcctttgacgacagcaaggnatggggaacatttccccatcagcaacggggctctagggcattattaagtaggggtgaatatgatngatttgcatttnggaag

SEQ ID NO: 1624 - DNA, 477 bp, Homo sapiens
cagaggctcttgagtggaattttaataacctatttacaatatcaaaacatggcaatgtatttcagaaacacaaaataagtttcaagttccttgtaaacatcccgctctgtcctttggaaggtgcttctgggaacgagcctgcgcaagtttctctcctctacttgggagacatagagatctcagaagatgccacgctggcggactgaaagtctcaggtcagacttcttcctgcaccataacttagtggtaatgtggcttcttccagtgagatattaatatattcttctatctccttttccctcaattacagtctgttctgatatggcatttgtmatatgccatgttcagtggtaagtacccgcaggcaatacacgcccatggtgcagacggctcctcgtggcctcactggtccctcctctgacaggcatgctgtgcttttgwttcaatctatcctcagtgacttgcggcttttgttca

SEQ ID NO: 1625 - DNA, 300 bp, Homo sapiens
  SITE (212): n equals a,t,g, or c
  SITE (240): n equals a,t,g, or c
agtcttaatggcttgaaattgtttagagggtgagtacagaatagatatcacagagagacatctgggaagtgaaatttgtggcatatgtraccataaaagtatgaatataaatgtgcccggtatggataagagagggaatatatatgtatatatcactatatgatgtttatagctgtagtaaatttagkaaagagctatttataattaagagncatattgaatggcttcagatcatctatnaagagtgtgcacattctcactcatacatgattttyccaaggtgccaggggggatgacmgg

SEQ ID NO: 1626 - DNA, 110 bp, Homo sapiens
aggttttatttataccacctcaaggacttgagttggtccttgtaaaaaaaaacaaaaaaaaaagtacactggatagagaggaaagcaggcagggcactagggttagaaag

SEQ ID NO: 1627 - DNA, 453 bp, Homo sapiens
aagaagtacttgagaatctatttcagttgcaaaatagttaacaaaatttgatttgagtagttctgaccttgctgtgctttggactcccatttgacagccctgaaggttcgtcattctaatttactcctgcccaaatggtgattttgacagtttaatccaaagtcttttaaagcaatgtctattcataccactttacaatctttatctaatctttagtgttctgaagatttaatttgctgacatttctaatttatggtctaaattatttgagagttttttgagattgagattaagcagatctcatagcagaatgggtactacaggagaagtcatagtatttcagtttcagtgtcttttggtttctgttgggcttcctttccgaatcaaggctttactaagagagattggctcctaggagctcattgcctttttaaagcccaataattatatggg

SEQ ID NO: 1628 - DNA, 164 bp, Homo sapiens
aggttgatccctgtttcattctgggaaaggcaaaactgtagggataggtatcaaactgagggttgggaaaaaggattgacttaaaagttacatagggaatttwagggggaaatgggaaatcctttgtattttaattgtggtggttacagaactgtgtagttagg

SEQ ID NO: 1629 - DNA, 604 bp, Homo sapiens
  SITE (10): n equals a,t,g, or c
aattcggcanagcagaatctattctttgcttgaatgattgaaatgactggtgtaaactgcaatcacttaactagacttttattttgactttgagtcaaagatgtgttcatggtcctttttataaaggccatgaattttcatgttactttcttgtgatatatgttaaatttcttattcccgtgttggggttcagaaacccatatccccaaatacggcactttgacatgctgaactgaagaagcctcaaggtctatgtgaccttccccctttctcctcagccaccatctctcccaaacacaggatgaagttaaagttctttatctgcctaaaatccagacccaccaaggagatcttctccatcttattagaccaagatgtaaccacacctgaatggacattttcccaagataatgyctgagytaatccctgctccctgatccattcattctccctcgcaatccctttaacagaattcctcttctctccctgctattttgccaggaasgcatagaagcttctgactctagttggggttttgtggttctccctgtgtatacattaataaagtttgtatgcctttgccctgaaaaaaaaaaaaaaaaaa

SEQ ID NO: 1630 - DNA, 293 bp, Homo sapiens
  SITE (279): n equals a,t,g, or c
  SITE (291): n equals a,t,g, or c
attcggcacagatgagccaccatgcctggccatttcttacacttttgtatgacatgcctattgcaagcttgcgtgcctctgtcccatgttattttactctgggatttaggtggagggagcagcttctatttggaacattggccatcgcatggcaaatgggtatctgtcacttctgctcctatttagttggttctactataacctttagagcaaatcctgcagccaagccaggcatcaatagggcagaaaagttattctgtaaataggggtgaagataanatatttctgganca

SEQ ID NO: 1631 - DNA, 746 bp, Homo sapiens
  SITE (35): n equals a,t,g, or c
  SITE (678): n equals a,t,g, or c
  SITE (699): n equals a,t,g, or c
gttcttcggagcctcatctgaaatgttagactgcngtgagggaattgttaaaatgccagcgstttttttttcctcttttttttctgtaattctgtaaaaatgcagagaaagttgwgtggtacttcagaattgagggagagggttaccgcagagtagaaatatatttctagatttcagttccacaccacaaatccacaacaatgccatttttcaactgtacaaaaatctgcttatgaactggacatgatcttaatggtagtgtcaaaggccaagtttttcacctgktaatatttttccmcmtttgkccytgaatctgaataactttatacagtactgtaaatttaacttacatcgagtttgttgtcaattcttatgaaaagagctttctgcatgtaacacatacggttaaagaacacagcaaaggacaaaatttgcaggaacagttttggaaccaacagaaaatgtcaccttttatttgccatcttatatatatctatcagttttaccagctacttctaaatttgtacattatttgtaagggaaagaaggaaaaccctaagacttgtctaacttagtggagaatgtgtgtgttgggcttaggatggatagctaagtcttattgagctgtgttacctaacttgtatataaaaattgtaattgaaaagtttgggttcaccngtttctcacagtttaaaatgntgagtaattggcaaactctgggaaatgtggactagtatatgatttta

SEQ ID NO: 1632 - DNA, 390 bp, Homo sapiens
  SITE (380): n equals a,t,g, or c
ggcagagggcagttatggatgggggtagccatggggggtttcgatattctttctgctaatctgtatttaactaatttttatttcttaaacaagcattgttttcataacaaaactgttattgataacaccttctcctcccatttggaactttaatgacctgtgctgaagacccataggcttgttaatgcatcccacagggattaactgccaggcaaggtgctttgggaactgtagagagctttgaagacatcagctgccactcctggtggttggtttacccttcaaacttcgagtatctgggcctcccttctgagacttaggaagctgagrtaggagcatggtggaagscacagcagccgactcataggcaactgtggggnaaataattca

SEQ ID NO: 1633 - DNA, 165 bp, Homo sapiens
ggcagagggttatatcactatttagaggatgttagggggtagaaagagcttttcccacacttgatgttctttaggtgaatgataccatattctcaaaatcagggcagcagtacacggtatgcatggaggtacaaatgggcagggagagatgttggttgccattgt

SEQ ID NO: 1634 - DNA, 110 bp, Homo sapiens
  SITE (94): n equals a,t,g, or c
ggcagaggttttcaaagctcttatttattctacagcgttcctctaagacaggcagggcatgtataattttycctgttttacaatgcagcagctnaagcttagtgagatta

SEQ ID NO: 1635 - DNA, 529 bp, Homo sapiens
  SITE (226): n equals a,t,g, or c
  SITE (369): n equals a,t,g, or c
  SITE (399): n equals a,t,g, or c
  SITE (431): n equals a,t,g, or c
  SITE (452): n equals a,t,g, or c
gagactgtatgttttttctgaggcctaatatgatattgtcaaagcatattatgtaattgaatatctttttcacttctgttcagacattcccttgacaacctgaaaaaaaggggaaaaaagttatttttaacacaaacaaatacatagtcatytgggagaaaggagctgctgctttattgtgtttttttctctgtttccttgatggccagttgcatyaggagtgcancctggagtggctttggagtgcatccttccagccacccagaacgctctccctttagtacacttgccaggtcatscrgtgacaaggaggtcacccacgsatacagtgtcacattccgcatatgrcagccataatccttagactgngcttcactttggtgaccccagctttgcctncatgcagattcaatcatggatccaggccctgncctctagagtatagaaagagnatattggatttctttcagaaaaaataaaataatacacacacaccccaaccccatatatggtaaaaccatttcgaatt

SEQ ID NO: 1636 - DNA, 344 bp, Homo sapiens
  SITE (304): n equals a,t,g, or c
  SITE (313): n equals a,t,g, or c
  SITE (328): n equals a,t,g, or c
gagaagatagggcctagtaaatttacctgaaaaatatttaagtattctaatataaaaactgaatctcactgagggattcaggtggcttaaaactcacctgaaccctgaacctctattttctcatttactgaagtttattggggtttttggtttttttgtttttttttgaaatgaagtctctgtcacccaggctggagtgcagtggcataatctcggctcactgcaacctccacttcccggctcaagtgattctcctgcatcagcctctcaagtagctggggtttacagatgcacaccaccatgnccgactaanctttggattttaagnagggtttggggtttca

SEQ ID NO: 1637 - DNA, 572 bp, Homo sapiens
  SITE (203): n equals a,t,g, or c
  SITE (214): n equals a,t,g, or c
  SITE (217): n equals a,t,g, or c
  SITE (539): n equals a,t,g, or c
  SITE (564): n equals a,t,g, or c
ggtgaactgacatttgatgtgaggtaacaataaacaaataggaagaaatgtctaccttcacctcggattcaaagagggctgatacataactgacctttccaragctcctactctttgttccaataatctctagaagtgggaacttttggaaatttatcctaggaaaataattaaaatgtagaaaaacgtttatgcatgatagnatttggttttngancatatgggatagcaatgaagcagaatcaacctattacaggagcatcattaggaatgcgcctcataaattctcaatgccattgttattctaattattctcatacaatgctgacgtaaaaatgatacttttgaagatgataataccctcaatgcccagcattgtacgttatatgaagaaggcagaatacccattcaaatgaatacaaagtatgaaattatatatcattttatataactatttatagacaaccagttaaaagaacatatgggccgggcacagtggctcacatctgtaattccagcactttgggaggacgaggcangtggatcacttgaggtcaggagttngagaccag

SEQ ID NO: 1638 - DNA, 488 bp, Homo sapiens
  SITE (465): n equals a,t,g, or c
tgaaatgtgattgttgcagtgttcagtttccttgggggcctgctcccttcacaccttgagcccaagtccttttccgttggctgattcagctcccagaagagacgaggaagtgtgtggcaagggactggaaaacttcacttgcttggattaggcaaggctccactcattgttgatatttgcccagcaggaaaatcatgtaagttataccaccagaaagcaaaaggagcatggtttggtggttaaggtttagtgggatgaaggacctgtcttggtgggccgggccctcttgtgccccgtaggctaggtcttagggcaactccttgccctcctgctcagcacctccatttccccatccttggtgagataacaaagctatcgcgaaaagcaccttgggagatttggatgatttgagaagagtgacttaaaaaaaatgcttctgtgctctaagatatatatgtgtgtgtngtgtgctacatatatatttttta

SEQ ID NO: 1639 - DNA, 364 bp, Homo sapiens
  SITE (324): n equals a,t,g, or c
  SITE (341): n equals a,t,g, or c
  SITE (348): n equals a,t,g, or c
gaataaagccattgagtattttttctttatttgtgggcaataaatcaatccatctaagtataactgggtttatttaaattagtggctaatgcagtgacattgtatgcatttcactactctgtaacaggcagcacctaaatggggaatacaataagatacttgwcagaaatagaaattttaaatttttaaaaatttcttaatgttttattttaaatacccactttttgataccaacataaacatggtttaaatgccaagaacgaatacctttatattggtcttggatgctctggggttgtagaaatgaagaacatttgagttatntaaacccccaaagttancccaagnttcagaaaaatcttga

SEQ ID NO: 1640 - DNA, 330 bp, Homo sapiens
  SITE (327): n equals a,t,g, or c
  SITE (330): n equals a,t,g, or c
gctctcaattctgtgtttataaaagtgttaaaaatgctaggttgatacggaaatacaaaaatcactagcctggtgctttgaagtcctgtcatgtatctgttttcctatattgtcatcccccaaaatctaagagaaaaggaaaatgtastaaaacattaattgaggaatctatgtagtatgtatataagtatttactgtataatttgtttgattttaatgtatatatatttgaatttttcagaaaagaatgttgggggaaaagtctatgaaaaaatcttatctttgwtccttctatgaagtggttgatttttgagtgaacaattctgntgn

SEQ ID NO: 1641 - DNA, 176 bp, Homo sapiens
  SITE (126): n equals a,t,g, or c
cctgcctcatatctgccattttccccaacctgtctccattcctgttttwagcaataggaagactcacagagatacagyagcctagacttcaaccagcttgtgaatctccaatcaattatttgtggntacattgaggcactgtgctgacaggctcagctttaatgtcaatgatctat

SEQ ID NO: 1642 - DNA, 439 bp, Homo sapiens
  SITE (401): n equals a,t,g, or c
  SITE (432): n equals a,t,g, or c
  SITE (437): n equals a,t,g, or c
gtatcatttgagatggagtctcgctctgtcgcccaggctggagtgcagtggtgcagtctcggctcactgcaacctctgcctcctgggttcaagcagttcttctgcctcagcctcctgagtagctgggattagagacacacaccatcatgcccagctaatttttgtatttttagtagagacaggctttcctcacgttggtcaggctggtctcgaactcctaaccttaggtgatcggcctgctttggcctcccaaagtgctggggattataggcgtgagccaccaagcccggcctcaacactatttttaagaagtccatctttacttctctgatttgagaggctgctttgtcatacactgaatttctttatgtacttggatctagtctgattttccttttagnatcaatgatgtttctggttatttacattttntggtngg

SEQ ID NO: 1643 - DNA, 786 bp, Homo sapiens
ggccatgcctactccgccccacacactcctcagaggcccctctcctaatagaagcccaactccacactccccacctgcgggctgtctagttctacatttgcgaggttcacatcttaaacgttcagatggaatgttccttgagagaagcagctatgaagaccacctctaatttctttctgaccttttagtaaggaaaggttggacgtactgcttgctgtgcatttccctagcaatgtcccttatctggtattaatctgtcagtgacttggggcccgactcactaagacactacccatcttttaatgcagtcttgctggaggctgaaaatggtgcaaactccactatctggaaatggaactctgggctaatacctcagctcggcaatgtttttccttcttaccccagctggaggtgaagacagtaactcttactaagctattttctcctggaaacacagacgctccctgagagagaatgagagaatgaccagtgatgccatctcccgttggcagcgccatgctgtggtgcggcccagatgggcctccatgggactgctgctacccgtgggatcacggcccctccgtggatttgggggatctgagaacacgttttctcaggtgtttatctggcaacctacaaaatcccccagcccttctccagtagaagcccagaagggtgattatggtttaaaaagccaagtcataaatcgggctttctctactcaacttgctttgtagctgaggaaatccgcagagagcaatttaaaaggaaaagaaaaaggctgag

SEQ ID NO: 1644 - DNA, 537 bp, Homo sapiens
  SITE (417): n equals a,t,g, or c
  SITE (488): n equals a,t,g, or c
  SITE (525): n equals a,t,g, or c
  SITE (530): n equals a,t,g, or c
  SITE (535): n equals a,t,g, or c
gtgataatttaccacgtgttaggcctacacttgctactgggaatagaatattattaaaagaccatagtttctatcttcaaggagctcagtctagtgtatgggcaaatatgcaaactaaaattacatcttagttaattggtattaaattggcattaaaacatttttatttgagcaaaagctagtgtgtattaaaagacaaagaaaagtgattaaaaggtgctaacgttataaggattataagtggctcagtattattgagtgtaggtacatggaggaaagaccaaaatgagctagacagacaggcaggggccagatcataaagggctacatatgcagtactgattagaagccttgaaatattttgagcataggtgtgggaaaatgattatagaattttgaaactaaaaataatactgntttacagaaatgaggaggttggcttttgaggacatgatctgctataggcagactgtgccccttacagcagntaaaaagacatcactggaaaattctttgatactcttntaatnggcanaa

SEQ ID NO: 1645 - DNA, 471 bp, Homo sapiens
  SITE (437): n equals a,t,g, or c
  SITE (439): n equals a,t,g, or c
  SITE (450): n equals a,t,g, or c
  SITE (462): n equals a,t,g, or c
ggaaagaacaatttagactatgaatggtggatctacttgaaattcacaaactactttgctgtatcaaggttttagttttcaggcaggtcacattatattccacacatgcatcttaatatatggtgtgtttttgtcattataatgtggatgacattattctgactaaattagcactataatggggacctatgatatatatgatgaaattgtaaattcttttcataggttttgaaagggtaatatttgggttaatttataccgattgtgtggtcaggatcagattaagacctctgagaaccgtaaatgttaaaggcattatggyacctcctttcctaccccagtatgtgttttactttgcatcttttcttgtcaattaaatagaaaacctctgcaagtgcggggagaaagccagctctacagctgcgacatcaagcctncntaatcttcttnctttattcctgncttcaatga

SEQ ID NO: 1646 - DNA, 578 bp, Homo sapiens
  SITE (479): n equals a,t,g, or c
ggctcctttggccttctagggactgacttcaaagaaggaaggaaagaatcaggcaggtaaagctttccgtgtcttgttcttactgccaggccatctatctcggtccccacgggcagcaccagggagtgaggctggcaacagagcaggggaagggccctgtctggacctgaagccatgggggcacaatggagagttttctttctgtgagaaacgctgtttactgatctggacactgggtgcttgtctcaacaatatgcctttgarttccacttcacttacccaactgtgagagggagctgttgcttttctctggagtcagacctttgacctgcctttctaggagtttgtactgaaagctgacttgttgarggcgtyagctcataaatagctccggagattgtaaaggtggttgataagaggatatgatggttggctctgagacaccattgaagggaccctgctaggagggcgatggtggnaagaaggtgtgtcaccttgattgccagtggcctggcttgtgcctgagtcagtgctttccactgtgtgagggctctggtattggacattctatatcccct

SEQ ID NO: 1647 - DNA, 843 bp, Homo sapiens
  SITE (343): n equals a,t,g, or c
ggggctccaggaatggtgtgggttctcaggccctgcttcaagcgtgggagcaaagcatgggagcccagattcagagcaaccccaaagcacatttagcggagaggacgctgggatcccagccagcctggctgtcctcagcggacgtccccagggatgatgctgttaagggcacaggtggatacaggtgtgaatctcagctctgccactttatgtgtacccactagaagaccttgggcaagtgtctcagtttctctctcagagccttcatctgctcatcctcaaaattgggccaatgctacctcctatccagctagtgtatgcaaggtcctgacacagggcccangacacagtaagtctttagtgcaggcagctactgctacttttaaaagtggtaaacagtaccatttcgttcaagtttagccagtatgacctaaagtgtcacaaaagcatcaccgtaagaataatgtaagaatgctatcattttataaatcccattgttctgcctatatgcccgtggacgtgttcagtgattatttacaaatgtttgacctgccctgctccctactgagattcttgaggaagtcckggctcatttttatggccacatctctactgctttccctcagctcactgcctttcacgkatttgtgggtttgcctgggtgccatggatctccaagggttctgtgaatagagttcaggggttgatgaattgggacagggggaaaaaaatgcattttcaagtgactctgatatttagcatttccttcaattatggatgtaggccagaaacttcaagtagtatttgtagtgcctgcactttgtcaccagtagaaatcacaga

SEQ ID NO: 1648 - DNA, 371 bp, Homo sapiens
  SITE (335): n equals a,t,g, or c
  SITE (353): n equals a,t,g, or c
cagatgaacaaaaacagggctctgatgagaacatgtcagaatgtgaaaccagcagtgtgtgtagcagcagtgacactgggctctttaccaatgatgaagggcgacaaggtgatgacgaacagagtgattggttctatgaaggagaatgtgtcccaggattcactgtccctaatcttctgcccaagtgggctcctgatcattgytctgaagtagawagaatggattctggattggataaattttcagattccacattccttttaccttctcggccagctcaaagagggtaccatactcgcttgaatcgtctacctggagctgcagctcgatgcctncagaaaggggcgaagaangctggttgggaagtgata

SEQ ID NO: 1649 - DNA, 422 bp, Homo sapiens
  SITE (380): n equals a,t,g, or c
  SITE (402): n equals a,t,g, or c
  SITE (415): n equals a,t,g, or c
gctcgtgccgagaaaaccaaggcacagtgagaggaaggccttccccaggctcacctgcagagtcaacgacagatccaaggtccaggcccctctgaccagcaacttcttactgacacccactttgtgccccatcctgttaaatgagcattctcagccccattttactgatgggcaaactgaggcttargcaggtggcacaaactgcccaaggtcacacaagytaaaaaagggatggagccaggatttataccccgaagggaagacaaggaggggatttgaagaatatactcctcctccttctctttgtgagccaaaacaaaaagcttgctggggtctgtatttgtgttgaggaccaaggggagggaagaggccttatttanaagctttggtgggcttccaatnaacccctgttccntgctgtt

SEQ ID NO: 1650 - DNA, 384 bp, Homo sapiens
  SITE (356): n equals a,t,g, or c
  SITE (361): n equals a,t,g, or c
  SITE (381): n equals a,t,g, or c
gaagaagagaagccgcggcccctgcaggacgggggcctgtgtcgctatgggttcccccgccgccccggagggagcgctgggctacgtccgcgagttcactcgccactcctccgacgtgctgggcaacctcaacgagctgcgcctgcgcgggatcctcactgacgtcacgctgctggttggcgggcaacccctcagagcacacaaggcagttctcatcgcctgcagtggcttcttctattcaattttccggggccgtgcgggagtcggggtggacgtgctctctctgccgggggtcccgaagcgagaggcttcgcccctctattggacttcatgtacacttcgcgcctgcgcctctnttcanccactgaccagcagtcctancgg

SEQ ID NO: 1651 - DNA, 356 bp, Homo sapiens
  SITE (317): n equals a,t,g, or c
  SITE (328): n equals a,t,g, or c
  SITE (345): n equals a,t,g, or c
gaaatttctatatcacagagcgatgtaaacttacttctatttatttgtatacttccttcctatgataattagatatcaattaaaatcattagtagttttacaataatatattgctttataacttcaattggrgcatttcactaaaagcctggccttgtttcctatgcagtggacatgtcactgtggctgtgcctagagctgatagcagagaaattgtgcttcagcaggactgtctgtgaagcaagtctgaattctcagtggacttgtcacgttagaagtagatatgcactccacatggaaaaacatcacccctctgnttttaataaantaaaactaaattctatntttaagagttt

SEQ ID NO: 1652 - DNA, 402 bp, Homo sapiens
  SITE (371): n equals a,t,g, or c
  SITE (382): n equals a,t,g, or c
  SITE (390): n equals a,t,g, or c
ggcccggggatccatcatagcttctgtaataacgctaagtgctgcagtttgttgaggtctttcccagctcctcttccttctcgtaacagcccaggaaatcggtccctctagttatttacgttttacagtgggttaaactgagtcatagcctgtgctctggccctcagccacccttggatttctaagatggggaaactgaggcccaaagaaggccgcggctccccaaggcaaagctgaggccgcaacccggaacctggagggaatttacaagatgttctatgcagtggttccctgctggcagcccccgcctgcatggtgtcacaggaatccatattctttaaattttcaatttyttttttttgagacggagntttgctcttgntgcccagngctggagtgcaa

SEQ ID NO: 1653 - DNA, 418 bp, Homo sapiens
  SITE (404): n equals a,t,g, or c
  SITE (414): n equals a,t,g, or c
ggccgtctgccctcccgggcctgaaagggacacggtgtccgagtctttaggtctgcgcgggaccgaggctgcgcacctgggctgaacctccacagtcctctacactcttccaggagcagcagaaaatgaacatgtctcaggcatcagtgtcattccaggacgtgactgtggaattcacccgggaggagtggcagcacctgggccctgtcgagaggacgctgtacagagatgtgatgctggagaactacagccacctcatctcagtgggatattgcattactaaacccaaggtgatctccaagttggagaaaggagaagagccatggtctttagaagatgattcctgaaccagaggtaccccggatattttaaagttgatcacatcaaggggttccggggaaaancagggaaaancttt

SEQ ID NO: 1654 - DNA, 159 bp, Homo sapiens
  SITE (154): n equals a,t,g, or c
ggcttatataaaatatttagacatgcataagtattttaagtggcctgaaggaagtacatgtatgctacttttgcaaatattttcgctttttttttttttttttgagactgagtctcactctgtctcccaggcaggagaattgcttgaacctganaggca

SEQ ID NO: 1655 - DNA, 389 bp, Homo sapiens
  SITE (344): n equals a,t,g, or c
  SITE (362): n equals a,t,g, or c
ggcctctcccacttcccccaattcctcaatagccattgctttggtccaccaggccacacaccttagttggagtaaggtcttgtcttatcccaaagaaaacaccaaagaaaaagagtgttttccttggggtaacattatctgtgtttcaccaagtccgggaccctactgcattctcttctttttcacataatttttatattatttcctcagttatgtgtaaatagaagtctatgttttctctttttcttagttttgctctataagtaacttatgggtggttttattaagatctcctgatgaatctgtatggtttgggaaagttacgtgaaaagattattattacngtatatatacattatttncttagggaaatgggagtctcaaacacg

SEQ ID NO: 1656 - DNA, 522 bp, Homo sapiens
  SITE (500): n equals a,t,g, or c
  SITE (512): n equals a,t,g, or c
  SITE (513): n equals a,t,g, or c
aaggataaagaatactggtgaagggaattatgatatattgatgtcttataaaaggagggaaagcctgtctgataaggtgatatttgagcaaagaactgaaggaattgagaaagtgagccatttatacatccagggaagagcatkccaagcttcaagtgcagtgacaaattcaaaggaacttgtcatgtttaaggaatagtaaggaaattagtaaggttacactagagtgaaggaaggggcatatgataagaaaagagctcacagagatagttatggagaacagaggccttaagaccatgtgggcagtagtgaggatttggcattttattcccagtgagagaggaagccattttcatgagagatttgacaggatctcacttaaaatttaaaagtaatcaggccaggcacgatggctcatgcccggtaatcccagcaccttgggaggccaaggtgggaggactgcttgaaccctggagttcaagactagcctgggcacatanggagagctgtgnntctgcccaa

SEQ ID NO: 1657 - DNA, 487 bp, Homo sapiens
acaatggtgacccacctgttccagaagtgctgcctggtgcagaggatcctggaggcctgggaagccaacgaccacacgcaggcagcgggtgcagtgagacgtgggaacatgggccacctcacacggatcgccaacgcggtggtgcagaacctggagcggggccctgtgcagacgcacatcagygaggtcatccgagggctccctgcggactgccgtggccgctgggagagcttcgtggaggagacgctgacggagacgaaccgcaggaacactgtggacctggccttctctgactaccagatccagcagatgacagccaacttcgtggatcagtttggcttcaatgatgaggagtttgccgaccaggacgacaacatcaatgccccgtttgacaggatcgcagagatcaacttcaacatcgacgctgacgaggacagtcccagcgcattctgttttgaggcctgctgcagtgaccgcatcaagcctt

SEQ ID NO: 1658 - DNA, 362 bp, Homo sapiens
  SITE (339): n equals a,t,g, or c
  SITE (348): n equals a,t,g, or c
  SITE (349): n equals a,t,g, or c
ggttgactctgtattcagccttcctaagagaggacctgattggttttgcctagtgacaacttcatgtagtatgcccctttgggcagagctgccaggtcacatcatcagcttctggctattttgaaaatgtctaccttacctttgcatcagttgctgatttttaattctcttagctgtgctcagagtagtgaagtcatgtgctataaaagcatggcaacccatggttaagtaccatctgcagcaccttttccaaaggtcctgtgtatgtagtaggaactgttattatctacattttacaggagagaaaaggctgaggttgagtgatttgccccaacaagntgggtccannctaatatgctcaa

SEQ ID NO: 1659 - DNA, 1165 bp, Homo sapiens
  SITE (837): n equals a,t,g, or c
ttcgttttctttatgcaggagagtttaagagaaatcagcacagatatttcaaaaaagtccatgtctttttatctttaaaatatctatttatcaaaggccagacacagaggctcacgcctgtaatcccagcactttgggaggcgggcagatcacaaggtcaggagtttgagaccggcctggccaacatggtgaaaccccgkctctactaaaaatacaaaaatttgctgggcatggtggmgcgtgcctgtaatcccagctactaggggggctgaggcaggaggatcgcttgaacctgagaggcagaggttgcagtgagccaagatcatgccactttactccagtctgagcaacagaacgagacttagtcaaaataaataaataaataaataaataaataaaatatctttttatctttaaagtgtttaacattggtatactgtctgtagttggttcattagtcgtttataaagggttattttctcatgagtggaaacctgaacaatcagttacctttgtgcctatgccttctctctcctcagacagctgggatgkttatggtgaaatggcctgtacaagkttaactaagacaacttaacttggattggtaatcaaaaattcttttctcaaagggttaactggttgccattttgaatagtatgktcaagggtgtagcttcctggttctttccaaattataagtagctacctaaatatagtataattatatattaataatatggcttgctggcacagtagtttaccctgttatctgtgtttcataatgggggctgtatgaatattatttaaaactaataaaatgttgccagaattatactanactgttggatgagattaggagatcagaggctggaccttctcttgataatgcttgttttgttaaaggtataatgaaataatttgtatatgatttgatgaagattaaagacccttattttccacagctttaaaaaaaaacctttatttatgatcaagtaataaagataatattctacttgtgggatcttacattayggaaatagtttgacgtttttgacctcaagagtatgtataatttgaagagatactttgtaactatgcttgggtgatattgagcagttcctaaagaataattcatttaaaaaaaaaaaaaaaaaaagggcggccgc

SEQ ID NO: 1660 - DNA, 632 bp, Homo sapiens
  SITE (448): n equals a,t,g, or c
  SITE (465): n equals a,t,g, or c
  SITE (477): n equals a,t,g, or c
  SITE (575): n equals a,t,g, or c
  SITE (599): n equals a,t,g, or c
  SITE (622): n equals a,t,g, or c
  SITE (631): n equals a,t,g, or c
gatgagtyacagtcacawacatataattacaagccagtgtaagtatatgaaaatagggttttgtgatcttgtcaacaagagaacctgacctatttggggacagtttgagttgagatctgaaagacaagtgggagttaaatagacaaaacctgggggttgtgtgtagaggaaggtattctaggcagaagggaatagaaaggctgtgagaggggaaagtttagtgctttagaaacattaaaaaggccaacatgaccaggatgtacaaagcaaatgcatgtatagagttggagaggtagccagactatgcaggtttttgtgaattataccaatgatgttggtctttatactaagatcaatagaasccgttaaaggggtttgagcagcagaatgatgtggtcagagttttataagatcacactttctgtaatggagaactgacagttggaangcaaatgtggatatgangtggaatggacnaatgaagaattaactcattatctcttatcctagttggctgacaccacaagacttccagctcatctcttatcctcctcaatctaaatactcttaaactncttggatccttctccacctcttcnttactctggcactcttctacagnatccacagng

SEQ ID NO: 1661 - DNA, 63 bp, Homo sapiens
aagttgggtcattaagtcgttataaaggggtattttctcatgaatggaaacctgracaatcag

SEQ ID NO: 1662 - DNA, 917 bp, Homo sapiens
tggtacgcccgcaggtaccggtccggaattcccgggtcgacccacgcgttcggcgaggtcgggttccgggcgcttggagaagatggtgctgcggcggctgctggccgccctgctgcacagcccgcagctggtggaacgtctgtcagagtcgcggcctatccgacgtgcggcgcagctcacggccttcgcactgctgcaggcccagctgcggggccaggacgcggcccgccgcctgcaggacctcgcggctgggcccgtgggctccctgtgccgccgcgctgagcgatttagagacgccttcacccaggagctacgccgcggcctccgaggccgctcggggccaccaccaggtagccagaggggccctggcgcaaacatttaatcctgggctgtgcggggccgaggccgcttgcttttccttccgggctctacagtggcatcaatgtggaggggtcattccgggcactgcgcgcggcttcgaatcccgactgggattgttggcctgcagacatcccacgcataagagcctaggccagaccgcccgctccgttgaagtcttgtgattggacaagacacagtgtggagaaagacccctaagcctaacagagatgaaggtaggctgggtccagacacggcacctacggagagccacggaccgaagccagagagcctttcctctgcaagtgggactgaaactcttgacagatgctgctcaatctgactggtatagcaggacagttaattccagggacgatatggatgaaaagacaaccctacagctgccaaattcctttgattaaatgtgtgagctggttgataggcatgagtgtgatacttctcaggcaagatgtgttaagaataccggggactgtaggcctatggtaataataaacacgtattttatgaaatgaaaaaaa

SEQ ID NO: 1663 - DNA, 273 bp, Homo sapiens
  SITE (234): n equals a,t,g, or c
ctagtgcagctcggtgatcaggaggtcaaagagaaccaagcagtttgttgtgattgtttttttaaaaactcttgacaaaactgatctaattcttcactcctgytcaaggctggctgtggtggatactggatttggccactggattttcctaatttgcccccttactctcctctattttctctcttaactcctcaacctgaccagtttgggctttttctttctcttttaaccatnattatcttraaccaaaaaaaaaaagggsgccgtctaaga

SEQ ID NO: 1664 - DNA, 493 bp, Homo sapiens
cttggaacctttgggctcgatttatgtgcttgtcactacacagcaaaatttagtttacgattttcaataggggtttctctagtttcttcaacgattcttggttcagttacgcgaccctatccttatcttacaatgtcttctacatcaggttcatcaattaatatatcaattacacattaacgacggtgtgacgcaatatgagaaagtatacattaaggttattatatattattcgcttaaaaaggttcctgacatgggacaacttcacccaccattctagaagccccccctcctgtaggaccccctcgagttccccattatcttagttcagttttcattttttaaccaggagggtatcggttttataataggtactattttgtcaaacttttcaraagctttatcttcaaatatacttgcaccatctgtactaggagcactaactattcgagtctattacagctcaacagaacaataattgaaattaaacaac

SEQ ID NO: 1665 - DNA, 389 bp, Homo sapiens
  SITE (80): n equals a,t,g, or c
  SITE (215): n equals a,t,g, or c
  SITE (358): n equals a,t,g, or c
tggaaacctttgggctcgatttatgtgcttggttgggcggacggcatcgtcgtacttgggcgctcggaggtcgcggttgncccgcccctccggtcaaaactgggggagcgaggtgggttggtgtggtgtgatattgggtcttggaattatcgtatgatggggtcggatcgattcgaaaaaaacgctcggaccctcagagggtccgagacgtctanaacgtaccgatcggggggaaaagtgtaacatcaccgtccttaccgtcgtcggcgcatcaccccccataggtcggcggaccactacagacgtagtcgccacccactttattacgaaagaccctaattatctacattacgttcgnggcggcacagtattacagttccctcaacgga

SEQ ID NO: 1666 - DNA, 555 bp, Homo sapiens
gatggtagtgatgttcaccatgataatgctgctggtttattgtggaagatctcagcagaagtcactgtacgtcattttgttatctctctcctttttttaaaaaaaatgtctgtacccatccatccactaactgtatgtcatttattgaaagtgtattccatatgcataaattgagttcacatatgtaatcagatagaattcagaaacagggatttcagaaacctaggtcctaggttgtgcaattgctactattcaagtatccttttctggatctcaattcaaataacccaactctaaaggatacatttatgggacagttggaggagtttaagcagaatatttggtataaaattgctacaaaattattagcgtttcaggtatgatatagtattgtagttatatgtaaaatttttcttaacttttgggatagttactggaagatttctatatcaagtgatgtctgtgatttgcttcaaaataatcctttgtgggggtgagggagcaagttgaaatagggtaggctgagcatctcaaaactgaaaatcgaaaatctga

SEQ ID NO: 1667 - DNA, 1455 bp, Homo sapiens
  SITE (1127): n equals a,t,g, or c
ttttttttttttttttttttttatagtcaatgaaaakagtwtattmttttattgktttttgttyatacatgttaagtttcaactttcaataataaaattcaataaatttgattccttaatcataaaaactkgctttacacattakttacatrttgtcaaagtccatacaaaacatcacaaggatttgattgactctatgcatggtaccatcacacaaaggaggagggagctaatccagtaacawacattcaaagattaaattgyagatatgcacagtgtatttggcactgttsattaatattataacaccttcctctcaaagacaggcattcttaagcgttagtcacratataccagaatttgctattcayattaaaaccaccttttaaactttataacagtaaccrattattatagttttaagaaacaaaacrcaatgagaactgggaatggaattcaaatcctccaacttcttgctatgctccaagctgccatccataaaacaggtttaatttggtaatttttccattgtgggragtgtcaacaagaaacaatttaaagacartattttccaatacaaataaagacayayacttttgtttaaaatgamcagttcttcttgggagtgcaaagggagccttgatgaygtacarcttgtgatgattttggcagcaattacagaacaaccaaggccattcaagttgtggagattatactagcaggtgaactsgtaaagagaagattctggaatgcctatatctgaaatcagaatcctagtagtttgtagtttgcctcttcctagaagttcaagagactcaagtcataggctacagatgtactttcaagtatataattatgaatggaaggagaaaataaaagcacaaaaatgcaaatattaaacctttagtgacttggactatattccagtaggkaatttattccactaacttcactttaacaaagattaaatccctttattttaatcaggtccattaaatttcattcattaaagttatacatactccagaatgtttataagacatttacaccgatcatgtttacaaaaagcataaattcagtcttaagctgcactacaaatgccttaatataacataatcacagtatanggaaacaaatcagaaattctctgattagatatgctgtagcttcacagaaaactctcagtaataaattaaaacaaaaagacttacaatgtataatgggctatgcagtgcaaaatgatgtcaccggaccaaaatttagttcaatcatttttatttcaagtgtgttttaaaaatcataaacggggtttcataatccaaagctgaaacatttattcttcatagcttcagaattgacaagcaattgtagaccatgctttccaaatccagtcttctttgctatttttcaaatttctgagatctagtattaaactgctccattctaaatgtacag

SEQ ID NO: 1668 - DNA, 981 bp, Homo sapiens
  SITE (871): n equals a,t,g, or c
  SITE (948): n equals a,t,g, or c
gggagaccagcatggaaacatggtccgagtagtagccaaaaattatggtgtctctatccggttgaatcaggtcacagccgacacactgacacttacaatgaaacaagtcatagaagacaagaggtacaagtcggcagtggtggcagccagtgtcatcctgcactctcagcccctgagccccgcacagcggctggtgggctggatcgaccacatcctccagactgggggagcgacgcacctcaagccctatgccttccagcagccttggcatgagcagtacctcattgatgtctttgtgtttctgctggggctcactctgggcactatgtggctttgtgggaagctgctgggtgtggtggccaggtggctgcgtggggccaggaaggtgaagaagacatgaggctaggtgtagccttgggtgaaggggagggcatcctggcctttgaaggttctycccaccccagcacacgccacscctctgktctctcttcagctccacctgccactgatcytgcaacttgcttctttctattctctgcctctgtttagaaatmttcacrcaccactgaggcttcttgacttgccccttgtgacttgaaaccccagctcagatacaaattttcacctgccagccctgcctcctcctttctcccttttcctagacacaggactctgacaacttcatcctccttgtttagatgacttcccagtttccagtccccatttctccttstrtcacttttcataaaaaaactcaggaaatatttgacatatcttccatttcaaattcttccmttttatgcagatawsttgcccttcckataagstctcctsaaagytcaggaaacctggtctgctctcctgcatttanggaaggagaacccctgccaagacctttgctcactgcctgagaccccttccttagagagcacctcctttgctggacanacatggagcctgcagtaggtcacagatgatact

SEQ ID NO: 1669 - DNA, 242 bp, Homo sapiens
  SITE (9): n equals a,t,g, or c
ggaaagatnttaaatcagtaaggaaacttgacagacaccaccttaatcaagtgatcaaggyyaacattatcagyaataagacatctcaacactatgtaactccctgatatgacgcactgagaaggttataccatcacttctgtggtattcttgccagaaatgcataacttcaatctaatcataactaaaccagggattaactcaaattgagagacattctacaaaacaactgacctgtactc

SEQ ID NO: 1670 - DNA, 673 bp, Homo sapiens
  SITE (518): n equals a,t,g, or c
  SITE (561): n equals a,t,g, or c
  SITE (625): n equals a,t,g, or c
  SITE (627): n equals a,t,g, or c
  SITE (646): n equals a,t,g, or c
  SITE (659): n equals a,t,g, or c
ggacggtacaagagagaatgaaaaatgggggcaaaaaaaccagaaaattttctctactatctctgacccataaggaccctcttttccactctgtggaccaaattagaggactcctcttggagtactttctttctgcacccattgtgcggttccagatttcagactgcctttgagtccaggacaggagatactggaggagggataacagaaagcttgccaccagttcggcagtacttcaagttctggtttccttccctagtctgtcatgaccatacactttccagagtccttagataactgctctgtgcattctttccagagtttttagctgcattcagtgggagagagaggatgaagtacacttactttactgtgacactctgtttaatagctaatatctgctttttcttctcttaggcttccttttcctttctattattatttgagttagatttttaatctggcctatcatcaaagcttgtggaaccaaatggaatgattccataatttggtggggntggtactatggtaacactacactggcatattgctgccaacagngcttttaattttaaatgcattcataaggggtaatttgacataagtttctctaagggaaaccagnanaccaccaatggaaaattangaaccttaccttnttaaactggcaaaa

SEQ ID NO: 1671 - DNA, 1615 bp, Homo sapiens
  SITE (2): n equals a,t,g, or c
  SITE (14): n equals a,t,g, or c
  SITE (1580): n equals a,t,g, or c
  SITE (1581): n equals a,t,g, or c
  SITE (1582): n equals a,t,g, or c
  SITE (1583): n equals a,t,g, or c
  SITE (1584): n equals a,t,g, or c
gngcgacgcgttgncttcccaacgtcgccccggtttgacgcacacggcaccaaactgtttgatttaattttggatgagatcgttcttgcagcaagatgttaataagacaaaatctagccttagattgtaagcaaaagaaatcaaggtcaagatctggaagcaagaagaaaatgctaacattacctcatggtgctgacgaggtttacattctccgatgcaggttttgtggcctagtctttcgaggacccttgtctgttcaggaagactggattaagcacttacaacgacatattgtaaacgctaatcttccacggactggagctggcatggtggaagtcacgtcactacttaaaaagcctgcctccattacagaaacttcattttctctactaatggccgaagcagcttcatagaaccaggaaaccttttaaatagccagtttgaattggatgtaaatttgaaattctttttttttaagccacattaaattatctgtttataaatactaaagcaggaaaatggggggaaagtgaattacagtgacatcagagcaaattgaatacttaaaacagtaagtagtctatatattttatatagggtggaaratgtgtttttaaggyttatgaagttttgttggttaactgtgttcactcagtaaaagagcagtacatgtaagcagccattaataaactgttgcacatggatacttatagacagacttattggacaattatgttttttgcagtgttaccagaatcaaggctctgtttattccccacaagacttgcatagaaaaataagatattatattttgtttgtatgtatttagtgttttgtataataccaagaaccgctgactaaatttactcaaattagggcattaaatatcatgtacttcatagtttgagactgttcactcaaatagggcagagtactattctatctagatgtgtaagtgttttttttaaaatcacatggaacggttttttttatactaaaaagtggagggagatttgtttaaacaagtatttctaaaagaaatatgtacatagttctggaaattatttgtggtaaggaaatattctttactccagttgcatttctcagacaataaagtggtgcatccatgctacctcctactttgtcaacaaagatgctatttaccctttacatttttgtatcataatagattttaaaaatctaatgttctttattgcaagacattcttttgttaacaggtttgtttctttttaatgttttacctaaaatttgacatgcttacaggacaggtttgcctcttactttatttaacattgtagaaatgtaattaataaacaatgctcactacacagtttagaatagacgttctcatttatattatcttccaaatttgatcagttagcaaaacttaatacaccaattaaaatatttctacatatgagaatgkttacaatttaaattttagaacttggtttggatgtgattatatgtacsaaaatcgtgtaacactatgctcatgctaagaaccgacataacagaattactgaaataaatgtgctgtgaggaatggaaaaaaaaannnnnaaaaaaaaaaaggggggcccttttaaaggaa

SEQ ID NO: 1672 - DNA, 300 bp, Homo sapiens
ccactgaccctgcttgtcatttcgtcagccagaaaaggaaaaaaccaagcaatacaatttggggaaaacatggtgccaaatccagtgccatttgaggtaacaaactcctcacaacccaagttgtgatgtgggactaattagattatttgctctcaagtcttgggtagtttcttttttgctatgtctcgtgaatttttcctcttttctgtaattgacctattattaccctaaaccaaacttttttttttttttagatggactccagtctgggcgacacgtgcaatccgtctcaacaaaaaa

SEQ ID NO: 1673 - DNA, 622 bp, Homo sapiens
  SITE (5): n equals a,t,g, or c
  SITE (23): n equals a,t,g, or c
aacgngaaaacctgactctactnctagggaacgctgccacgcctgcaggtaccggtccggaattcccgggtcgacccacgcgtccgggcgcgacaagatggcggataaggagaagaagaaaaaggagagcatcttggacttgtccaagtacatcgacaagacgatccgggtaaagttccagggaggccgcgaagccagtggaatcctgaagggcttcgacccactcctcaaccttgtgctggacggcaccattgagtacatgcgagaccctgacgaccagtacaagctcacggaggacacccggcagctgggcctcgtggtgtgccggggcacgtccgtggtgctaatctgcccgcaggacggcatggaggccatccccaaccccttcatccagcagcaggacgcctagcctggccgggggcgcggggggtgcagggcaggcccgagcagctcggtttcccgcggacttggctgctgctcccaccgcagtaccgcctcctggaacggaagcattttcctttttgtataggttgaatttttgttttcttaataaaattgcaaacctcaaaaaaaaaaaaaaaaaaaaaaaaaaaaaaaaaaaaaaaaaaaaaaaaaaaaaaaa

SEQ ID NO: 1674 - DNA, 480 bp, Homo sapiens
cttcggtccatctaggttttcagtggcccctgctgagacctcacactgagccaactactgtcactgttttaaccaacaaaagctagcctggaactgctatggttaaagtgggtgagcgggaacctgaaaatccccttctggaaggttctacagaactctatttgcaagctcctgctttaacctgagcgtcctctgctcaggatcataccccagcctgcactgagtcaagaaggagaaggaggctctgaaggggccgggggtgtgagctggggttgggactcccctgagaaagagctgtgggtaggaagggagtgagcattgcagagatagggctgggggtcggggccacactgagtgtgggaagctctggagttgctgctgggccatcgaggggccctggtgttggctctgagaatgttctgggtgaccagtcacctactttctgatcaataaaaatgtcgacatgcatttcttacaaaa

SEQ ID NO: 1675 - DNA, 581 bp, Homo sapiens
  SITE (396): n equals a,t,g, or c
  SITE (538): n equals a,t,g, or c
  SITE (542): n equals a,t,g, or c
  SITE (562): n equals a,t,g, or c
agacaggcctcctactggggaggaagagtaggaatttgaggatgctgctttgtcaaatcttttttccttccctgggttctcggctcccccttttcgttaccctttccccaaagctatggtatctcccattccagaaccccaattcccctcgaagatccaagtcattaaaacacaaaaatggggaacttagcaattcggatccttttaagtataacaatcaactgggatcagctatgagaccctggggccggaggagcttcgcagcctgctaaccacgcaatgtggggtgatttctgaacacaccaagaagatgtgcacaaggtccctgcgctgcccacagcacacagatgagcagaggcgaaccgtacggatttattttctcgggccctcggctgnccttccagaggtcgagagctccctggataatgacagctttgacatgactgacagccaggccctgatcagccggcttcagtgggacggctcctctgacctctcaccctctgattcaggctcctccaagacgagtgaaaatcangganggggtctaggtaccaacagntctgagtcacggaaaacca

SEQ ID NO: 1676 - DNA, 2282 bp, Homo sapiens
cttagctccttgaaatataagaatggggaagttaggtacattagttatagaacgaggaagctagtgcattcagtgtcacatatgaactcaaggccttagttacttgattgtaatttcagtattagcaacagtgtatttccctcatgcttacatatacaagtaagcaggcagacaaagcaaaaacttctaaacatataaggaatgaagacaaacaatttaatctctatattatcatattatcagtcaattaatacagttggactttcaaactataactgttggtagtaaaataatctgatcacatttcatacagcaattaaaaataacagaaacagagtctcacctatacaatcagagcatctcctgatatgaacaacagttaagcccacatacattttaaagatgctacccagactacaatctatctcaaaagcaaccatggcataatgcattttataaaatgcctacctaaaaatacattgtattttgtaatgtttattaccaatgtgggaggcatttctagcctaaacactataaccaaactattcaacagtaagccggtagtagtcttacaataagaaatttcacatatacttgttattataaatagcattttatgttcattatttcagccatctctcaaactaagacaattttcaacagttaccagaagacactgagctagagtcaacagaccagatatctagttccagctctgcctctacctacctgtgagacacggggaaagttctcttaaccttcgtaaggcctcagatttctcaaccatagaacaaaggggctgaacaaaatgaattctaaagagcattcccataaaacgggatttggctaaattttcaagaacttaatttctttaaaaaaagatagctatgagataccaaacttggtatttaccaccaataatattgattatataagagctttaagccaaggaattactgattctgcacttatggggtgaaaatataagactatttttagcatgcttttccagttaccagaaaaggggagagggggatttttacaaagacagtaaagcatacagcaatggcagtaaagcatgcagcatagcatgctagtaatggataggcattacttgtgtttccttttaggaacttttgcacacaagcaagaggttttataaaagataccacagcgcccaataacacaatatatgtgtgatctgacaaattcaaaacacagttgaaatgaaaaggcaaccaaaatacttcagagtacttcattcttctataaaatgtgtacacagacctgggcctaaaatacttcactgcaccacatccagttctaaaatccaatttccttttcaggtagagcgcatcttttaaaaaaagagccaacacacctatgtttaagaataaaaattcacttgtactagattgtatgtagctaaacactggatctattttctgattccaaaattttctatcctagtatgaataaatgaagaataggacaaacctaagtgcaggaaagtatcaaaccctgtaacgcatacttatactgaaaatgtgtttcacatggttaacatttgcaaaggctaaaatcatttttcataaagaaaattccacaggcttgctcagtattaccaaacttccataatgaacattattttgagtgccaaattgagcacgaaaaaaacacctacttttaactattatgaaatattatgaaaagtagtaagacttatttattaggctggttaaaaagtaatttaaaaccaaagagagttaaatcttccttgagaacatactctcagaacttaagaatggggtaaatcagatggagcacagccatgctgtacacatcaactcactgaaatcacataacttctattctcatggaccttattttctattatcttgaaaacaaactgattataatctcccaaaataccagtggtaccttaaaatttaatcaactcctttccttaacagaattaggactttcaattaaaaatactgtaatatccaagagggtttcaatgcaagagaaacctttgcatcataatttcaagtgaccatatatagtggagttccctctaataacacgacagacacaaacaagctatcgagcaagaatctgttaacagttttatttttttttatgttaaataccatgggacaggattgtaaggatgaaaaactcagtcaacaactgcctcacaagggataagaaaaattctgccatgatattagcaaaggtaaaggaggaaaaatttacactgtaagaggcaccatttcccc

SEQ ID NO: 1677 - DNA, 398 bp, Homo sapiens
gggcggcgactgtggatctggagctggacgcgctggaggggaaggagttgatgcaggacggcgcgtccctgagcgacasaccgaggacgaggaggagggggcgagcctgggcgacggcagcggggcggaaggcggcactgcagcagcagcaggcggtcgggcggcgatggcggggacgaagtggagggcagcggtgtgggagctggcgaaggagagactgtccagcacttcccgctcgcgcgcccaagtctctaatgcagaagctccaatgctccttccagacctcctggctcaaggactttccctggctgcrctattccaaggatactggtcttatgtcttgcggctggtgccaaaagacccctgcagatgggggaagcgtggaccttcccccagtg

SEQ ID NO: 1678 - DNA, 445 bp, Homo sapiens
  SITE (399): n equals a,t,g, or c
  SITE (422): n equals a,t,g, or c
  SITE (433): n equals a,t,g, or c
ttttttttttttctagactgaaatgtatgaaatccattttgtaatctaaaatgaggtgcttcagtcaggacatttcgaaagaattattatgtttctcatgtgttcagagtcattttggtattcacttgagcaaagcaatagtcacccacaagtattcagcctatcttgtcttattgcttaaaagtaaaggcagacgctattcaacacctgggtaccaacagttgacatttacccacattaagtgctaaggctgtagatgaggatttcttcttgtcggcctttaaacatcctagtaagcccagggccaacgctggcacaggggaaggtgagggatgtgggtgagtaataaggagtgctttcttttttattttcttataaactaattttgtttctctaccngtgataactctgcagtccatttnaacccgcccgntttccactaatg

SEQ ID NO: 1679 - DNA, 1380 bp, Homo sapiens
  SITE (1051): n equals a,t,g, or c
  SITE (1208): n equals a,t,g, or c
  SITE (1370): n equals a,t,g, or c
ggcggcgggccggcgggcggaccgggccggtgctggagaagtttgcgctgcggttcgtgagcgcagggtgcgggccccgccggccgctgcgcgcccgctgccatggctttccgcaggaggacgaaaagttacccgctcttcagccaggagttcgtcatccacaaccatgcggacatcggcttctgcctggtgctctgcgtcctcatcgggcttatgttcraggtcacagccaagactgcctttctatttattttacctcagtataacattagcgtgcctacagcagacagtgagaccgtgcactaccactatggccctaaggacctggtcacaatcttgttctacatcttcatcaccatcatcttgcatgctgtggttcaggagtacattttagataaaatcagcaaacggcttcatctctccaaagtcaaacacagcaagttcaatgaatctggacagctggtcgtctttcatttcacctcggtgatttggtgcttctacgtggtggtgacggaaggatacttaacaaacccaagaagcctctgggaagactacccgcatgtgcacctccccttccaggtgaagtttttctacctatgccagctggcctactggctgcacgcacttcctgagctatacttccagaaggtacggaaggaggaaattccccgccagctccagtatatttgcctgtacctggtgcatatagctggagcatacctcttaaacctgagccgcctgggcctgatcttgctgctgctgcagtactcaactgagttcctcttccacacggstagactcttctactttgcagatgaaaacaacgagaaactgttcagtgcctgggctgctgkttttggggttacccgsctcttcatcctcacccttgccgtgctggccattggctttggactggctcgcatggaaaaccaggcatttgatcccgagaaagggaacttcaacactttgttttgcaggctctgcgtgctgctgctggtgtgtgccgcccaggcctggctcatgtggcgcttcatccactcccagctgcggnactggcgggaatactggaatgagcagagtgcaaagcggagagtcccagccacacccagactaccagccaggctcatcaagagggaatctggttaccatgaaaatggagtggtgaaggcagagaacggaacctccccacggactaagaaactcaagtntccctaaggccaaagtgctaagaaacaggaatcctcttggtgggggccgagcagggggcaaggwgcccaggccccctccctggcctcctccttcctgcctgtgaatgcttccgttttcaaacagccgaaacctgttttgcaatggggggagggggcgttttnggttttcctt

SEQ ID NO: 1680 - DNA, 706 bp, Homo sapiens
  SITE (493): n equals a,t,g, or c
  SITE (626): n equals a,t,g, or c
  SITE (674): n equals a,t,g, or c
  SITE (686): n equals a,t,g, or c
  SITE (688): n equals a,t,g, or c
  SITE (703): n equals a,t,g, or c
gatttatttaaatccactatataatgagctatataatttatttgatttaatccagaatgatcttctactacttcatttaaaatacttctttccacaatttgaaagctttaaatgactgtttcttaccctttgtgggaaatggaatctgagactcactgttgtttggaattgctgccaagcttcaggattttctctatgatattctcatcccttggggagacgctttgcccttcctttgatttatgtgtatgttatwtttagtkatttgataaacacttgctgcgtgtctgtttaagcaaacctttagaaacacatatattatctgctgtctcattagagcatgtatggtaaaagaaaaaatcatggacgaaaggaatcagactaaagtctagggtttgaaaataattttaagtctttgtttgcagtgaggtattttaggatgagaattatgggcttatttcaatgtgctcttccaaaccatgttatcatctgnctattgatgcttttgccctctgcacagagaagatagtttgccacatttgagttgcttattaaaaacagtgggaagttggaagcagtgcaaggtgaaagagtgaaaagctgtaatggactacttgaagggtaanccccttaatgaaagctgggttttaatggaaggactattacccttgcanacataaatgcancntgaaaaatgctaaanttc

SEQ ID NO: 1681 - DNA, 313 bp, Homo sapiens
  SITE (211): n equals a,t,g, or c
ctaacgtcataattaagtttctcttgtcttggcatcaagaatagtcaagttttttggccgggcatggtggctcatgcctgtgaatcccagcacttggggaggccaaggcaggcggatcacatgaggccagggaattcgagaccaacctggtcagcatgggcaaaaccccgtctctactaaaagtacaaaaattagccaggcgtgattgcangtgttctgttaatcccagctactctgggaggacttgaggtggggaggaatcgcttgaaaactggggagggcagaggtttgccagtttaaaccgaggttcatg

SEQ ID NO: 1682 - DNA, 277 bp, Homo sapiens
  SITE (269): n equals a,t,g, or c
aattcggcacgaggaaacaaacagacccttgaatactttcaatgttggttggggttatggctgccaggatgttttcccagcctctggsacccaatggctccagactgtgccgagaaagtttttgttgttgttattttgttttgtttttatttttatgaatggctttggtagaaaacgcagactgaagcataatactaccaccattcataaaaagggaaaggaaacaaactgctgtctggaaagctttttggacgccaaacaaactgggntaccaagg

SEQ ID NO: 1683 - DNA, 315 bp, Homo sapiens
  SITE (309): n equals a,t,g, or c
  SITE (311): n equals a,t,g, or c
  SITE (315): n equals a,t,g, or c
taagagcctttatttacagataataatgtacacaggttttaatacacttgaaaaaaatttttyccttttggtagcttgaatttcagattgactatcggggtaaaatcatcacaaaggtaacacctctggctgtcattctgtgacttctatgtacattggcagccatgaaaaacacatggatatgttggtttaaaattagrttttagcaactgactgtggctttgggcttcatggtattcgagttwagaaagaaaaaagaactcaactctkctatgaataccmgttggactataggttaagggcatatgntntttn

SEQ ID NO: 1684 - DNA, 356 bp, Homo sapiens
  SITE (293): n equals a,t,g, or c
  SITE (296): n equals a,t,g, or c
  SITE (345): n equals a,t,g, or c
aattcggcacagagtctcgaactcctgacctcaggtgatcctcctgcctctrcctcccaaaatgctgggattacagatgtaagccaccactcccggtctgctttgcaagtttttgaagtgactattatgtgccaggcattgttctgagtgctggggaatgaggcagtgaataaaacaaagtctttgctttcaatatgtttagttttagtggggtgagacaaatgggctgttgtatatttactttttaaaaaatactgtcatttttccagctggggcacggtagctttataccngtnaatcccaggactttgggaagggctgaggtaggtggggtcaccgaggttngggagttcggg

SEQ ID NO: 1685 - DNA, 345 bp, Homo sapiens
  SITE (45): n equals a,t,g, or c
  SITE (336): n equals a,t,g, or c
  SITE (338): n equals a,t,g, or c
aattcggcacgaggttgagatggagtcttgctctgtcacccaggntgtcgtgaagtggcacgatcttgactcactgtaacctccgcttccctgcctcagccccttgagtagctgggattacaggcacccgccatcatgcccggctcatttttgtatttttgtagagatggggtttcaccgtgttggccaggctggtcttgaactcctgacctcagatgatctgcccacctcagcctcccaaagtgctgggattacaggagtgagccactgcacccgaccccagtttcccgtttttamtaaagacaaattacggacaggaccaatttgctttattangntttgcca

SEQ ID NO: 1686 - DNA, 702 bp, Homo sapiens
  SITE (624): n equals a,t,g, or c
  SITE (628): n equals a,t,g, or c
aattcggcacgagctagattaacatcagacaaagtagatgtcagaacaatgaaaattaccagggataaaaaacgacattgcataatgatatagggataaagtcatccaaaaggcataataattattaatgtgtatgcacctaaatacagagcttcaaagtgtgtgaagcaaaaagtgatagaaccgaaaggagaagtttttgttttttttttaattctgcagttacttggagaatttagtgctccactttctacaatcaatagagcaagaggacagaaaacagcaagtatatggaagacttgaacaacactatcaactaaacacagctgtcatttatattatattctatcgaatgacagcagaatggacgttcttctcaagtgcacgtgaaacattccccaagataaaccttatcgtaggtcataaagcaaaccttaaaaatttttaaagagttgaaatcatacaaagtatattcttgggaccacaatagaattaaattagacatcaacaacagaaaggtatctggaatatccccaaatatttggaaattaaacagcatacttctgaaaaagtcatgtcaaagaagaaagaaaattagagaacatttgactggattaaccatgnaaantatatattcagttgcaaccaagttggcttacaggaaattatgcatcaatcttgattggaaagaagaaaggttct

SEQ ID NO: 1687 - DNA, 147 bp, Homo sapiens
  SITE (51): n equals a,t,g, or c
tccgcccgctttgtctctccccggctcgctgtctctttgtctctgcctcgngctcctccgcagcctccctcgtcccattcgggtcccttctcagagcgtcttcagcctcagagccgccttttggcgcccactcttggactcccctca

SEQ ID NO: 1688 - DNA, 716 bp, Homo sapiens
caaaaaaaggaaaattcagagagtaactgaagttttatcattaatgggactaaagtgctttagccagaaacagatttgtaaaaccattactgctaacaaagacatcattataagcacagctgtactgacactgaaattaaaatttgacccatcttggaattttggccccttggtcctgtttccctgggacakattgccttaaaccagttgtgccctttatacccacttttggcatccctaaacacttagtgcttgccaaaaacctatcaccatggctatggattgtagattttcccaattccattaatgcctatcactagttgggcatttctatagtattttctataacttattttcccagcctcagactcaacatgactttctccaagtagctccatcaatactttaagctcaaaaccaattagcacaggggcctatgaaacctgacaatttgctcatatggagaattaggaaatattgcactttaatgcataagacaccttgtaaaatacccataaaattttaactggctgcagtgttaatgaagcaaataccatggagttataatagcttttgaatgtgatttatgttacagctaatgaacagatgaaaagcactgtccttttttaagtaaacactacacactccagatggattgcaaaaatttattaaaattggagacactgttttaaaaaaaaaaaaaaaaaaaaaaaaaa

SEQ ID NO: 1689 - DNA, 617 bp, Homo sapiens
  SITE (154): n equals a,t,g, or c
  SITE (414): n equals a,t,g, or c
aagatggagtcttgctctgtcacctaggctggagtgcagtggtgtgatctcggctcactgcagtctccgcctcctgagttccagctattctcctgcctcagcctcccgagcagctgggactacaggcacctgccaccatgcccagctgattttngtattttaagtagagacagggctttgccatgttggccaggctggttttgaactcctggcctcaagtgatcctgcctcagtctcccaaagtgctgggattacaggtatgagtcaccacacctgaccaagtcattggattttactgattaacactggaaggttctaagcaggggtaatgacattacctgacctatacttttgaaaagttaattctggctgttgcatacttaataaattacagarggcctaaaaggaggcaanaaaagcaacaggaggcaactgcaattatccatgcaggaaattatggatatggagattgaaccaacaggatttgctgagggactcaatatgggaaggaatgaaatgaatcatggatggctctaaccttctggacataagcaatggagtaaatggtgataataattactgaggtggggaaggctagaggaggcccaggttgagag

SEQ ID NO: 1690 - DNA, 435 bp, Homo sapiens
gaattcatcacgcctatacatacgcaagggtgcatcaaggacctgtagcccgcgtacgtgtctttctgcagctccaccatcctgaggaagtggtggtcttcctgggccagtgtggttgagagcacagttcagttgacctgtgttcctcagctctaggctctgcaattctctcctgtgcggtccatcctgctttggtccattctatcagtgcaaggaggtctgatttcttttggctaagtcttggtttctttctacacacttgtccagagctcaagctttgaggtctgactcttcatcagttcgtatatatgaaagattcacaaattccagtttgtcttagtggaccaaaccacagggcagatcatcttgtgcttctaactggaagccctgtatctgcagcatctcacaccctcgtctccctggggggaaggagga

SEQ ID NO: 1691 - DNA, 487 bp, Homo sapiens
  SITE (1): n equals a,t,g, or c
  SITE (49): n equals a,t,g, or c
  SITE (66): n equals a,t,g, or c
nggttttcctgggcccttgtgaaaagccagaaagggracgccwattttngtggckgacccagtacntgtttawcccatwaatattttctgccccctaaacttttgtataaycctttatgaaagttaatttcatcagtatatagttaatattaatagtgccaaagtgctaccagtggcaaactaggtagatcgttatttattttcaacaagatgccaagcatgtcagagtttgaagttgagcttcagcttaagtacaaacggaggtaattttaaggttgccagtgatagatccagttccattaggtttagttctctagggctaatgattgtttctgatttatttctatatccctagcacctaaaacagtgtcacacaatagtcactaaatgtttattgaataaaagagtcgacaaacataattaaaagctatttttcttcctatatatagcatgaagattgtaattgcttctctagaaaatgtatgaa

SEQ ID NO: 1692 - DNA, 436 bp, Homo sapiens
accacgtccagcctggagccattatttactgtcacagtagaagtcggaggaatattattagcaactggtgtgtagaggccagggttgttgctaactattccatgatgcataggacagcccccaacaacaaagaattaccagccccaaatgtcagtagtgctgaggataagacacacattttcaaggtaccttaccataggactcamagtggcagaaggacatgaagaacttttttcaaaactctcattttgcttccttaccctcacctgccacaactgattcccacagttttctccattccacactataatctacttctttggccaagacgacccaattacagagtgggagaaggcttctccccattttgggtagtggtttawtgcycygcaacgggggkccycawcactggagtcaggagggacaagccagaaac

SEQ ID NO: 1693 - DNA, 481 bp, Homo sapiens
ttttttttgtctggcaaacatttattgactgctttctctgcatagaacaaccggccagcccctggactccagaggcccaccatcattgttaagagacctacatgcatgaaccaatcacacacgtgctatgagaatagagaaaagaaataagtaattctcacagacactgacaaactggaaaaaacttctttcatcccaggtactttatggctgggatcaaaggggtgactcacttgtttgcacaggaaacaaaaggcaaaaggaagtgttggcatcagttttccatctgcacatataacccccattcctccatgaattgcatgagataggtttcattttctcctggtggcctgtctggagccggctcctcatagagtctagatagaagaccctcggccgctgctgtgcccagggctccccagggcccgggctggctgggaagactgggaagacttccaggaaccaggcaggccctgcctcg

SEQ ID NO: 1694 - DNA, 425 bp, Homo sapiens
agtcaactccctgggccctcctgagagcactgtagctgtgtgktcaycctatatgcaaagrgaaatwaaaagaatcaactatatttgtcacagggtactttcctatataccagcgtacacctctatcaatacattttatgctgagactttcggtaaggaaagactgaccatacacactgcctcatgcacagatatagacacatattgaagatactttctttcccctgcaatgcagaaaattgcatgagcacacacaaccacactaaaccaaccagaatgaaactagaggcagctgtatctgattgaaactggtgagaattgagattgacagagttacagggctaggaggttaatgagtccatactcctgcctccagtcagaactgtcctaagccattccaagtaaatgacagmwcagcctcttgg

SEQ ID NO: 1695 - DNA, 322 bp, Homo sapiens
  SITE (4): n equals a,t,g, or c
  SITE (245): n equals a,t,g, or c
  SITE (312): n equals a,t,g, or c
tttnagacaaggtcttgctctgtcgcccaggctggagtgcatggtgtgatctcggctcactgcaacctccgcctcctggcccaagccatcctcctgcttctgcctcccaaagtgctgggatcacaggtgtgagccactgtgcccagcctccttgatttgctttatcctctcattgccaatctctctagcctgtctttggagattaaagtttctgtgaaatttgcgaacctgtagtcctggtacgnaattttagcttccaccggcccaccttttttttcggcacacctagttatggtacattaaagtgcactnccttgcctag

SEQ ID NO: 1696 - DNA, 443 bp, Homo sapiens
aaagacatacttgaaactacacaacaaaaagcttgctgctttctggctaatgaaagccaaggactatccagcacacacagaggaggataaacaggagcctgattccccacgtgtcacattggtccgtgacgtttccccactaagggtgagacccattactgagaacaaaccccaggaatcccttacattctccttcccgtgcagcccccacctgattgttcttgtgtggattccagagctgactgctggattgagatgcttatttccccacgtacatgtatatcaaagcttgaaaattaccagagtgttcataataaggatttggaaaaggagtctattcaaccaagcagatctctgcctttctttcgtctttactatgaattctgaataaaatggagaacacactctcaatatgtagaaaaataaaattttggcaaaacaat

SEQ ID NO: 1697 - DNA, 493 bp, Homo sapiens
tcttcatgccatgtcattttacatgatactttgtaggttttgatgagaaagttggtatttttaatgcactcaaaaattggttttagttagagagtttgcttatcaatataactttcagatcagttaattaagataaaaggcatacactgtccatagatcagaggattaaataacttagcattgtttttctktttgtawacrgaaaatcttattattcttacacagagtgtgacacatttaatatttgctagaaaatgcatcttagaaattaaattattaagagttagtggtgaggaattttaaatttaatgttctatgatatagcacaacacagatttatttatttatttatgaaatggaatcttgctctgtcacccaggctggagtgcagtggcgtgatcttggctcactgcaacctccgcctcttgggtgcaagcaatgctcctgcctcagcctccctagtagctggggattgcaggtgcctgccactaca

SEQ ID NO: 1698 - DNA, 204 bp, Homo sapiens
  SITE (128): n equals a,t,g, or c
  SITE (134): n equals a,t,g, or c
gagagaatacttcactaaataacgtctaagttgtagaggttgtgccggaagataatatttttaaaataacaaatgttcaaatgccataaaagaaaatttgtgtgataataccaaagcagtactatatnaaaagnagcatgctttaaatccctgtcttagggatagagtggaaatatttttgttttttttaaggggtatatagtt

SEQ ID NO: 1699 - DNA, 471 bp, Homo sapiens
  SITE (425): n equals a,t,g, or c
  SITE (432): n equals a,t,g, or c
  SITE (467): n equals a,t,g, or c
acctctgtttcttttgcaagatatagctacctcaaaaaatcctttcttgatcaaactcttatggcctggaatccttgcgtttctgctgatgactgtcattttagagtacttactaaagacaatggttggggaaatagatattttaaaaataagggaaaaagtgggtagggtaaacccaggcttacttatgtaaactctgagtgctgaagttagaagacaacctttaagattaaaaaaaaaaaaaaaaaaaaagatttctggtagccgccagaagctaaggaccagattctccctctgagcctccagaacccmgatgacaccttgatttcagacttctgacctccmaaactgtgaggaggaaggaaatgtgttgttttwagggcacccagctgggtggacagtttcattcacagtagccacagggnaacttantaccccagcccctgggcagggcttgggttcaagcngggg

SEQ ID NO: 1700 - DNA, 292 bp, Homo sapiens
aaaaaaaaaaaaaaagaagaaccaggaatggcatcctagagttactggggcccttttctcaactacacagattgtcaaacttggcaatattayaaaacaattctgaagacaataaaattatctctaaacctaaactgtccagtagagtagccactaacccctatagctattgagcatttgaatgtggtcaggccaaactaaggtktgctatagcaatatacaaactacatttcaatgactttgtacaaaaaagaatgtaaaatatccctataataaaaaaaagacgtaaaat

SEQ ID NO: 1701 - DNA, 290 bp, Homo sapiens
  SITE (3): n equals a,t,g, or c
ggntctgtaaaacattaacgtcattatttaaaaaaatatgtaacctagataatatagtaatcagacatcattgttaaatttacagcttaaggaagtatgttgtcttttcaatcagattagtcattctgtttttttagtaatagttatatattaatgaagtgaactttataggtaggtatacwtsaatgraatcttaggcttttaccatctatattgcatacttctgacattatatcttattttccytaggttctaagaattttagatccagttacctgcaaagagagttc

SEQ ID NO: 1702 - DNA, 471 bp, Homo sapiens
  SITE (395): n equals a,t,g, or c
  SITE (439): n equals a,t,g, or c
  SITE (451): n equals a,t,g, or c
attttgttattttttttaattgagataccattccctgggggttttttcctattagattatttccttagaatagcttccttaaaaatagaattattaagacaaaggaaaaattataaaatacacataacaagatttaccatcttaaccatttctaagtgtatgactcagtattattaagtacawttatgttgctgtgcaccaatctccagaaagcagttttaatcttagaaaagcagatggtccaatagagtaatttgggcacaatgaaaagaaagtggaaacattttgagaaaattaattcattctttggcatgaaaagttagaggacttttaaatcttcttcagagctaggcaaccaggttattaaaatgaaatataccagtaggccatcagtntagcattctttaattgcaatggcaacactcataccacacacaanttaattccttangggttaaaggtgtaaatgag

SEQ ID NO: 1703 - DNA, 241 bp, Homo sapiens
  SITE (74): n equals a,t,g, or c
agtaaagacaggatttcaccatgttggccaggttggtctcaaactcctgacttcaggtgatccacctgcctcancttcccaaactgctgggattacagacatgagccgtcgcgcctggctggggaattttattaatcacagctatttaccaggattatctatatgccccatctttcccaaactttttttttgtgcatcttttcttttctatttgactgtttctgggttgcatggttttttt

SEQ ID NO: 1704 - DNA, 496 bp, Homo sapiens
  SITE (443): n equals a,t,g, or c
  SITE (485): n equals a,t,g, or c
aggattacatgggtatattgcatggtggtgaagtctgagctttttaagtaaccatcacccaaataatgtacattgtatctactaagtaatttctcatccctcaccctcttcccaccctcccaagtcactatcattccacactctatgtccgtgcacacacattataagctcccacttataagtgagaacatgcggtatttggctttctgtttctgagttgtttcagttgaaatattgwsctstagttccttccatgttgctgcaaaagatgcgatttcattccttttatggctgagtagtattctgtggtgtatatagaccacatttgcttcatccattttgagtcccttcttataagggccttggatcccattcagaaagtctccatggtctgatctaatctcatggtctaatcacctcccaaaggccccacctcctaaagnaacacactggggggttagggttcaaccattatctgtaggggncaacaggtcag

SEQ ID NO: 1705 - DNA, 450 bp, Homo sapiens
  SITE (337): n equals a,t,g, or c
  SITE (408): n equals a,t,g, or c
  SITE (420): n equals a,t,g, or c
ggcacgagcagggcagtagataccaagtgggttgcatacatgaaggttctttgggaaagggaaagaaaatttttaaacttacatttatttatagcaaaaaaattatagcaaaattttttttgttttaaattatacatatgtgtctagtagcacgtatttatattttatgtatatgtactacatacgtaattttttttcagattttttactcatgagggtgcacatcaataaagcttggcaaccactgcttcatgggaaatgatcagcgcaagtgacttctatgcaatttttagaaaatgtgaatgatgacatactgagctctcagggcaactggtcnctcctttgtaatcgttctcccagcaaggggttagtgaagatggacctgctagctccagtgtggcagcctgntgagcaaaaagngcaagcttcggcttaaaaaaaaaccattgg

SEQ ID NO: 1706 - DNA, 227 bp, Homo sapiens
ctccttttcttaaaactctgtgtcacctcattatctacagaggtggaacttactgtgctgtaaaaggccctcattgctctagggtggaatgaatgggccaaaatgtattttgaggaattctgagcttcttcactgggctttggttgttgttgattttcaaaagggcattgctttcaaacaaatatatttatatacatacatacacaccgtgtgtttgtgtgtgtgtg

SEQ ID NO: 1707 - DNA, 460 bp, Homo sapiens
ccagcctgctcgctgtgctgagggccaggcaggccctgggcactgaggcacgttgtttgctgaaaccaaatttctgtgcttgtgtttttccataattatattagcaggtgggatttttcctcggggaagcagtgggagggggagcgccatggcagtgtccccgcccgctctaagcgtgagctcacactcagctctgcccgcctgccgtaatgattttttaattatgcagccagtgctcggaattgctaatccccctccagccctgcatcccctcctgcaactcacaccccarcccctggctgatgtccctagagtggcggtgcccagccccgtgcccatcactgagtgcttgggacaamcgccatagcgggagagagggtaggtcaggaagggccggagggcgcccctccgccatctgcaagtgacaagacttgtggctctctttgtctcccacttcatg

SEQ ID NO: 1708 - DNA, 347 bp, Homo sapiens
gcttttctgttttaagatcatttattagaacacagtcattcagaagccattgagaacatcaggcagcaggaaggaagctggggcggagcaggccctgggaaggaccaaggacaaagtaatagccacagtaatgacatttcattttattctgrtaaagactaatgtatgcctgataacctagtgagaatccataagtttggcagttcacaacatttttagaaagcacatacgrttaacattcaaataaggcattatagaaagttttgtaaagaatgaagtgtttactgtcattcttttaaaaaaccttggctcatcttgaaagatcaatgaatttttaaaatatcaga

SEQ ID NO: 1709 - DNA, 561 bp, Homo sapiens
  SITE (501): n equals a,t,g, or c
  SITE (507): n equals a,t,g, or c
  SITE (521): n equals a,t,g, or c
  SITE (553): n equals a,t,g, or c
ttttttttttttttaggctcacgcctgaccaccggggtttttcaggcagtgcaaaaatgtttattctgctttcttccttggtgggtgggtcatcaggctgctttggctacgaagctcaggctctgtgacctgggcggcccgagcagtacagagcaccatggctgcccttgggcytcaggagcagcaaggcacagaggtgagtcctgcatcgggtggcacggcgtgggcgtgtgagcaccggaagggsagargcaggcgcttgccatgcctggggacggggcctcttcagggacagagcagctccagtgtctactgagagggcacagactgacccaaacacgcattccacagccagttccttgggatattcacagcacatgcagccagtagacagctgcaacaccattaaggacacctttgaggcggccacgggttcagttccagagcaggccccacccttcttgttgggggagacctttgttccaggtttcttcacagganttggtnaaagggaccaattnacacccccttgttagaggttcccttttagttncgggaagg

SEQ ID NO: 1710 - DNA, 852 bp, Homo sapiens
  SITE (37): n equals a,t,g, or c
  SITE (851): n equals a,t,g, or c
ggcgattaagttgggtaacgcagggttttcccagtcngacgttgtaaaacgcggcccagtgaattgtaatccgactcactatagggcgaattgggtacygggccccccctcgagttttttttttttttttttcatggaaaacagtaatgtttaattgagcacctcatctccaccctgactctcagggctgtgacagctgcacccacagcaacctgggcacggaggcaaggggggcccacaagtgagggagggcacacagagtcagagggcagcaaggaggctgaggggcagtgggagtgccaggagcagggtcctggatggggctggcagggccagggcctgcccgttgaggcagtcccagatccagtgttggtaggaggagacctgtaggtagatgggtggggcctcgctcttctggcagcctgcaccccagctcaccaatcccaccaggtaccacgtgccctccatggagcagaccaagggctctccagttagctcatagcagaacttctccctgtgggtgtcctccgcacacatcatctgggacttgatgatctgaaccagagtggggattttggtgaagttgtggtagaaattgtcacactctttgttgttcaggatgatgacttccttctcctgaatggtccggaactgaggccacatgccgtcagccttggaaagtccccagcccgtcacagtgcagcgggaatggtccttcaacacatagtccgtgccagctcgtgccgaattcctgcagcccgggggatccactagttctagagcggccgccaccgcggtggagctccagcttttgttccctttagtagggttaatttcragckggcgaactnt

SEQ ID NO: 1711 - DNA, 494 bp, Homo sapiens
taagtttcacttgaaacattcccaaattaaaacaaaaacaagccttgctttgagctgttgaaaaggcattttactgagaagatccagatgctattgctgttcttaaatgatgttgaaaggcaaagggtcaggactttcaaaaagtcactttgaggtcacctcacataagcaagcaacagtttgaactgatgcaaaaacaaacaatgaaattatgaacaggaggaagaaactaaaatgagggcagtatatgccataaatatggaagaggctgtctcttmtttatcttctcatttcctgtacataatacagaaacctggtatgtaataggcatacaattatttgtggctcaactgaataaacgargatgggaaaccagcmagcagcgggcagwtaatwtacttgggaaaggagaactgcagagacgctgggtggttccaaggcttctgcatgatcctcaaatgtcaccccaatctgctgtgacatagctattacca

SEQ ID NO: 1712 - DNA, 381 bp, Homo sapiens
tctgggcccagatttacacccaggcagtctgacttcacagcccttgctcttggcagatattaaaatgccatgcagtaaatacaaggaataatgtgaatatgaagaaagaaactcctgaatgggggtgggatggggatactgttgttagagaagggagagaaaagtggagtagagaaggttctccttagaactgactgtttgatctaagctsggaaggaagagtaggaatcattcacatggataaaggagagaagggcatcctaggtagaacatatgctggaagcacaaaagaacctaggaatacttacataacagatcaggatgtctagagtttgtttgggagtttatgaaagggaggttagggggagatgagactgtaaa

SEQ ID NO: 1713 - DNA, 407 bp, Homo sapiens
  SITE (373): n equals a,t,g, or c
  SITE (403): n equals a,t,g, or c
tgactgcattttgtgatatagcagtgtctgcatgctctttgctagccattggaattatacaggtcgtgttctttgctgtcttttatgagagatttatagaagataaaattcgacagttcgttgatttawgctctatgagtwayatatcagtgtttctgttatcccacaaatgttttggatattacattcatggtagatcagtacatgggcatgcagatactaatatggaagaaatgaatatgaaccttaaaagagaagcggaaaatttgtgtagccagagaggtttggtacccaacacagatggtcagacttttgagaattgcaatttctaaccagatgagacaacattatgacagaattccatgagacactnattaagggaaaaatggtcctgctaggactnactg

SEQ ID NO: 1714 - DNA, 310 bp, Homo sapiens
  SITE (227): n equals a,t,g, or c
  SITE (261): n equals a,t,g, or c
  SITE (275): n equals a,t,g, or c
ttgtataaaacaattattttattaacagtaagtttttctctttcagaaaactatttaaatataattatctttccaatcaagagacatacttctaaaaaggctcattaaaaaattttaaaaatcaagaytcaacttgcctttttacaagagtcagctgagatctaatgataagaaaagactgaaagtggkcaagaccaagtagaawtttcatgtaaatactaacaaantgagagcagaagaggtcaaaataatattacacangctacattgttaangtcaaaagctgtcatattttataaaatgtacttta

SEQ ID NO: 1715 - DNA, 450 bp, Homo sapiens
cgccgcagtctctagtgtggtgatacgagtggcagagctcggggatctggctcaggcccacatacagcaacttagcgacgtgccggtgaagatgatcactttttaattcgggcctctgcagcattagaaaaattgaaactcctgtgtggagaagagaaagaatgttcaaatccatcaaatcttctagaactttacacacaggctattttggacatgacatattttgaggagaacaagctagtagatgaagattttcctgaagactcttcttcacagaaagtaaaagagctgattagttttctttcagaaccagaaattttagtaaaggaaaataatatgcatccaaaacactgcaatttgcttggggatgagctactggaatgtctctcttggagacgaggagccctgctgtatatgtattgtcattctcttaccaraagaagagagtgg

SEQ ID NO: 1716 - DNA, 350 bp, Homo sapiens
  SITE (225): n equals a,t,g, or c
  SITE (296): n equals a,t,g, or c
  SITE (315): n equals a,t,g, or c
agggtgaccttccaaattactgagactcactagcaggctcaccagggattcactgctggctcagaaggtgttctagaaagcagtttccagaaggtgttttagaaagaagtcagatgcagagcacctctcaagcgtgagacgccaaggtaccttcctcccagtgtctaggtattggcagctctcttccccgttttgcagatggagaaagttgaaatccagagaggntaaatgaacctgcccaaggtgaagttttgacaccagagtttcaaatgggcttttcctgggtccaaagctgnatgccagggcattggtagnttcactaggtcagggaggacagttacaggaaagcg

SEQ ID NO: 1717 - DNA, 260 bp, Homo sapiens
  SITE (182): n equals a,t,g, or c
  SITE (254): n equals a,t,g, or c
aaaaagtgttcctaagcagagaaatgggatccgtaaaggcccattggagtgaacatgcatagtatactcagggaatcagttgattgagtaaatatttatggaggccctactatgtgctgagccctgttccaggtgcagaagatacagcagtgaatgagacaaaaattcttaccaactggagntttctgatagacagaatcagccaaattagtaaggaaaacatacagcatacaagaggtgagaagtgctacggngaaaat

SEQ ID NO: 1718 - DNA, 126 bp, Homo sapiens
  SITE (81): n equals a,t,g, or c
aaaaaaaattagccgggcgtggtggtgtgcgcctgtaatctatctcagcctcccaagaaactgggattacaagtgcccgcnaccacgcctggctaatttttttttttgagccagcctgacctctgt

SEQ ID NO: 1719 - DNA, 399 bp, Homo sapiens
  SITE (28): n equals a,t,g, or c
aaaatrgctaaataaatctttaatattnctaattgcaaatgtacagaaattgcacagccacacagagtcttagaacaccaacagcttcctctgtacattattacatagttaaaagtcgcagctggagggaactcaggttctctgtggcctgggcaggagccccccgttgactggcccagtgaaggcaccccagtggccactactcagacagcagctgcaaagccaacacacaaatgccacaggcagggaagacaccccccgcagacaccaagccttttcctcctgcccaatactgttctctagattcagaaataaaataaaacccttgggagagcagcagtcccggccagccctcggcagcaccaggaccaaaggatatgtacaaccattaggtgagat

SEQ ID NO: 1720 - DNA, 351 bp, Homo sapiens
  SITE (232): n equals a,t,g, or c
  SITE (236): n equals a,t,g, or c
  SITE (314): n equals a,t,g, or c
tcagaggatccaggccagattacagcccacctccctggaggatagtcggaagatgctacccttacccatgtcacagtggttggggaaaattcccccaacgtgagcgcctatgaacccatgagccagggtacagaggagggagaagtggggaatctaaccttccttctctctctcctacagaatagactgtgtgacttccaagtcacctaaattcattgatatgcctgtcccngggnaagttccccagtgaatttgacaaaatgctggggatgtatcccccaccaaataaatattttgttccctgtgcccacttnaatgctggcaaaccaaaccatttctggtaacaggggg

SEQ ID NO: 1721 - DNA, 381 bp, Homo sapiens
  SITE (24): n equals a,t,g, or c
accgcttaattaaagatctttttntttttttttttttttaaaacaatttccgctttattccctccttgatgctttttataaataaggtttaatagaaagcatcactattttttatttacttctacagggggaagtagctctttycctggcaggggtggacacrtagttatgggatgagctsggtggtactcggcctgtccacacgagcgtctctggctttgtcgatatkcttgacaaggaggggaagagacaagagtacgaggcggactcccagtatggccagaactactcctagtaaggttttaaatcccccgagggacgaaaaccaaccacgggggggggcggggggaacctggrggaccattccggtttccagggttt

SEQ ID NO: 1722 - DNA, 329 bp, Homo sapiens
  SITE (275): n equals a,t,g, or c
ggcacgagctgagcactttttccaggggccagggtccattcaactgaccactatcaccaaagctgacacccacccacatgtgggcacctgcagcaggcctggagactgatttagtcagcctgtcacaacctctgccaacaccaaagtgaaatgcttgggttccagggggttgtcttgccactgctactgacatcaactatgccacgcctaccgcccagggcccagtaacctgcccactcattcaccccactactgccattcctggcacccaagcnagctgcctggaagcccaagaatcgacctgcacagacccactaactctggtgcgg

SEQ ID NO: 1723 - DNA, 650 bp, Homo sapiens
  SITE (633): n equals a,t,g, or c
ccgctagtctcgagtttttttttttttttttttttttttttttttaggttgtactaattgttctattttattatgagttattgtttttaatctcctgtgcctagtttatacactcactttatgataggtaaggatgtacaggaaaaatcataggatacatagagtttgttattatctgtggtttcaagcatcctctgggggtcttgggatacatcctccatggatatggggaaactactatatataaaaagtcggtaaaatgacaaatagagaagaaaagcagacatcattttacatatgctgaagaaggctaatcacgrgttcaatccatccttcattgctcaggtccttcactcacaggatttgagtctacaggtgatgccaatgtttttattattttacgtctttcttccctgtgtagccaaatgttggcactttctatgcctcctttttgtctctccacttctaaagccaatcaccaattccggtttctgcaagtctggccatcctttttctccagcgcacatggtctgtttcctcttggccacgtactgcctctccatctggaatactcactcccctccatttcgtttattcaactcgtccatttatatgttccaagcgaagaagtcngtggtttgctttttcgt

SEQ ID NO: 1724 - DNA, 404 bp, Homo sapiens
  SITE (19): n equals a,t,g, or c
tcttcactgactgttttgnactttaacaaagtagaaaaggaaacaataacacggttttactcaacaaacaaacaggagaaatgctggcctgaaggaggaagccacctcggtcctgttggagctgagagcaaaaaataaagacagcaaggacctcggcaattccaggcacaaaggacaagctggccaagcgggccctgttgtggccttcctggcataaggcgacgcttagttcagaggcagctccagatgggacactcctcccttccgtcccgacacmgcccgggcttcctggaggtggccactctttggctgagacctcagcagaccagctgccctggtgccagaatccaaatgaatgaaattaccaggaagagctgcgaggaagggtggggaggaggcgtccc

SEQ ID NO: 1725 - DNA, 160 bp, Homo sapiens
  SITE (156): n equals a,t,g, or c
gaaacattcgtttccctttattagctcagtgaggctgatgtgtactgcacatttaaaaaaaatcacaggaattttcatacaatgaataaaaccacaacaatacatgtagaattggcaggtggaaaaaaggcccggcaaggtcsaactaatcgggcncggt

SEQ ID NO: 1726 - DNA, 330 bp, Homo sapiens
aatgtagtagagacagggtttcaacacgttggccaggctggtctcaaacttctgacctcagktgatccacctggccaacacggtgaaacccgtctccactaaaaaaataccaaaaaaattagccgggcatcgtggcaggcgcctgtagtcccagccactccggaggctgaggcaggagaatggcatgaacccaggaggcggagttgcagtgagccaaaatcgggccactgcactccagcctgggagacagagcaaractccgtctcaaaaacaaaaaaaagaagattgaaatcctgtttaatgttgctcttctctttctatactataaac

SEQ ID NO: 1727 - DNA, 423 bp, Homo sapiens
  SITE (1): n equals a,t,g, or c
  SITE (389): n equals a,t,g, or c
  SITE (395): n equals a,t,g, or c
nggcttgtctgtcctctcccctgcttgcattccatgtgcatctaaagtggacttcactggcccctgcgctgtccacatcctccccaaatcctgggggcccagcaagcgtgatgtgcccttgaccttcactcagaaaacaagaaaccccacagccccctcccatctccccttccagccctcaaacaaaggtgctgcaggtctgtgtccagccctgaccactgccaagccccctccccttgagaggcagtgcgtcctggccccaggcgtagggctgatgagcactagggyttcagctggttcttacagctgtcttcccttagatgttccattctggaggactatggagttgctggtgcttcagcatgggctggctgccccttactggccgncagtgncaagggatggaccctggtccatggacca

SEQ ID NO: 1728 - DNA, 209 bp, Homo sapiens
aaggccccctcggcctcctgggcaacttggggtacacaggatactgggggtgccgctcctcactcgaccccagtggtggcaggggctgctcctggctgtggttgtgcgcccggggcttgggagcggccggtcacgctgctgtgggcccgagtgtgttgcatgtccacgcaccacccgttcagggccctgaataaacagttggcaacagc

SEQ ID NO: 1729 - DNA, 475 bp, Homo sapiens
gggtcaacagaagagactgcttactgtttattaagtacacattaaaacctaagtggtcatttaaataaaaataacaacgtattattaattttattacatatatgaacataaaatgtatgaaaacaactgcataaaattgggactggcaaaaaaggtatataattgtacagttcttacgcatgaagtagtatattacatctcttgaaaataactgtgtcacagcttgccaggrgtaaagaataaaataaaaaagaaagaaagaaactgtggtaagtcaagatgtacctctgctacccctgacacagcaagaccaacccttcctcctccaatacatttatgatgatccccttttacttaacgagttgtaaaccctaaagtaatccctcaaataacaaaacmaagagttataattaatacattaacagagggccaggcgtggtggctcacacctgtaatcccagcactttgggaggcc

SEQ ID NO: 1730 - DNA, 455 bp, Homo sapiens
tttttatgggctttggtgagggaggtaagtggtattttcacagcaaactgaaatctagatcatttaattcattcgcagccaggcttttctccccacaggtcttcctagtaaggagatgtcctggaatcggtgggtggggcctgctggccccggcctccgtctaagagaaggcgccccagcattcgtgccagaacatgagccggcagccagggtgctgaragtgggccttctcagctgaggccacatctggaagtgcacccagccaccatcaaggcaactgttccaccctaggccgtgcccgcccccggccgscccacagagccttctacaattctccagccaagtggaagggacgacaggaactctggtctagtctcccagagctgaaacgccacagctctaggcatttcagatgacaagtggcagagtctgcacctcacctttatgtgttccca

SEQ ID NO: 1731 - DNA, 332 bp, Homo sapiens
cagatctcgtgccccctcccccgatgacaaggctgggtctttggcccccatcctcccccaccacttcagcctgcactgacactaacaatattgaggtcacagactggcttagaaacaagatcaggaagatatatgttggggtgcctyccccaaatctgggggccaagcatccgatctgaggggcaagcggctgggaaattgggcctgggggctccagggtctgaggtctgcctggctcccagggcggccctccatgtacccctgatttkggggcaatgaaggggawtcatggatcagagggtgggttttcaggcaggggagcaggatttggg

SEQ ID NO: 1732 - DNA, 533 bp, Homo sapiens
gaattcggcacgagtagcatagaggcggctgccaagcgtcctggctgagggatggcgggaccccaggcggctggagtggagaaagttgaccgcccccgtcttttctgccccgtgggtggctactgcgtgcccccaagtaacccagaggttgagggccccccagtgcgcggcggccgggggtcaggatgcgggactcccctccaccgccatgatctcgcagtgtgggggagcgctcggggacagaaatgaggcccgagatgtgtgccttctccttgctcctgaccgctgacttcgttattccaaatacgcagccgaaaccatcgctcttgcaggtgcagcttttctctgcctctcctatgtggaaagcagcgcagcgtggactccagccaaactccctcgattggattgcagctctctggctctctgtccctgtgaccttgggcagtttacctcctctatgtctcagtttcctcagctgtgcaaaggggktactgatcctgcttaatggggtggggtgttgtgaagaggaaatc

SEQ ID NO: 1733 - DNA, 488 bp, Homo sapiens
  SITE (387): n equals a,t,g, or c
  SITE (401): n equals a,t,g, or c
  SITE (484): n equals a,t,g, or c
  SITE (485): n equals a,t,g, or c
tgttacgccagctcgaaattaaccctcactaaagggaacaaaagctggagctcgcgcgcctgcaggtcgacactagtggatccaaagaattcggcacgagatcccagtgcgaccctgtgcaaggttagcacccaacccggtggatgatgccgggctactctccttcgccacattttcctggctcacgccggtgatggtgaaaggctaccggcaaaggctgaccgtagacaccctgcccccattgtcgacatatgactcatctgacaccaatgccaaaagatttcgagtcctttgggatgaagaggtagcaagggtgggtcctgagaaggcctctctgagccacgtggtgtggaaattccagaggacacgcgtgttgatggacatcgnggccaacatcctgngcatcatcatggcagccatagggccgacagttctcattcaccaaatcctccagcagactgagaggacctctgggaaagtctgnnttg

SEQ ID NO: 1734 - DNA, 330 bp, Homo sapiens
  SITE (215): n equals a,t,g, or c
  SITE (285): n equals a,t,g, or c
  SITE (293): n equals a,t,g, or c
gaaacagagacgtgggcaagctgagtgcatctcactcaagtccctcctttctaggctcagagctttaaagggaagctgaatcagaggggagctgataatccaggagtagcctattaaattccagaccaattggcaaccatatttaaaagtttggaaaggcctgtattttatccatgaagtggattcaaggtagtacctctggtcttgccatgtanamatcttttagaggagtttttagcttctggagctaaatgcataagagcataagggaatagtatattttcnagcccatnatttacatagaaatcttcctttaaagccccattatga

SEQ ID NO: 1735 - DNA, 362 bp, Homo sapiens
  SITE (338): n equals a,t,g, or c
  SITE (342): n equals a,t,g, or c
  SITE (345): n equals a,t,g, or c
acaaagatgattttaaagaagagattgataaaataaaatgttgaaatttttctaggctccaattctggaaaagcagattgacgttgaaattcttgtaataaagtatacatcctactgtagtgaaataatagccacctttgagtttacttatcattatttactgtctagctactgcaaacacagtttattcagctttgcattgctaaagcctggtggtgttacaagtaaatgtggcataagccataaccagtgctttttcgtgtatctaattttttcaggttacaaatagcttggaaacagtttcttttgtttttaagttggatgacccagctaacacntttnaantttgccactcaatcctc

SEQ ID NO: 1736 - DNA, 437 bp, Homo sapiens
  SITE (335): n equals a,t,g, or c
  SITE (393): n equals a,t,g, or c
  SITE (418): n equals a,t,g, or c
  SITE (431): n equals a,t,g, or c
gagagagagagagagagaactagtctcgagggaaatagatgattttctcagtagcttcatggaaaagagaacaatttgccactgtagaagagccaaggaagagaaacttcagcaggcgatacaatgcacagccaatttcatgctccactatagattttcctggaaacatgaactgccaagagaggaatgggacacaaaaccaaacactgttttatatttatggtttgcaaactggctttcatcagtggctaaattcacagatatcctatatagrttgtatacagaactggaggacacctcgagagtactttcttagagcgggccgcggggccccntcggtttttccaccgggtgggggggtaccagggtaaattgttaccccaattcggcccncataatggagtcgtatttaccattncactggggccgtnggtttt

SEQ ID NO: 1737 - DNA, 374 bp, Homo sapiens
  SITE (247): n equals a,t,g, or c
  SITE (279): n equals a,t,g, or c
  SITE (337): n equals a,t,g, or c
gagagagagagagagaactagtctcgaggtgctccagcacaaggctgcaggagcgatggaatacaaaaagtgatcttcatcaaaatacagtgtccattgatccaaaattagcagccaaagccaaaattaacacaacaaacagagaaggctacctagaacaatttggagactcacacggttcaggagctaaattaggagatcctagactacaaaaaaattttgatcctaggcttcacagactgcccantacagagtctcattcaagtggttatggaaggnttccacatgccttcaaagggtgcccctccactttacccagatccaaaccctggttccntcacagcccctccagggggccgggaactagccatttc

SEQ ID NO: 1738 - DNA, 137 bp, Homo sapiens
agtactttctagagcggccgcgagcccatcgattttccacccgggtggggtaccaggtaagtgtacccaattcgccctatagtgagtcgtattacaattcactggccgtcgttttacaacgtcgtgactgggaaaac

SEQ ID NO: 1739 - DNA, 836 bp, Homo sapiens
  SITE (826): n equals a,t,g, or c
aaattaaccctcactaaagggaacaaaagctggagctcgcgcgcctgcaggtcgacactagtggatccaaagaattcagcacgaggacttccttcccatctcctatggaaatacaacagacagaatccttgtttccatcaacaggaatgaaacaaaccattaataatggaagggcagcagctcctgtggtaatggatgtattacaaacagatgtgtctcaaaactttggcttggaattggataccaaaagaaatgataattcagattattgtggtatttctgaaggtatggagatgaaggtggcactttcaacaacagtgagtgaaaccactgaaagcattttgcagccttcaattgaggaagctgatattttgccaataatgctttcagaagataataacccaaaatttgagccttctgttatagttacaccactggttgagagtaagtcgtgtcatctggagccttgcttacctaaagagactctagattcttcacttcagcagactgagttaatggaccacagaatggcaactggtgaaacaaactcagtatatcatgatgatgataactcggttttgagcattgaccttaatcacctgagacctattccagaagccatcagtcctctkaatagtccagtgagacctgtagcaaaagttcttagaaatgaaagcccacctcaagtttcagtggataataacagtcattaagatgtggttttacccaattcaagcttaatctacctcttaaaagtcaagtctgatctcaataaagggaaatcaaaaagccaatttaccaaatcttaccaaatgtcccgaaaccngaccccatgt

SEQ ID NO: 1740 - DNA, 458 bp, Homo sapiens
  SITE (414): n equals a,t,g, or c
  SITE (436): n equals a,t,g, or c
cagaggatcgccagggccagcggccagactaggatccgacctcacacactaaacgtttcaccactttaccaaccattgcaggctgcgttttaaatattttacgcataaaaagggatgctggcccataaaccaccaatctgttggccacaaagacttgaaataacaacgttttgtgtcctccattgtgaaaaaaaaaaaaagacggaagttaaaggggtgaaggcaactcagtcgtaactattccaaatacaccaggaataagtggagatttatagccaaggagcaaggagcaggtgttcggaaaactgctagmggaaacatcaattctgggggaaattctggctgaaccaacctaacaggagtcccagtgaaaggcaggccagggggtcagatactaagggtaggagtaaaganttttgatcacatatggagggtnggggattcttgctaaactgccg

SEQ ID NO: 1741 - DNA, 475 bp, Homo sapiens
  SITE (365): n equals a,t,g, or c
  SITE (415): n equals a,t,g, or c
  SITE (454): n equals a,t,g, or c
  SITE (463): n equals a,t,g, or c
acccccactaaagggaacaaaagctggagctccaccgcggtggcggctcgctctagaactagtggatcccccgggctgcaggaattcggcacgagctgtctcagcctccctcgggccaatttgggtaaatgcgtccaagaggaagaaataaaaatgaaaagactgacagtttaaaagcatgtggagggcttagaagataaagacgagtgcaagaaagggagagcgcggccggccgcggtgtctcacgcctgtcatcctagcactttgggaggccgaagagatcggatcacttgaggtccggagttcaaatccagcctggccaacatggtgaaaccccgtctctactaaaaatacaaaaaaattancccggacctggtggcgggcgtctgtaatgccagctactcgggaggctgangcgggagaatcgcttgaacccgggaggcggaagttgcantgaaccganatcgcgcccttg

SEQ ID NO: 1742 - DNA, 450 bp, Homo sapiens
ggagttttttttttttttttttaacaaacacattttaagaagtcatgctytacatgcttacgaaaactatagaattgttgcttcccaattatgaacactttgaaaataaaaaggttagactattagaagtaaactgagtattagtcccacagatatattaaagggtaaaaccaacctttacatagtgagacttgttttatattatgattctaaatatatttacattgttccttttctcaattgttttgcatttttagtatcttacctataacagagattttaagtaattcaattttatcctcaaggcctgcagctttcagattgtcccaagtacctagtaactgtgagtcgctgacatcagcacctacataatacacatcctatggggaaataaatattttaagcataaataarattattacatatttcatgtagttaagaaaatcgact

SEQ ID NO: 1743 - DNA, 448 bp, Homo sapiens
tatctatttattacatactaattcaagattttttctcagggtggcatgcatattcagtagtgtttgtgtattgtactaaaccctgttcttactgaactgagattttgcattttttataagcagagcttggaagctgaacccttaagtgtctaccctggtcttgtggcatttcatgttgagagcaccaaaatattccctgtgtcatgggaagggtagattatgagagaaggagcagaaagagcagataaactcctgggccctagggtggtttttttttttgtttgtttgtttttatatcatgtatccacaatgatcatttggaaggaatccaagtgaatcaagtgtgagtcaaacagcattgtttatagatgctgttgtagtctgttctatgctgccgtagtggaataccacagactgggtaatttacaaaaaaaaaaaaaaaaaaaaa

SEQ ID NO: 1744 - DNA, 905 bp, Homo sapiens
gctcgacttgtkttttttttktttttttactttcattagtgttttcaatagtgtgggcgcaggctcagaaggtggagaggctggcctcagaggacacccaggcttggggctaagtcccagtgtccatatgaagctgtttctggccttgtccgtttttgttgtcccaggctctgtgcccctcactcagtcaagaacttgtctttgtgttgcttcttggggacatgctcagggcagaagtcagagcggaggaggcgggaaaagtagattatgatcatcacgtccagcatgagcaggatacccagcaggaaggtgcccagggtcctctggttcacataacgcaagaagaaatgggtgaggtaggcctgaggggccaggcggaagagaaagtacatgaccaggttcacatacttgttaacccggtagaggagatgatcctgggcattactgattttcatcatcatgcgaatggtgaggaagatgttgctgacttccaccagtagtgttaagacacccccaccgacaaagctgctccaaaagatgccggagaagaaggcacccatggccatgacgtgatggacaaggtattcacaagaggctcgcgctctgtccgctagccacgatgtccaccgtatcgtggatgaaataccccgcagagaagcaaacgagcaaatagccagaaagtgaccacgccgtctcaatctccactaacatgtcaggagtctgccatacactgtccctcccgcgcccgcgaggtgggcacttgggaactgctgagtaacccatcgccacctcttcccgccggctcttaaactcctgggccgggcggctgtcacagtcctccctcagacagtcccgccctcggcccggctccccggaggctgggcaagcaagacctccgatttgcc

SEQ ID NO: 1745 - DNA, 578 bp, Homo sapiens
  SITE (475): n equals a,t,g, or c
  SITE (539): n equals a,t,g, or c
  SITE (548): n equals a,t,g, or c
  SITE (551): n equals a,t,g, or c
  SITE (577): n equals a,t,g, or c
gcaaagacctcaccccagaagccaagatcccctggtcaagagaagctggcctgattatgtggaggagaatcgaggacatttaattgagatcagagacttatttggcccaggcctggatacccaagaacctcgcatagtcatactgcagggggctgctggaattgggaagtcaacactggccaggcaggtgaaggaagcctgggggagaggccagctgtatggggaccgcttccagcatgtcttctacttcagctgcagagagctggcccagtccaaggtggtgagtctcgctgagctcatcggaaaagatgggacagccactccggctcccattagacagatcctgtctaggccagagcggctgctcttcatcctcgatggtgtagatgagccaggatgggtcttgcaggagccgagttctgagctctgtctgcactggagccagccacagcccggcggatgcactgctgggcantttgctggggaaaactatactttcccgaggcattccttccttgatcaccgggttcgggaccacnagcttcttncanaacccttaatttccttcttttggagnc

SEQ ID NO: 1746 - DNA, 534 bp, Homo sapiens
  SITE (53): n equals a,t,g, or c
ttacagtgggagatttaatgtttaacttcaaaaagactccatagagtctgacngaatgcaaacatatttacagtaacttttcttacactcactaggattactttgattttcggttttattggcaagagtgattcgtgaaaaccatgactagatgaacattggaggaaacattcccaagcattaatcacttaattttagttttgtacatttttttctgtctaatgttacctttgttgtaaaattatctttttttaaggaatgctttgtaaagcttagttctaatattacagaattcatagttatgtaattaatctcaaaatcactcaccattgaagacccttgctatttttatttcctataacacgaagtctattatctccttaataatttttaatttccatccttagaacttcttcagctctgctactttttccttaaggccagggtcataggcagcacactggtgataactcactgtctagaaatattgcattttgtttacaaagttattttctatgttcagcattttgctgg

SEQ ID NO: 1747 - DNA, 355 bp, Homo sapiens
  SITE (325): n equals a,t,g, or c
  SITE (329): n equals a,t,g, or c
  SITE (341): n equals a,t,g, or c
ccgctctagaactagtggatcccccgggctgcaggaattcggcacgagtgcgccaccaccacatctggctaatttttgtagttttagttgagacagggttttgccgtgttgggtaggctggtcttgaactcctgacctcagatgatccacccgccttggctcacaaagtgctgggattataggtgtgagccaccgacctggcaagtgacaatcaaatttataatgkcatcagcactatatctttatggcatacctattccaatwaggctttcaatwtgkaawawccctatgatagaagaacttctacacttccatgattacactntaancaagttcttgtntccataataatcca

SEQ ID NO: 1748 - DNA, 571 bp, Homo sapiens
  SITE (34): n equals a,t,g, or c
  SITE (116): n equals a,t,g, or c
  SITE (559): n equals a,t,g, or c
tggtcaaggctgatgaacaacagtttctaggtcngattttacaaaggagttcatcactcagtctctccttttctttctggcataagttcaatttccagctgaagttttgccattgntttcttcaagatcctgcatttcagagagctttcttttaatctytttctttgcttccccaagctctttatcagcagtctcaagcacttcttctttatgtctttccaactgctgtgctaactgatctatttcagttaattcttggcagagtttttcatttttgttacttaaattaacgacttcagatgtcactgtttccttggtttccataagctctcgtatacgcttctccaggtctttattagcttgctgaagaaagtcaacctgaatatttaaatgagcaataagcttttcattggttttatttctagactccagagaaaggacatcaggggaccgaccaccatccaaagcaactgacagtcgttctatctctcgttctcttagctcaatctgcttgctatagtctctcaccccactttccatcattgctaacttttcttgnagctggtggact

SEQ ID NO: 1749 - DNA, 815 bp, Homo sapiens
  SITE (84): n equals a,t,g, or c
  SITE (111): n equals a,t,g, or c
  SITE (752): n equals a,t,g, or c
  SITE (755): n equals a,t,g, or c
  SITE (807): n equals a,t,g, or c
atgtcagttgtggcctaatactccagcctaccaagatatttttatatcttgagattgtcactcctgtcccttcaaaagtttgtnccatctgaatatttcaccatacaaatnttcaatatcttcatctaagatgttgacaagtttttgaagagctcagagccccattttaggcctcctgagaccaccttctaggtggacctgagctcaccaatcagccccacttaaatattataattcacttcattgttctagtatctagcccacattttcctatcttattcccaaaggtattatgagaggcctttttggataatgcattactgaaatctgtaaagaaccacacttctckgacccctgtcaaaatagaaagtggcatgacwattcctcctrtgaaagcatcctgtatggaggatcagaccaaatgctaaaacactttagtaggtttacctaaatasagcttgtctttcatatatcatgccttgacacttcttctgcaagaccagttttttctgtaagactaattgatattgagatttcaatatatatagaaatgggactaaattttatccaaagctatttttgcctctattttgggggcattcaagttaatttcccccacttacactaaactgtcaaatactagaatgtggaagcttgaatattagagataagtaagtgcccagttcsattccaccagttcacagccctgtctatccctccatcccaccctcaccaccacccttctaaagcangantattaacacttgaactggactggttaaaactttcttcctaacattctttcangtgctttt

SEQ ID NO: 1750 - DNA, 441 bp, Homo sapiens
  SITE (392): n equals a,t,g, or c
  SITE (401): n equals a,t,g, or c
  SITE (419): n equals a,t,g, or c
  SITE (426): n equals a,t,g, or c
gtgtgccttgtgtaaagttgtggttaggaagggacagagccaggactctaaattctgtcctccggccataattccaaaactttctccaatgttaggtatgtaggctaaaatgtgctaacagcacttgtgtttttgtttccttttgttttactttttattatggcaaatttcaaacatatacagatacagaatagtttaatgaactcccatgttctcatcatgccagttcaaacatgaatacatggtcaaccttgtatcacttaaactcctgcagacaagccctgccccatcctgttgttttgaataaaatccatcattgtatctcactgtaaaaaggcctgttctttaagaaaaaataaccataatacatgattgcagctaaaaaaattaanagtatctanacagctaatcaatattcncatttcnggggggaagagccca

SEQ ID NO: 1751 - DNA, 350 bp, Homo sapiens
gctgatttaccctcttctatttcagtacactctcctgccctgccctgctctgccctgccctgctccgccccaccctgccgcacagctgatacctcagagtttatcattgacttccttttcacgactccacccccaacccctgtgtatcatcattccctgagcgcctcctatgttcccaggccttggggaccccgagctagtgaaaggcccacaggctagtggaggggagtggatggcgcttggttgagtgtgagcaccagtggcaagggacccctctccccctcaggagggagccctttgtaacctgatagtatcattaaataaaagtttattgtgtttttttgttttgt

SEQ ID NO: 1752 - DNA, 272 bp, Homo sapiens
cggcagcgacagcggcagcgkcagcgkcagcggcgctgagttttgtctcccgggccgtctgggcgcgcgcgggtgtcccagaatgaaatatgactgaggactctcagagaaactttcgttcagtatattatgagaaagtggggtttcgtggagttgaagaaaagaaatcattagaaattctcctaaaagatgaccgtctggatactgagaaactttattagtcagaggttccctctcccgtccatgtaccgtgcattggtatggaaggtgct

SEQ ID NO: 1753 - DNA, 373 bp, Homo sapiens
  SITE (231): n equals a,t,g, or c
  SITE (335): n equals a,t,g, or c
  SITE (371): n equals a,t,g, or c
aaactacttttcttgaccttctgtttattgcattccatgtggtttgcttattacatgccctggttataacttggctgattttgccctttcttttctgttttccatgcggctgtcattttgtgtgtaatgcgactgtcttgcccttttcttggtctgtggattgcagtggcaccctgtgctgcgcacactaaagaaccgcattgaagagaacactggccacaccttcaactncttactctgcaatctttatcgcaatgagaaggacagcgtggactggcacagtgatgatgaaccctcactagggaggtgccccattattgcttcactaagttttngtgccacacggacatttgagatgagaaagaaggcanca

SEQ ID NO: 1754 - DNA, 553 bp, Homo sapiens
  SITE (45): n equals a,t,g, or c
  SITE (502): n equals a,t,g, or c
  SITE (525): n equals a,t,g, or c
  SITE (538): n equals a,t,g, or c
aattaaagtaggcacaataaaatataaagctgtttagaaggcctnaaaggtcctcggccagtaaccctaatttcccccactttccctaactttaatactagtaattcccaaaacatttcctgatgagaaacttcgatttccctgaaattttatgatcactaatagggaaggactgctgagtcacaataatcactggtggaatggggatttaattagcaacaacagtcaagtcccacccagtaagcacctgagagcttgtgagtcagttgaagacacgtatttactgagtacctgccatgtgtaaggtgctggtgatagagcccaaggaactggttgctatgcttcaaaggagtggtggactgttttactaagtgggatatggcaggaacttgattgaaacacatactcagaagtagttcacctcattatagcttaaatatgtaacactctgggcttcaggtgattccatttcttcctcagttcagatctggtgctgtcagangcaaagatgtagttgatgggttncataaggacaggncccacaaccgaggac

SEQ ID NO: 1755 - DNA, 564 bp, Homo sapiens
  SITE (13): n equals a,t,g, or c
atttcggcacagngtgtgtttaatgacactttcccttcctgagaggcatcttttaaatccagtctcttgatttgtgccaaatagaaacccaaaaaagacctttaatcctttgtccattggatgtgatgactttatatgtaagtgtagcttcagtttattttggaatagtgaccttttttttaatatactgttttatgagaggaaataaactccttccagaatttctcacttaaaataacttcacatcttaattacgaataggataaatatctattgtgaactacatgagaaagctgacccaactcgaataacctctacctggtatcctttctgcaacaatccaaataagttaaaagagtttttgtttagataagctgtaaaaatgataaatctatctttggtcctcagttgaaactaccaccactcmtttgattgtgattctcattcttagccaaagaatatcaaaaccaaatgtgaagcttttcatacttrcagatgcctgggcccccatccctggtggttttgggtctggcatagtcttcaggcatctgtttgcattaagtt

SEQ ID NO: 1756 - DNA, 472 bp, Homo sapiens
tgccaactcggctcactgcaaccttcgcttccccgggactgggcagaccccctccctcatgcatctgtgtccactgaggcttccctcacctaggaatggcccatccttcaggacccagctcactctcatcttctttccagggacttatcccccaaggctgtcctctgttctggtgagctcagggctcttggaacttggtctgcagtgactctggggttcctggttaggacccatgttctctaggtcccagcacctgcacggggcagtgtttgtgacactgggcccagctattctgagagaaggactccaaccttccatcaggtgtggcccgagatgtgggtggccctgggcatggggcatggatgcattgtgactttcatgggcctcttctgcaaaaaaaaaattaaaattatactttatgactattggtagaaagataaatatattaatacattaaaatttctctttgagt

SEQ ID NO: 1757 - DNA, 162 bp, Homo sapiens
  SITE (128): n equals a,t,g, or c
ggcagaggacggcctcaacctgacgtccctgtccatcacacactgcaatctgaccgctgtgccctacctggccgtccgccacctagtctatctccgcttcctcaacctctcctacaaccccattcagnaccattgaaggggctccatgttgcatgagctgct

SEQ ID NO: 1758 - DNA, 777 bp, Homo sapiens
  SITE (11): n equals a,t,g, or c
  SITE (13): n equals a,t,g, or c
  SITE (704): n equals a,t,g, or c
  SITE (720): n equals a,t,g, or c
  SITE (770): n equals a,t,g, or c
  SITE (776): n equals a,t,g, or c
agtaacatctngnataatagagcaccagaaamatttctaccaaatgagacaacaactttaggataagttcatcctctaggagctttctaatgtgcactcagttcctgtatactgtgtgttttgttctgatcaaggggtagggaacctttccagagaagtcccattagtaagaaatgacataaaatacgtgctttctcaggttactgtataactgttataatatatttaatatataaaattaagacttttgcttccagcaagtatgttagactagatattataaaacaactagatcctgaataaaatctgcttttaataggttcactggaagtaggagaattttcaagaaccatacttcgacatttcctctgccacaaaaaatgaacgcattttaagttaggagtcatgaatactgtattgaccatacaagtggattatggttgtctggatggcagataccaatagcaacattgtcatatgcagtttgcctcaaatcagaaacaagaagacatcggaatctgagatgctgccctagagaggacagttaaagaaggttcagtggtcctcagtttgcagtgctctagctcctggcagaagcaagagggaaacattcctaatttagttccaagattcctacagattattatcaagtagtagtattttatgactagggttcacaggcacaagttggaaacaaactaacntgacaggaaagttttnggaaaaattaaccatggacccagttttttcaagggtttcatcacccaccntagggnt

SEQ ID NO: 1759 - DNA, 506 bp, Homo sapiens
ccagatggcacaggccgtgaaaagatcgtcatccctgtgttcaacctcttcgttaaggacatctacttcctgcacaaaatccataccaaccacctgcccaacgggcacattaactttaagaaattctgggagatctccagacagatccatgagttcatgacatggacacaggtagagtgtcctttcgagaaggacaagaagattcagagttacctgctcacggcgcccatctacagcgaggaagctctcttcgtcgcctcctttgaaagtgagggtcccgagaaccacatggaaaaagacagctggaagaccctcaggaccacccttctgaacagagcctgaggcggatgcagcccgcgacgccagaggaagcacgtgcactaactgggtttaaattttgactgatgtgggttgagatgaggaggcctcactggttggggtccattttgwawataacttttatgagaaaaaaatggtaattatttcacgcatcaaaaaaaaaaaaa

SEQ ID NO: 1760 - DNA, 387 bp, Homo sapiens
  SITE (64): n equals a,t,g, or c
  SITE (66): n equals a,t,g, or c
ctcgaggaggaggagttggagcttgcccgcgggaagcgagtggacgggccctccctggaagcananatgcaggccctgccgaaagatgggctggtggcaggaagtggccaggagggcacacgtggcctcctaccactgcgtccgggctgtggggagcggccactggcctggctggccccaggtgatggcagaaagtctgaggaggcggcaggagccgggcctcgccgcaggcaagcccaggacacagaagctacgcagagcccggcccccgcccctgccccggcatcccacggcccctcagagaggtggtcacgcatgcagccctgtggagtggatggggatattgtcccaaaggagccagagcctttcggcgcgaggcagcggggc

SEQ ID NO: 1761 - DNA, 748 bp, Homo sapiens
  SITE (4): n equals a,t,g, or c
  SITE (21): n equals a,t,g, or c
  SITE (59): n equals a,t,g, or c
  SITE (695): n equals a,t,g, or c
catntttaaatctaaaccgantcccaactccaggtcactcatctcaaaatgcctttganaacatcaacccttgtggaaccgaaggtaatccccttgaaaaaacgggaaaacctctccctctttcccctattccctacacccttcccctttccctgccttgaaaaagctcctccaacttgttaggttcttggctttgtgggcgtctgaaatgtgtggaatgtccggttaagagcaggcatggtgctctaagtgcacacgggggtaggggtgagtaggccagggcagaaaagtaacaggggatctaggaaggaggcctaagtaggaatctcaggaactaccagtggggctgaggagataataagatacctacaccccactgcctcacgggaaagcagatttacatccccagagatcataagagagggaggggccccatcagtgtctagaaaggaagcttcagagatctgagaccttctgaagaaagaaccacttacctgactctctgtctgaagaaatgaaaataaatctaaaccttggatgtcggctcccagtgggaaggcaggtgggtactcatgtagtgggagactggacaggaaatccccacccaacgtgcccatagcagggctccttagcaccgaggatggctggtggccagatgtcaggactcctttgcttccaggtagggccgggatggnagctgaggtgacagaacagtgcttcttggtagggggcagatcccctcgtgccg

SEQ ID NO: 1762 - DNA, 403 bp, Homo sapiens
  SITE (8): n equals a,t,g, or c
ttcggcanaggctcctaaagagtaagattagtattttatgtgattagtaatccaggcaattggaatagctccaggacatggtataagctcagcacatttttaaaattcattttaaaaaatgaacacagtgacagatttttaattttctgccctcccacaattacatctctctatagctttccattagccatggcagtggtcttcttatagtttatgttaccatacatttgatatcactcaattttggtcacccaagattaaacattttctttcagataccagtttcattccaggrcctgactgtgaacttcacccaagaggaatggcagcaactggaccctgctcagaggctcctgtacagggatgtgatgctggggaactacagcaacttggtctctgtggg

SEQ ID NO: 1763 - DNA, 406 bp, Homo sapiens
  SITE (400): n equals a,t,g, or c
ggcacgagcagcaagatgtgaccgctgtgccgatgagccccagcagccactccccagagggaggcctccacctctgctgcctgggggtccagtgtgtaaggcagctgcatctgcaccgagctccctcctggaccwgccgtgcctctgccccgcaccctctgtccgcaccgctgttgccctgacaacgccggatatcacattggttctgccccctgacgtcatccaacaggaagcgtcascctgagggaggagacagaagcctgggccaggccacacgartccctggcccgggaggaggccctcactgcacttgggaagctcctgtacctcttagatgggatgctggrtgggcaggtgggagcacctgggargggttggggatgctgtggactaagggcanggacca

SEQ ID NO: 1764 - DNA, 370 bp, Homo sapiens
aaggggtggactggtggacaccaccatggataaattttagcttccatgtttaagattttgttatttgggtaggaaacattccaaatgcagtttgaaacacatattaaaattgaggcacacaggaaagaactggctcaagtttagtccccaagttccttatagtaggaataggaatccttagagtataagcaatccatgcatagtattctgttatctatcatgtagatcatttaatctctaattttttggggtggggattctcttgtttctaaatcttacactttcagtttcttctgtgtcttaaatatagattattgactgttgtcttaaatactaataaatacattaaatgtatcttaaatactaaaaa

SEQ ID NO: 1765 - DNA, 422 bp, Homo sapiens
  SITE (371): n equals a,t,g, or c
  SITE (386): n equals a,t,g, or c
  SITE (404): n equals a,t,g, or c
  SITE (417): n equals a,t,g, or c
caaaggcttctttctctttaaaaaaaattatttttaatatagagtcaaaaaattggatgtattattttgagcttctaattgctgccacttggagatgtccaagtaagaaggccttctttttacatgggatgaattgtgcacttctactgatgatgactacagcagaagtgatgttatacgtacaggcacttacactctttcacatattcacacgtgtgcacatctacaccagggctctgatctactctagatcgtttcctgacagagaagccttcttccaggccactaaggtagcatgttatcccactgtggcactgcctaaactccgtgtaacctcgggtgggccaacttggctaacctgggtggggtgnacttggggggctagnaaaggataaagccttttnctaaaatttggtnaatat

SEQ ID NO: 1766 - DNA, 324 bp, Homo sapiens
tcctagagtgtgtgaggaagtgcactggcctcatgcgcattctctgtgtgagatctgtagggagagaggagcagacagacagcatcccagccctgtggttctcccagcagggccttgctctgctagacccatctttatctgcgtgagccctcccggaagcccagctctggtcttctgtggggccgtgggtcccagggstgcctcctacccaggaatacagctagaacatgtctttttggactgactttcaggagacacagggtggaacagcctagcctttaaataaacacctcttacacacatgtaaacacacacactggctca

SEQ ID NO: 1767 - DNA, 483 bp, Homo sapiens
gccttctctgaatctctggtcctttccatttcccattctccaggctgagaactgcactctgatacacggttattcccaataataataatgtgtgtatcacacataatgcactgcacctcttcaccatgctggcacctactcctctgctccccctgccagcttcctcagccccttcttctaccctgatggttctctccttgcctcctcaggccagcacttcccatgatctgagatgtctctttccttttcacctttttctccagcagtgagttcctcctcctaactcaggcttccaggaaggatatcctctgcttctcagacctgaacctgcctcgaatactcatgaggacccaaggagctactcctcacctcccacttctcctctgtcctgtcacataaccaaggcacggccaactgatctccaaccatctgaggaaccaatcgtgtgtgggaaccgctgagcagaaaacctccccaagcgga

SEQ ID NO: 1768 - DNA, 497 bp, Homo sapiens
  SITE (7): n equals a,t,g, or c
  SITE (12): n equals a,t,g, or c
  SITE (29): n equals a,t,g, or c
  SITE (461): n equals a,t,g, or c
  SITE (466): n equals a,t,g, or c
  SITE (482): n equals a,t,g, or c
gcccggnagagnaggggggggaaattccngacccccaaacatcccatttaatttscaatgrcctgcaggtcctttttccccccwyccctatccctgtgaaaccttacctatccataaggttcctaaaacagagaacttgtgtttaaataaagcccgtttaactttggtccacttttcttttggaaattaacttgttagaaaacaaagttagttcccaaacaaaacaaaatctaagttataatttgcaccattacaaagaaattgctgtcagggttttacacattttaaaaacatttcaatttcaaatgtgtatatcgtcaataaatctacctttactgatatatctggttgagggaatatcagactccagatttcttttgcaagatgaaagtaaaaacgagtgggttaatgaatgaaaacaagcttttaggtccagtttttgatccacctctttcggttantagtnttttcctacatatctnaaaatttcttttaat

SEQ ID NO: 1769 - DNA, 238 bp, Homo sapiens
  SITE (106): n equals a,t,g, or c
  SITE (108): n equals a,t,g, or c
cacatgtaactatgttttcaccaaagaccaacatcaagagtgaggggaaaggatcttcaaggagcaggagcagctgcgcacgggaaggcataccccgtggaagtgngntgtgcccaccaagcccggcccccaggtcgctgccgcccccacctgcacacgtgtatgctgcatccagtactcaggagatgggcagtggctggcctgtgggttggccaaccatctgttactcgtttttgat

SEQ ID NO: 1770 - DNA, 343 bp, Homo sapiens
  SITE (221): n equals a,t,g, or c
  SITE (264): n equals a,t,g, or c
  SITE (325): n equals a,t,g, or c
ggatctccaatgagttcatcatgttgattgaaaaggattccaagaatgttgtattcaactgttcctgcagggatgtgattgggtggacatctggattagtgagtatcaaagtgttttacgaaagaggagaatgtgtcctcctgtcctcggtagacaactgtsctgaagacatcagggaaattgttcagcgattagtaatagtgacgagaggctgcgagacntgtggaaatgaccctgaggaggaacgggctgggcaagctttgncttccatgtgaattttgaaggaattgtcgcagatgtggaaccttttggctttgcttggaangtggccttcgccaaggga

SEQ ID NO: 1771 - DNA, 615 bp, Homo sapiens
  SITE (459): n equals a,t,g, or c
  SITE (569): n equals a,t,g, or c
gctgtggcccactctcccttcccggcgtggagacgagataacacggaagccaggggaggtctgaagcctgagtatgatgcggtggtgataggagcaggacacaacggactggtggctgcagcgtacctgcaragactgggggtgaacaccgccgtcttcgagaggcgccatgtgatcgggggtgcagctgtcactgaggagatcatcccagggtttaagttctcccgtgcgtcctacctgctcagcctgctgaggccgcagatttacactgatctggagctgaagaaacatgggctgaggcttcatcttcgaaacccctactccttcacccccatgctggaagagggtgcaggcagcaaggtgcccaggtgccttctgctgggcacagacatggcagaaaaccagaagcagatcgcccagttctcccagaaggatgcccaggtctttcccaaatatgangagttcatgcatcgcttggcattagccattgaccctctgctggatgcggaccccgtggacatggcggccttccagcatggctccttgctgcaaaggatgaggtcgctctncaccctcaagcccctgctgaaggcaggccgcatcctgggagcccag

SEQ ID NO: 1772 - DNA, 436 bp, Homo sapiens
atcagttcaatccagtaaacaattctctctctccctcttactcccctcgcacacatgcacacacaccccacagatataatggattttagtttttaggcatcaaatgacttttgtgccttattaatattatccactgaatcaaaaacagcaagctgaaaaattcatctcaaggaagagaaaataagattgttgggaatggtgagaaaggaaacatggtttttgaaaattgattccagggaagataggctagtttgaatgccagtagggagccatcagaagaagtagttttacactgatttttaacaatattggagttgcttaaggcaatgcaatagagaggcagtttctgcccttttaaagcctgacttcactttctgaatgtgtgttctgatctagcagggttttttttttttttcttttaagatggtcccagctt

SEQ ID NO: 1773 - DNA, 207 bp, Homo sapiens
  SITE (206): n equals a,t,g, or c
actgcagtaaacaggcaaccttatgaccttgtcctcgtgtgtgtgtgcgtgtgggcttgggcgggatggggcaagggctgagcaaagaatgagatgggggctgtgggacccgcttcaggcgcatggtgagcagatgatgcatccgtttctctgtctcccgtgtgtccgggtcaaggcggcctctggtctctggccctcttggtgant

SEQ ID NO: 1774 - DNA, 243 bp, Homo sapiens
gcgaccgccggatgcagtggcgctctgggcggcggtggggacaacggtttccctttgaaggggacggacaaagcccgagtgaccagcggcggcgcggaggactagtccccgggcagtttggtgccctggttgtcagatgttggaaagcagtaggacggaacatactcttcgtggttgtggtatccgttctggggtgcagcaattaacattggactttggttcctgtgactcttgcctgtttcg

SEQ ID NO: 1775 - DNA, 258 bp, Homo sapiens
  SITE (215): n equals a,t,g, or c
  SITE (256): n equals a,t,g, or c
aaagataaaaagaacccgggacattgatagcatcatggggcctgttctcctccaccctagtctacctacgtctaggaattctggttacgtgagcaaacccactctgcatttctgttattactgatacagtgaatggagccaggatttgaaccaaagctatgctgagtcattccttctcatccagagagctgctgttttctcctgcgctgacaggnattgctatgtgatatgttgggcaaacaattttactgttttncc

SEQ ID NO: 1776 - DNA, 436 bp, Homo sapiens
  SITE (277): n equals a,t,g, or c
  SITE (361): n equals a,t,g, or c
  SITE (419): n equals a,t,g, or c
  SITE (432): n equals a,t,g, or c
gtgaaagggctaatcctactctacagaagactccagctaaatcagacgcctgactatctccaacacccatagcttactgcgggtttgamctgctccaaagtaaaacgtataattaagtcctgttgagttaacatgtggaaggcctttcctaacgacagatctcctaatagatgaaaagactcatcaattacaaaaatatgtcatcaatctgggacagktgcaaaggcactccgtgcattatgggaaacaagagtcttcccctcccacatgggagganaaatttcagttttcagctcagctagggggtttagtctttacttaaaggacgtggggggggaagtttcttcccagcttgagcagnttttcccccaacgttgggaagggggacccacggcaagggacacctggaggtttttttncccaccaagacgntttc

SEQ ID NO: 1777 - DNA, 313 bp, Homo sapiens
  SITE (256): n equals a,t,g, or c
  SITE (280): n equals a,t,g, or c
aattcggcacgagaaatttttaaagctgcagcttttcttgagaaacatactattaaatcagtaacatagggctagtattctacttgtaattatgaagtaatagcatgtcctgggagagcttgttgcttataacagatcaaaatcaaataaaaaataaagaaaaaaagacttaattgaagatctagggtctgaaggtattatattgtctgggattcagaagacatcacatgggattgrttatgaaatrccaggtttncattaaaaggatgrgcccctgggngaacatctttgcccaaaaggcaggtgttattag

SEQ ID NO: 1778 - DNA, 629 bp, Homo sapiens
  SITE (25): n equals a,t,g, or c
  SITE (102): n equals a,t,g, or c
  SITE (585): n equals a,t,g, or c
  SITE (612): n equals a,t,g, or c
atcatgtaatatttacatggatttnctcattgtttaggagagagtggcagtggaactaaaacactcccttctcattaggacctggctgtggataaaaatttntccccaggtccatcccatcttatgcagtgacaatgacctgtaatgctatcctgacaccaactggtaacatactgcagtataattcccgggctaaccacccagagtcagcacagaccacacaagttccagggcatagtcctcaaaaagatgcccttacttcatacgccaactgctttttgggtgaccccaggccactcatactttggaccaaataggtacaaattcaggggttaccatcatcccttcagtttgataattcactagaatgactcacagaattcacaggagcacagtacttgccattacagttttattataaaggacacagatcagcaacagccaaatgaagagacacatggggcaagrtctgagtggggttttgaacgcagggcttctgtgccctgttctttgtgggatctggggtacattcacccttctggtacggtkatgtgtttaccaaccgggagctccattgagcttcanttgtccaagtttttcacaggggtttcnttacgtaggcttgattt

SEQ ID NO: 1779 - DNA, 398 bp, Homo sapiens
  SITE (340): n equals a,t,g, or c
  SITE (342): n equals a,t,g, or c
aagtatcacaacatatatgtgtttctaaataatacagtattactactaacaataagactgttaaatgcaatttgggcttttgttttccttgtctttaggacatatcccactagaatgtaatgtcaaaacactgtgcttaaagtcacttgaaagaatttttttgtgtcatacagccaccaacttaatagttaggtttttttgttctctaatgctaggattgcttttycttttattatttwttaattgtgttgagagtataatgtagttttatgtaggcaaaataaggtagagtcagaattttggcttctgtccttttcccttccatctacagataagcatntntattgttttgatttatattttgtttctttctaaaaatataagtaaatatatagatt

SEQ ID NO: 1780 - DNA, 816 bp, Homo sapiens
  SITE (16): n equals a,t,g, or c
  SITE (660): n equals a,t,g, or c
cagtacttctaactgntgggtcgggctttctgcctgagtttgtggtgaggtattgctgagaagaacacaggaatcattcattgctttcccttgcttggagatatggtacactagtggcaggccagtggccagcctcacgtcatctcacatccactgtgcagtagacagaaaggcaacatttgaataggaagttctgttacattttctgccaggtgaatgaggctgagagcaacttgtagtcctgggttgaatcttcaaagctgtcccagctgccatgagaagacatttagttgagatctgtgcatattcacatatcccacccatatttagctataagtgatgttaattttttattgttaatattctttaaaactaagcaaataatacagcttaaagttctcatgaaaaattgttaataaaggtgatgaaaatgatgaaaaaagtaaccttacataaaagaaagggtataatacttcagatttttaatactcatttcttaaatactcttttagaagtgaagaaatactaaatttttgtttaccagtgatttgaggaagattattcagttggtgaaaagttttcagaaaaaagaaattcactctttttgagacttacggcttaaatcagttaaaattcatttgtacaggcacaatgtatcanctgcagtctgaagctttctctaccactagaaagtgggtataggtctacattgtattattctatggttgccttcttggaatatcttctattaattacatttccttttttaaagcactttaacttacaatagaatttcagaggtacatttccacagca

SEQ ID NO: 1781 - DNA, 441 bp, Homo sapiens
  SITE (16): n equals a,t,g, or c
  SITE (29): n equals a,t,g, or c
gacccttggaactttnggtgtgcatactngaacaatacagcctaaaagttcggtaatctttttgccaatcaatacatagatattaagatgcttttattctgttgtccctgtttttgtcttctgtgttattctaatatgtgacctccactcaattagtcatcattattttttatggtagattttttttattgtagtaaaaaacataaaattttccatttcaccctttgtaaatataagttcagttgtgttaagtatatgcacattgttgtggaacagagccccagaactttttcattttcaaagctgaaactctgtacccattaaatgactacctgttccccagtcccggcacccaccattctccttgcacccaccattctccttttggtttctatgaatgggactactctggatacctaatagaagtggaattagacaaca

SEQ ID NO: 1782 - DNA, 469 bp, Homo sapiens
gccctgcctagaaaagacattttaataaccttggctgctaaggacaacattgatagaagccgtctctggctatagataagtagatctaatactagtttggatatctttagggtttagaatctaacctcaagaataagaaatacaagtacgaattggtgatgaagatgtattcgtattgtttgggattgggaggctttgcttattttttaaaaactattgaggtaaagggttaagctgtaacatacttaattgatttcttaccgtttttggctctgttttgctatatcccctaatttgttggttgtgctaatctttgtagaaagaggtcttgtatttgctgcatcgtaatgacatgagtactactttagttggtttaagttcaaatgaatgaaacaaatatttttcctttagttgattttaccctgatttcaccgagtgtttcgatgagtaaatatacagcttaaacata

SEQ ID NO: 1783 - DNA, 420 bp, Homo sapiens
  SITE (85): n equals a,t,g, or c
  SITE (265): n equals a,t,g, or c
  SITE (390): n equals a,t,g, or c
  SITE (420): n equals a,t,g, or c
attcggcacagggagcagagggcaagtragcacggcagtaagaagttgaaaaccattaattgtccgtccagaggaggcggatccnacaacattctgggcaaaggrgatggtgtgtgcaaaagccggaggtgtgagaatatagcatagtagacattcatcattcctttctcatgcactggagtgtctgtgcagccagggtcctcccatttcattcattgattcattcacctgtttatttcaccaaatagttaccaagtgctgggcncctctgggaatggggaaaaaacaaacagcattgttcctgcctcagagagttgcacagcctgtttagggaaatttgcagggacagaggcagttgagtttccttgggtgagggggcacacagggcantttggggaacctggggaacagagggacctn

SEQ ID NO: 1784 - DNA, 296 bp, Homo sapiens
tttcttttctttttacagtacgcattgcatttataattggagatacaaaaaaaggtgactgttactgtttgacagcaaggcagtagtattatcttcatcaatatttgcaacttcattcgcaggaaccagagatttattcgtttcctgttgctcttggaaacacccagaggacactggaaacatagctgtcatcccagcccccgccagggtccacggcccgcacctgcacttcaggccctgcccgcccgcgatgcgcccacgcatctgctcccacaactagggaacactggtcctcg

SEQ ID NO: 1785 - DNA, 778 bp, Homo sapiens
gatttcataatggccaggagaccacacaacagagacatttaatgagaggggtttcacgagggattttgttagaactttaacatcagtcattgcacaggagctaaggcttataaaatatgagtatggtcaggaatttaataaaagtacagtgatgagcatgcctaaatccatgttctctagaatgtaagcttggtgaaagaagggactttgttcattgctagtctacaaaactaggacatttcataacgcaatgtaggtgctcagtactttttgctaaataactaaaagtatgtaaaggtaaaaggtttgaaatttttaagcgcattttttaaaacttaaaatgtatttggaggagaaatcctgcaagtaatcttaataaaatcatttcaagtaaatatttgaaatgtagaacaataagcattatgatgatctgaaataacattaatttgattgtaaccctattggggttagttcccaccctttgttccatcttgagcagagatgtgctgcatttcttaacgtttggtctctatacattataccatctgctgaagtttagctttgtgtgtgtgtatatgtacccatgtgtgcactttaaatatcagtacaaactgataaacaatgtttctggttaatgttgcaaaaatggaacactgtattttacataattgattttctactcctgccctgtgaattaaggcagagttttactgtaatatttgcaagtatccaaaatggttactgatgacaaatactttttaataaatgtcaaaatcac

SEQ ID NO: 1786 - DNA, 569 bp, Homo sapiens
taacaaattgtattattacacattcctagttgctgcttgtaatagaacagatttcaatctcagaaatgtttatctgagagacatagatcaggtttacaaggacaagaggtcaaagtcatgccacagacgatccacaccacctatgtatgcactctctctcttgcacacacacacgcacacgcgcacacacacgctgagtctcatgtgcttacctcgtctgactgccgctggtgttatatgtagcttccatgcctggaagaggcacatatggtaacatggtgtggctaaagtaaagcaaaagtacaaaagcaataggtaagggcagtgggataacaggaaaggttttgatgttattgtgggtattagcacatgatagccccaagaagacaagaaatgtcagttactcagaaagaggaaagctttccaaccaggagagttatatttatgtgcccatcactggaatggaggcagactgacaggaagattattttctaacttgaatggaaagaaggcagagacagaaagaaagaacagtggctgggattataggcatcagccacttttttttt

SEQ ID NO: 1787 - DNA, 298 bp, Homo sapiens
ttagattactaaagcacatctttattttgcaattgaacattaagagtcatagctagagttgtttttcatgtttgtacctgaacaactgtttctcaaaatgaaatatggccaacaaaatatgtgtaacagcatttcacataatataaattgctcttaagactaaaacagtattaatgcaaaccagcatttttatcttgtttgctgtagttgtaatttttttgtacatgaatggcagaaattctaattttttcactaaaattaagacaaacacacaaggcctttcaagcatacagtaagc

SEQ ID NO: 1788 - DNA, 344 bp, Homo sapiens
  SITE (321): n equals a,t,g, or c
  SITE (332): n equals a,t,g, or c
agaggtccagcaaggctgagggtcccaggscaagagccagggcatgagctcaacttccagcaaggccgagtccacctgggacccagcccaagtctcagcaaaactgaggttgatcaggacctcacctactatgaagctgtctgaagggaccatccagaccctcccttcttgctggggaggggaygagttctacccacctccccacactggcactcagccagctgcctccttccagagcaattaaaagtcttagcaacaaaaaaaaaaaaaaaaaaaaaaaaaaaaaaaaaaaaaaaaaaaaaaaaaaaaaaaaaaaaaaanaaaaaaaaaanaaaaaaaaaaaa

SEQ ID NO: 1789 - DNA, 662 bp, Homo sapiens
  SITE (524): n equals a,t,g, or c
  SITE (552): n equals a,t,g, or c
  SITE (595): n equals a,t,g, or c
  SITE (608): n equals a,t,g, or c
  SITE (633): n equals a,t,g, or c
  SITE (643): n equals a,t,g, or c
gcgtgatccacccgcctcagcctcccaaagtgctgggattccaggcttgagccaccgcgcccagcgacctgcctcttattaattacttgtatctagtctaggcttgtcacaggcctgttcaaagtgggtgatttgcaatagcctgagcgtggctttcctgattaaagagaaataattttctaatgctaatagagcatgcaaaaagctggagttacagaaaacccctggcactgggaccaggagtgctaaaagcatgggaagagaacgttgggtggagagatacagcttattttcactaatgtggtgatttcacttaggggtgtggtggcttttacggcctttcacagagtaatgaagagccatctcatttctgggtgkttatccacaaaaaaatgaaatcgggaccccaaagaaatagctgcattcccatgkttattgctgcattactcacaataaccaagatatggaatctamccgkgtccatcaatgaatgaactgataaagacaatgtagtatgtgtgtgnatatatatatgaaggtaatatatatacngataaagtaggtgggttaggagtacgcattctggattggtagnttaattgcctggncctggaaaaggcaatcttttccagnaaaccccaanatgctagagcatgaagaaa

SEQ ID NO: 1790 - DNA, 544 bp, Homo sapiens
  SITE (434): n equals a,t,g, or c
  SITE (492): n equals a,t,g, or c
  SITE (516): n equals a,t,g, or c
  SITE (523): n equals a,t,g, or c
gtttgacggctctcctgaccctcagaatggcgcatgatgaagaaccggccattcatgggctccatctcgcagcagaacatccgctcggagcagcgtcctcggatccaggagctgggggacctgtacacgcccgcccccgggagagctgagtcagggtgggccttcggtagatccccggtctgatgtttcctcaacgctcttgggaatccytccytcatcctyccacactggtgatgtcctgggccctggsactgagagagggaggagagagaactcctgactgggaaggcgtcctgaggccaatagggctggttggagggagaaaagggacagcacgccaggcaaagacctggcagctgtgctcagccctggaccttggtcctcctcagccctgaaaagcctacctgaacctgtggctggaagcccccgacctnctcttggccgaaattgacctcccaaacttggtgagttttgcgcgctggaccagaacangggaatgaggtctggaaaggtcanggactgnctcttagtgtgaagtgaccaa

SEQ ID NO: 1791 - DNA, 877 bp, Homo sapiens
  SITE (5): n equals a,t,g, or c
  SITE (59): n equals a,t,g, or c
ctggngctccccgcggtggcggccgctctagaactagtggatcccccgggctgcagganttcggcacgagctaaaacctgtccaacaatgcgagcattgttctcaggcactatgcctacctccgagacagtctttctcatcttgttccttgccttgaggttgccaggtagaaaactggtgtcatcagctgtttctcccagcatcatacctcaagaggatccttcgcagcagctcctgcagcagagccttgaaggagtgtgtagtcttcagcacttggaccctcagggagcccaggagctgctggaattcaccatcagcttatgtagtccaggaagatacagtagatgaagataggaataccacgtgtgagtgagccaaatccagtatatgccgtaagtaccaactgctgttagctccagtttactcacctgggggacttggtgacttgctgggtgcaggggtgggagtgaggaactgagagataaatgggtggtctgatactctagtaatccactaaaaagttgagggtgtcctgggctcccctgggagtgccgtggcttgggctggacaggtcgtggggagaatgctgggtaggtgggtgcagctgcagccacaggggagccagagtgtgcagcatgtgtccagcgtgacgctcccgagcttccacctgggtcacatagtctttgtgcccctgggaagcctctagaagccacacagaggcccatagcaactctcatgccctggagtgtctcaccagccactccagtgatgggccctccagtggctctgggacccaaacagggatgattcacaaagtccctaccgagcacaggccttcacagttcaacaagaaaatcctactgttgactggattttt

SEQ ID NO: 1792 - DNA, 529 bp, Homo sapiens
  SITE (391): n equals a,t,g, or c
cggagtcgctgcccctggagatgctcacatatattctgagcttcctgcctctgtcagatcagaaagaggcctccctcgtgagttgggcttggtaccgtgctgcccagaatgcccttcgggagaggctgtggctaccctgtgcttccagcaaccaggccttacctccctggacctcagtggctgctcagaactgactgatggggcgctcttggccgtgagccggggcctgcggacctgcggcgcctgagcctggggaagctgcagcggctgacagatgcaggatgtacagctctgggtggcctgcaggagctgcagagcctcgacatggccgagggcggraactggcccaggccctgggytgtatgcacggggctccatyccagctggcctncctcagcctggcccactgctcttcattgaagtcacgcccagagctggagcatcaggcctcaggtaccaaggacgcctgtccagagccacaagggccccttcctgctcacgctggcgggcccttgcaggagttggacct

SEQ ID NO: 1793 - DNA, 673 bp, Homo sapiens
  SITE (323): n equals a,t,g, or c
  SITE (553): n equals a,t,g, or c
  SITE (599): n equals a,t,g, or c
  SITE (617): n equals a,t,g, or c
  SITE (643): n equals a,t,g, or c
agaggacagccagaagtgagccctcaccatctgccaaacagcaccaaaaaagccaagaagcgcaagagcctgggggctcccgtgctccacgctgtggccagcatggtgtctgcacccttagagacattgaggctggagcgtgagtggcagtccctggactgttccttctccccctgcctgtggggcccgacatggcacaacctggcgctctagcctctgccctgccctgggtctttgcaggaaaggcccagcgcctgcggccgctgtaccagtacgtcaactattgcaaccctgagctgaaccaggcagggaagggggacggngaggctgaggtggaggcagaggcagagctggccccggttcccgaggagggaggtgtggagcaactgcaggccttgctgcccttggcaggtgagctgggcccaggcctcgctttgccctgtcccagtccactagtgacccccacccatgccctggctcccctcggagaggaggctggagaggagcctgggggcttgcccagctttgggggtgaagtgaccacaagggccangtggataaagtcaacccaggtggacatcgacaagaatgcttaatgnctgcactggttcacttgnccccccggttttttcttaatacaagngactgtcccgcccaattgggggttcccttc

SEQ ID NO: 1794 - DNA, 726 bp, Homo sapiens
ttttttttttttttttaactgatcagcctttgtataatgttttttaaatcatttctaaataaaacagaaatacagagtgtgtcatttccctgggatgagggaacaaagatcaggttccaagagtaaccttaggacgctctgggaagagaaccgggtcctttggggtgtctgggagctgcccacccatttcctttgccagaccggcggtcagatagcctccytytacamcaggctggccctgggggcccagggttattggggttccaggaacacagcctgatgatgcctccttacgatccaggatggagagcagcccccccaggagtatggggagggtcactgtggcacgggcttctccatgacctkggacatgaccaggaggcctgtcctgcctytgaagccagcgacagagagggatgcccccgacccagccagccggagaaagggatggggtggtcacgaaggtctgagctgggtctgggtgtaggctgggaagcaggctggggtgtagactgcgaaggcggccctgccgggacttctttccagtccccggcgacctcttcgaattctctgctatctctggggagcctcgggtgggagggggtgtaagagacgcagggacgtggggagaggagacaaggcaggcaagaaccacaggggacggcggacagacgggcgacatcctgcggaggacgccgtcagtaccaggaagtgcaggcgatgagc

SEQ ID NO: 1795 - DNA, 1141 bp, Homo sapiens
aattcggcacgagccaggaggacactcataaggacagggccccagccctgggagtggagggtgtgagcagaggccctgggactagggcctgggatggacaaccctccttactgaccctccagagtgcctgggagctgagggccggctggctctcaagctgttccgtgacctctttgccaactacacaagtgccctgagacctgtggcagacacagaccagactctgaatgtgaccctggaggtgacactgtcccagatcatcgacatggtgcgttgtggtggtggtacagctgtggagtcttacctgtcacagtgtcaagaaatgaaggggatgaacggaaccaggtgctgaccctgtatctgtggatacggcaggagtggacagatgcctacctacgatgggaccccaatgcctatggtggcctggatgccatccgcatccccagcagtcttgtgtggcggccagacatcgtactctataacaagtactgcctatctgggcccctcctctctcttacccctctctagacttgcccttagctgtgggggtgtagtgatcccctctccctaccacataacctggttgccacgctgccctggaagcttttccccaggacccttctaagctgccaagcactcagcccctccatggcacccccactttaggctatcccaggccagcccaggctgaacgtctcctcggaacctactgtgtggtccagggcagatgtctgaatcacaagggcctctctagggcacacttttagctctaagtctctcagggctcccccaagagcctgtctaagggtctctttcctccaggacatagccctctggaacactgctttatgtctccttgaccagttccgtgtctcccagccagcacatagctctgcatattttctctggggcccttctacaagttttgcagatgtcccccaagggaagtcactgtgtgtcccggagctacctctgggttctgcagaggcctttttatacatcctctggctacgtctgtgtcccttctgggcccttcaggcaccaccccttccaggcctcgaaaggcagcgggtctctctaggtgcactccaccctctgtgttgctttgttctgaaaacaaaaaaaaaaaaaaaaaaaaaaa

SEQ ID NO: 1796 - DNA, 1031 bp, Homo sapiens
attcggcaagaggattaaggcgtgcacgcgcacctggccattttacctttagggaatacagagcttagtcatgataggaatgaatgtgcttgtccttgtactaaactgctcagagccttagcagatgctggggcagctctgtaggaaaggaaatggtgaggtaagtgggtcagggatcaaggcagtctgggaggggtgtgggggtgaggagtgacatcagttgccaacatgccttcctctgtgccccaggtccacgtgaacttgctgctcctggaggcgcgcatgcaagccgctctgctgtacgccctccgtgccatcacccgctacatgacctgactcctgagcaggacctgggcccggttcagctccccacaaggacttctctgtctggagacagccccagacccttttgtgtcccatgcccaccctccccacgctgcagtgggcttgtgtgtgatgtgcagtcccgaagccacaccctcccttttcctcactggaatggacagttcattgcactgactctgggatctcagccctgctcctgggagctggaagagcacttggagatcctaagggaccacacccttcctccttcccctgcccacagaggcagagggcacaggaaagaagccgggccaagctcggaattaatgtgccacaagtgttgtggccttcctgaactgggaagtccctggctggcccccgggggagaggggcaaatgcctccgggactgacactccaggcagctttgccttctctcccctgtcatttccagatttcattacctcctacttgccattcacccatcaatgtgaaagtcagggtcacagctggtctgtgtgtccagttccctaaaagcctgttctgttgggcagcctgaggctgttgcccgaatcctagttcagttttttgacttcctttgccctttttcccttttctccatgcttaatggtgtgaggcgtcaggagagaggccaagtacataaaaaaaaaaaaaaaaaaaaaaaaaaaaaaaaaaaaaaaaaaaaaaa

SEQ ID NO: 1797 - DNA, 375 bp, Homo sapiens
  SITE (370): n equals a,t,g, or c
gagccacatgcccccgagctggatccagtggtggagcacctcgaactggcggcaaccgctgcagcgcctgctgtggggtctggaggggatactctacctgctgctggcactgatgttgtgccatgcactcttcaccactggctcccacctgctgagctccttgtggcctgtcgtggccgcggtgtggcgccacctgctaccggctctcctgctgctggtgctcagtgctctgcctgccctcctcttcacggcctccttcctgctgctcttctccacactgctgagccttgtgggcctyctcacctycatgactcacccaggcgacactcaggatttggatcaatagaarggcaaccccatccactgctgngtctg

SEQ ID NO: 1798 - DNA, 568 bp, Homo sapiens
  SITE (387): n equals a,t,g, or c
  SITE (394): n equals a,t,g, or c
  SITE (461): n equals a,t,g, or c
  SITE (519): n equals a,t,g, or c
  SITE (567): n equals a,t,g, or c
gcccccaaggttatggtatcagaagtggggcttttgggagatgaccaggggtggaacctcatgagtgggattagtgtccttataaaagagaccccagagttctcccaagcccctccaccatgtggagacccagtgagaagctgtctgtgaaccaggaagggatcctcactagagagcgagctggcaccttcatcttgggcttccagcctccagaactgtgagaaataagtatctgktgatgaaccacctgtctctgctattctggtggggcagtccagatagacaaagacatgcccgttcccgcgggccaccacctctgcctgagcacagtgggtgaagtctcggttcccttatcccatccctgctggggtccagccctggcttttnctgaggnaagtttcttcaggaccaagcagacacccacaaccagcagccttaagcatggacgcactcgtcctgangcctgggtgtcccgctggaagggcatgtccacagctgctctgggtcctgacgcttcangagcttacgctggctggagatccccatttcctgggaagccccggctgng

SEQ ID NO: 1799 - DNA, 484 bp, Homo sapiens
  SITE (454): n equals a,t,g, or c
  SITE (462): n equals a,t,g, or c
  SITE (476): n equals a,t,g, or c
cctcccatccagctcggcagcctggtgacgcaggaggccccggctcaggacagcctgggcagctggatcaactcttcccctgacagcagtgagaacctgtcggagatccccttgtcccacaaagagaggaaggagatcctgactggcaccaagtgcatctgggtgaaggccgcccggcggcgctcgcgggccctgggaaccgaggggcgacacctgctggcacccrcgacagagcrcagcagcctgtccctgcactcactgagcgagggcgacgatgcgcggccaccaggcccactggcctgcaagcggccgcccagccccacactacagcatgctgccagtgaggacaacctgtccagcagcacgggcgaagccccgtcccgggcaagtcggacatcatggggacggccccaagccctggcttgctggcccagaaagaaaaagctgggcaaanaaaagggnaaggaagtccttgnaaggcaaa

SEQ ID NO: 1800 - DNA, 957 bp, Homo sapiens
tttttttktttcacagggtcagactttattagatacacggagggctgaatggggccttggtgcccttggtcctcttcagcctggagacagcagactccacaaggggctcccagggttcagagcaggagaacacacctgacctccggccagccagcccttcagggtgtctcggggactccycgagatctggggcctggttgggagggttgggtttggagggggtgttccagggggcctccgtggctctggaactagactgatgacttttggagaatgagctccagagaaactggcctctttgggccagggcaaggcctgggcttcagggaggtagtgacctgttttggtgcccgaggtggaggcccggagaaacatcgtggggagtttggtgattgaaggcctgcagacctgaagctcctggtctgggagggtgtgcctgggactgggtcggcccgggcctgagctgctggaggctgagatgctggcaattgatgcccacaggcctgagtagccttgccctgaggccctgcttccttcggccttttctcgggcagcagatgcaaggccctggcctggccctgaggcagcggaggccgaagccgatgcctatccggagtggcccagattcctsgccctgcacacagggcagtagttgagggaaagcaagcagccggggtccagtcctgtacctggggagggggcaggaggggctgcggggccggaggcacaccaggcatataggatactccmcgactggggcctggccggttctgcctagccacaggtgstgcaaaagcagtagccgcaggtcgtgtgcgatgcggcggtgccccagctggaccaccagggcctgggccagggcccctgggtccctgaactgtgcaggatccttctcgcttggcacgcatctctccaccactccaggggacccggacccagtgtccctgtactgatgcc

SEQ ID NO: 1801 - DNA, 548 bp, Homo sapiens
agtgaaactgcgaatggctcccactctcagaaaaaaggggctgtgagccatgctgccttacctatggacagaccttcgcagacgggacggacctttgtcgctcggctctgggccacgccctaccggtggctgctcctggagcccgtcactgcttcaacatctccatctccgcggtacctcgtcccagaccaggacgacggggccgggaagctccctcccggcgttcccgcagccctcgcacctccatcctggamgctgcgggcagcgggagtggcagtggaagcggcagcggcccctagcggacgcgtggccctgagttgggggagcgacccttcccccagccccgcccctcaggacacccagaaccccacccctcgtcctctcggccttctgtaatagttttgagatgtctgtccctcctccctggagctccagagacccacccctctccaggttatcccagaaatgacccaactctctcacttttccctctcccctttgaataaagtcgccagctagagcaaaaaaaaaaaaaaaaaaaattctgg

SEQ ID NO: 1802 - DNA, 477 bp, Homo sapiens
  SITE (476): n equals a,t,g, or c
  SITE (477): n equals a,t,g, or c
accaacaatgcagatggtaatcctggcatgcgagtaggtgagatcatccagggagatggcctataatgagagcctacamcatgtcagtcagatctccaggctctcaagatctccaacctgaccagagatcatctcattcatgggtaaaatggactttacccagtttgaacttcacacatgattttgtgctgtgtgtagtgcccttttaagtctctcacatcctgctgaccctctattcccactgtgccagaccatgacttcagctcacttctgtcctctattagagcagagaagacagtcatgggatagaacaagttctcccaggacaaatatacagtgtgactgtggctaccaggagatttttctccccctgattgtattgcatctctaaccttgaaaaaaacacattcgttcgatcattttaccacttctaactaccaccctatttattatcttctactggacttattggcaann

SEQ ID NO: 1803 - DNA, 498 bp, Homo sapiens
ccgaacagggtgaggaaacccgacgcagagtccggagaaggcagcatggaatccctccctcaggcctctctggacggtgttggtgggggatcaagatgaacacactgcagacgaggacacgagccccacaggagctctttgtcccrccggagaccagcggacccacgtcagagaagatgcttgtatcttttcayggctcttctctgagaaatgaarccacaccacaatacggtctggaagaggaagcygggaatgggagatggcaacagtccctgtcactggaatgctggcctctctggacaagccacccttttggaaccccatcccttatgaccctggcagtggaacggtgatmtatccygcctggccgccggcgtytgccctgtcctccctcctgctctgcctcacctgtttcycaagtgcctcaatgcctctcgctgacgcccaatgtcttcaacaaagatgacttcccagtccgtcagggagacattacttcga

SEQ ID NO: 1804 - DNA, 310 bp, Homo sapiens
  SITE (4): n equals a,t,g, or c
  SITE (302): n equals a,t,g, or c
cagngatcacgggcgaccccaacatccccgctgggcagcagacagtggagatcgacctgaggcatcggatccagctgcccgacctcgagaaccagcgcaacttcaatgagctctcccgcatcgtcctggaggtgcgcgagagggtgcgcaggagcagcaggaaggcgggcacgaggcgggcragggtcgtggccrgcagggcccccgggagtcccagccaagccctgcccagcccagggcagaggcgcccagcaagggcccagatgggacaactggtgaggatggtggcgagcctggggatnccgtagct

SEQ ID NO: 1805 - DNA, 416 bp, Homo sapiens
  SITE (104): n equals a,t,g, or c
  SITE (312): n equals a,t,g, or c
  SITE (316): n equals a,t,g, or c
  SITE (388): n equals a,t,g, or c
ggcacgaggagggtggtactggggcggtaagaggctgtgagctctccggccacacccgctccttcacctttaaggtagaggaagaggatgatgcggasacgtgnctggcactaaccatgctctgcctcaccgagggagccaaagacgagtgtaatgtggtagaagttgtggcccggaaccatgaccatcaggagatcgcagtccctgtggccaacctcaagctgtcctgccaacccatgctcagtctggatgacttccagctccaaccacctgtaaccttccgcctgaagtcgggttctggccctgtgcggntcantgggcggcaccagattgttacgatgagcaatgatgtttctgaggaggagagcgaggaagaggaagaggacantgatgaggaagaattgagctgtgccccc

SEQ ID NO: 1806 - DNA, 424 bp, Homo sapiens
  SITE (131): n equals a,t,g, or c
  SITE (362): n equals a,t,g, or c
  SITE (389): n equals a,t,g, or c
catgccttgccctgtcctgctgggccctgccctggacctgggctggagaaggatggaactcttgcaccggagcagcgagagaaccctgagctacgccaaggcgcggcaggagccggaaagagcagagcctncaaaagctttatcaaaaccgggagaagtccgaggagcaactgaccctgaagcaagaggaagccttccgcagctactttgagatcttcaatggtcctggtgaggtggatgcacagagcctgaagaatatcctgctcctaatgggcttctctgtgacgstggcccaggtggaggacgccctgatgagtgctgatgtcaatggagatggtcgtgtggacttcaaagacttcttngctgtgatgacagacaccaggcgcttnttctgctctgtggaacagaacgccctgtcggacat

SEQ ID NO: 1807 - DNA, 433 bp, Homo sapiens
  SITE (240): n equals a,t,g, or c
  SITE (323): n equals a,t,g, or c
  SITE (405): n equals a,t,g, or c
  SITE (426): n equals a,t,g, or c
ggcacgaggtcacgccgtccttgcagggacactggccggtggtttggttgcaggttttgccagcagcacccacagggtggcaatcacaggctgcagagarcacaaaatgggagggtcagacaagggggaagcggccagtgcatccccgcagagccttccctacccagggcttgcctccatggaccctgccctggaggaagagcagcgatggggagcaggcccagccaagcccaaacgcantccggaagttttgacattggccacccaccttaccttggaaacgggagattaaaaaccaaattggacccgaccttggaagagantgtttttggcagcagggaaagtggaattgcagaagttttttttggaagccccaggaggagttttttcaaattactttttttngggaaggcagagccccttagnccttaat

SEQ ID NO: 1808 - DNA, 439 bp, Homo sapiens
  SITE (383): n equals a,t,g, or c
  SITE (405): n equals a,t,g, or c
  SITE (420): n equals a,t,g, or c
agggaaacccggcgtcccctctgtggtgaaattccaccccttcacgccgtgcatcgcygtagccgacaaggacagcatctgcttttggactggagaaaggggagaagctggattatttccacaatgggaaccctcggtacacgaggtcactgccatggagtatctgaayggccaggactgctcgcttctgctgacggccacagacgatggtgccatcagggtctggaagaattttgctgatttggaaaagaacccagagatggtgaccgcgtggcaggggctctcggacatgcttgccaacgacgcgaggagctggggatggtggtggattgggagcaggagaccggcctcctcatgagctcaggagacgttgcggattcctnccgattcttgggacacagaccntgagatgaaaggttncagggacattcctaacggg

SEQ ID NO: 1809 - DNA, 319 bp, Homo sapiens
ggcacgagcccaacacatagtaggtgctcaaaagatatttatgagtgaatgaatgcatcatgagaagaaattggaccagatgaggccctgtgaagctgcttgggtcttttttgttcttttttttttctctcttctgagtgtccctggcctggactagaaattctccatccttcggccttctgcgagactgcaggaacattacttttgaaggatgcttttcttctttccatttctcctcttctccttcccatctagtgcagcatcttcactccgaagcagaaatttgccaaaaaagcatcctctttttatcagaaaataa

SEQ ID NO: 1810 - DNA, 365 bp, Homo sapiens
  SITE (124): n equals a,t,g, or c
  SITE (357): n equals a,t,g, or c
aggccattacaccatcggcaagagatcgtcgacctggtcctgaccggatccgcaaactggcgatctgtgcasggactgcaggcttcctcatcttccacattttggggtgcactgctctggttgnatctctctcatggcgctctcagggattaggcagagtccagctagaatttgccatttacccaccccccagtctcaggccggtggagccctacaactgcatcctgaccacccacacgaccctgaacattctgactgtgcttcatgtgacaatagcattatgcatattggcgaactgacatgagcgtccagtacacactatgctatggagtgtgtctcataggctctcgttacggnctattgct

SEQ ID NO: 1811 - DNA, 601 bp, Homo sapiens
  SITE (30): n equals a,t,g, or c
  SITE (40): n equals a,t,g, or c
cctaccaagaagccagtcaagcggccaggnacgaccgtanaggctcagaacttctgaaacagtattccagcakrgttagatggraaaaaggggggctctaacctcattcctctggaaggtcacgagcatgatttccgagttaagcacctgtccgaggccttgaacgacaagcacgggccgctggcgggagagatgacatgctggacgtggagaccgatgcctacatccactgcgtcatgccttcgtcaagctggcgcagagcgagtaccagctgctggccgacatcatccccgagcaccaccagaagaagaccttcgactccctgatacaggatgccctggatgggctgatgcttgaaggggagaacatcgtktctgctgcccggaaggccattgtgcgacamgacttctccacggtgctcaccgtcttccccatcctgcgacacctcaagcagaccaagcctgagtttgaccaggtgctccagggcacggctgccagcacaaagaacaagctgcctggcctcatcacatccatggagaccatcggtgccaaagcgctggaggacttcgcagacaacatcaagaatgacccggacaaggag

SEQ ID NO: 1812 - DNA, 717 bp, Homo sapiens
ccaatgaccggcaaggaagtgagttgctgatgccagtgggggccgtgtcacagaacattggttgctacaggctgtccagcatctacttactcaagggacagcactggacttccatctggagagccccctcccctcactctcagcacctgcttgctaggtgggcggacccatccccctggctcctgggagaacagaggactcaagcttggccgatgacagccctatgtccccagaccccagtgatcagtcagggaaaagcagaggacccacatgaacccaatcagagatcagaattttgcaggaactactgagtaaaagaacagacrtcacgtaagggtcagggctgctggtcttgtccttccccatcccacatctgagaaagaaaaacaaacagggtcctggtgaaagccagagccaagggctaagagaaccgtaccctgatcaagacagaatgctaaagagcaccgtgggaggatgaactcagagaaggggaagtgccagaggttccggctgaggaatcccctgaccctgccctgcaactgctgcagctgcctcacaggagaggacagagccaatgacgagacctgggcccacctgagcccgaccatgggggatcgacacctgatgagtctgaacgctgagtaagtccttctgtgggtttttgtcctaagccacctccctagatctcaaatcacaaaacacagcatttgcattttg

SEQ ID NO: 1813 - DNA, 137 bp, Homo sapiens
gtctccactaggtgcgctccaacgcctggcgtgggcgtgtcttttgaagatgagaatgtttcattgagctacgctctgaatgcgggagggcacggatggtccaagatgtgccaaggcgtgcargctcggtcttgaga

SEQ ID NO: 1814 - DNA, 450 bp, Homo sapiens
  SITE (363): n equals a,t,g, or c
  SITE (387): n equals a,t,g, or c
  SITE (406): n equals a,t,g, or c
  SITE (423): n equals a,t,g, or c
ctgggtagattccagtgtctacgctgtggccatgagttcaagccagaggagcccaggatgggatttagacagtgaggaaggctggaggctctgttccaaaagacagaatctcctgctgtgtgtcctaactgtggtagtgaccagtggttctcctcgctgtgtctcggggaaccccaacagggagcggaaacagggagagcagtctctggctccttctccgtttgccagccctgtctgccaccctcctggccatggtgaccaccttgacagggccaagaacagcccacctcaggcaccgagcacccgtgaccatggtagttgggagccttcagtccccccccttgaggcgctgtgggcctccgntcttgtgggaccaccgattccggntttttcctggggatgtttnaggtgtttcagcgattncccaggagggaatttccattgttgctt

SEQ ID NO: 1815 - DNA, 287 bp, Homo sapiens
  SITE (272): n equals a,t,g, or c
  SITE (279): n equals a,t,g, or c
ggcagaggggagggtctgttggggagagagcagggagggattcttggaagtggggaaggtgccagattgagtcttctccaatggttatggcttggtcttgggagggctccccctgttccaggattctggagcctcccgccttccctgcaggcctctgtggaggagcaggcgggggcttttgcactcctccctcccccaaccctgcagccttgggatctgtggaaacagcccctctattgttctgcctccagttggagtgtgagccctcgganggcctgnagctgctg

SEQ ID NO: 1816 - DNA, 332 bp, Homo sapiens
  SITE (318): n equals a,t,g, or c
ggcacgagggtccctgagatgaccgggaaccggtctgggggaggatagagccgagactggaggatcgattggcacctccgcccacttttcccacaacgccttcccgaacgataggttggaaaggctcctggatccaaactcgctgagggccaggcaagaaaatgtcctcaaatttattgccaacactgaattctggaggtaaaaagaaatcaatcaatatattcttgtttgggcctggcagtgttaggctccataacagattgtgagcataagaaaaggagaatgttacaccataaatataaaatgtaatgagtttanaaactacctgcaag

SEQ ID NO: 1817 - DNA, 443 bp, Homo sapiens
aggatttacaccatggacatcagcaaatgcaaccaagacctcccgctaccctggagagctgggtttaagacatttgccagcacaccactgcccagggaccagtttcagctccagagctgtgggttattggtaaaggatgtgatttcattgagcctcagtttctgtatctgtaaagcaggaatctatcacttatgaaatatcctgtgcaggcacaatcttaggtgtggaggatacaatacaacaattgggacattggctttttcctgcctctacactacaactacaccatcaagccttcagacatggaaaggaaccacactattggctctcctcggtcttcagcttgccaactcaatgcagatctttgcatttgtcagccttataaccatgtgagctaattccctaaaataaatgtcctcatttaaatgtaaaaaaaaaaaaaa

SEQ ID NO: 1818 - DNA, 143 bp, Homo sapiens
  SITE (95): n equals a,t,g, or c
ggcagaccttgggtgcagacaagtggatgattaatgaagtagcatctaaaaaacccaaggaaccaaatgtaggtggagcaacttccctgcaacanacgtcgaagctgctgcagtggctgttccttcccctccccttgggaagg

SEQ ID NO: 1819 - DNA, 219 bp, Homo sapiens
  SITE (103): n equals a,t,g, or c
  SITE (197): n equals a,t,g, or c
tgtaacgggcaccatcggccccactcacaacttkgagcccccgcactacgatggcatcgagtgtctcgccatccagggagacatcctgttcagtggctcccgngaataacggcatcaagaagtgggacctagaccagcaggagctcgtccagcaaatccccaatgcgcacaaggactgggtgtgcgccctggccttnatcccgggccggcccatggtgg

SEQ ID NO: 1820 - DNA, 250 bp, Homo sapiens
  SITE (81): n equals a,t,g, or c
tcctctaagcaagttaatggaaggacccagcctcaagcagttcccttgaactcttaatccagtgcttaggtccgtgaagtnttgccttcctttcttacctccaggcagcgttgcctgccggctttatctgccagcttattctggagacccccatgaaattgccgctggcaacgttcttccttgctggctcctgggatggaatgaagccctggcctttgggattctcccaggtagctttggtggatctttt

SEQ ID NO: 1821 - DNA, 446 bp, Homo sapiens
  SITE (86): n equals a,t,g, or c
  SITE (219): n equals a,t,g, or c
  SITE (417): n equals a,t,g, or c
cacgtggtatttcgctatcaggcagggcgtgaggatgagctgacaatcacggagggtgagtggctggaggtcatagaggagggagntgctgacgaatgggtcaaggctcggaaccagcacggcgaggtaggctttgtccctrascratatctcaacttcccggacctctccctcccaragagcagccaagacagtgacaatccctgcgggcagagcacnagcattcctggcacaggccctgtacagctacaccggacagagtgcagaggagctgagcttccctgagggggcactcatccgtctgctgccccgggcccaaagatggagtagatgacggcttctggaggggagaattttggggccgtgttggggtcttcccctccctgcttggttggaagaactgctttggccccccanggaaacttgaactctctggaccctgaaca

SEQ ID NO: 1822 - DNA, 676 bp, Homo sapiens
caaatacctgttgcctataccagatggccataccaatacccaaatactgacaaacgtttaaaagaatttacggtactcccttcactttagaaatgttaacagttcaagtccaacagaacttaaaggaaaaaaagagaaatgttaacagtaagtaaggcatttatttaacataatctcaactaaagtccaactaaagagcttcccaggcaaacactccttttgcacttcattttgaagacaaaagaatgcacaagttaaaatcctaatattaccattttattaaaaataacttttaagatccaatctgtggccaatattcgatctggatgcaaaaccctggcttccagacaggccagccaggggcactgctctgaaggtcattacttaagtatcccagtctcctcagtctgacagacctacccctgcccagccaatctccacataacagctagttgttcataataaatcccatcagatccccgcttaactactccccttcaaaggctccactgccctcaggaaatagttcaaccaccttctgtagaaaggccttctaaaacatctatccgagtctgtcagctaatctataccacttgacaatccccaggatcactagccaggtaaacttacacagacaattcctgaacaatgccacatacaataaaccaaatgcaaa

SEQ ID NO: 1823 - DNA, 725 bp, Homo sapiens
  SITE (677): n equals a,t,g, or c
  SITE (701): n equals a,t,g, or c
  SITE (709): n equals a,t,g, or c
ggcacgagaggaaaggaaagaccgacagtccctggatcaagccagccaggaaaaggaggcggagaagtagaaagaagcccagcggtgccctcggttctgagtcgtataagtcatctgcaggaagcgctgagmagacggcaccaggagacagcacagggtacatggaagtttctctggactccctggatytycgagtcawaggaattctgtcttcacaagcagaagggttggccaacggtccagatgtgctggagacagacggcctccaggaagtgcctctctgcagctgccggatggaaacaccgaagagtcgagagatcaccacactggccaacaaccagtgcatggctacagagagcgtggaccatgaattgggccggtgcacaaacagcgtggtcaagtatgagctgatgcgcccctccaacaaggccccgctcctcgtgctgtgtgaagaccaccggggccgcatggtgaagcaccagtgctgtcctggctgtggctacttctgcacagcgggtaattttatggagtgtcagcccgagagcagcatctctcaccgtttccacaaagactgtgcctctcgagttcaataaacgccagctattgtccccactgtggggagggagagctccaaggccaaagaggtgacgattagcttaaagcagacaccacttcgnaccgtggacaccagttccccgggncagggagnaaggggtttggccttt

SEQ ID NO: 1824 - DNA, 576 bp, Homo sapiens
  SITE (70): n equals a,t,g, or c
  SITE (84): n equals a,t,g, or c
  SITE (234): n equals a,t,g, or c
ggcacgaggtgctctgtacagagaatggggtggtcgtgggggcccatctaactagacagcccgacctgtnagtccctcccagtntcgcctcccttcagtctcttttaagggctggggccaratgccccttgatctcctgcartctcagcaacaaracgtgggatttccccccccartgttgcagatttcataaaggaaactgctccggggctaagagggaacaagtggggtccnatgctgaatggggcccttgaaagatccactggatgtgcaggtgccctgccccctggctcccagccctccctttctttgcccsggctgcggcccacttaccccacgccttccctcccagctctgcatcatcccggtcgtgctccccagccacagccctcccaggcagagagctctctggtcccacctctcctggtgggtcacttctggaaaacaagcagggtccccaggtcaaagctctgtgggcctttatggcacccttgaatgcccactggccacctttctcaatggaaagccaataaaacccaaacccagaatgtccaccgtgaaaaaaaaaaaaaaaaa

SEQ ID NO: 1825 - DNA, 446 bp, Homo sapiens
  SITE (401): n equals a,t,g, or c
gaattcggcacgagaaatccccagcctcatacacgaaggatggttttttatcactgtgggtcttctctacttttatttttccttgctttccaggaggctgtccccctttgccctcgtgtgaatttgaaatttctactttgtgcttctgccgtcctgtgctgctcactgctttcttttctctctggtaggtcagcaaaactggtgccgagggagctgttcttgacgagctaaaaatatcaataagtctttgtctgctcttggraatgtkgatctctgctttkggcagaagggaacagtaagtgatccctgscccccatcctattaagkkaatattatgaaaaaaccacccttttggggcctccataatccccttttgccacacacccccaaaaggctggttntgttttccctgttttggaaaaaagaacaaaaggaaatccctggct

SEQ ID NO: 1826 - DNA, 167 bp, Homo sapiens
  SITE (165): n equals a,t,g, or c
agggaacaatattagcaaaggcactgakgaaggaataatcttggcctgtttatcgaacgagcccatcgggtaggcgcgggccatggcgcagtacaagggcaccatgcgcgaggcaggccgtgycatgcaccttcctcaagaagcgcgaaaggcagcgggagcagnat

SEQ ID NO: 1827 - DNA, 228 bp, Homo sapiens
  SITE (146): n equals a,t,g, or c
  SITE (210): n equals a,t,g, or c
agctggtgtcccctcagtccccagggttaggtattgttggggcagcaagggcattaagaggtcggccttctgagccgggcgtggtggctcacgctgtgaatcccagcactttgggaggccgaggtgggcggatcacttgaggtcangagttcgagaccagcccgaccaacatggtgaaacccgtctctacttaaaaaaacaaaaaatttngccgggcatgctggcagg

SEQ ID NO: 1828 - DNA, 465 bp, Homo sapiens
  SITE (427): n equals a,t,g, or c
  SITE (432): n equals a,t,g, or c
  SITE (455): n equals a,t,g, or c
tcaagcaggagctggctatccatgacagcctgaccaaccgcacctttgtgacctatgaccccatggatgaaatcagaattgctgagatcaactcccaggtgcggaggtacctggaggggacactggacgagatcgacataatcagccttagacagatcaaggaggtgttcaaccagttccgggtggttctgagccaacaggaacaggaagtggagtccactttgcgcagaagtacaccctcattgacaggaatgactttgcagccatttcttgctatccagaaggcggggcttgtggatgttgatggccaccttagtgggtgagccttgaaggacaaaattttgggattcgggagttcgcccctttcttttacccaaacctggggaagaaagccaagttccaaggaagacatttcaaagagccattnagttnctttggcaagaaagggaaggttncccagcagcc

SEQ ID NO: 1829 - DNA, 446 bp, Homo sapiens
  SITE (373): n equals a,t,g, or c
aattcggcagagacagaccatccctccttccacagaggagaagcgcatctaccgggtgcctgttttcacagcgcccttctgccaggccctgctggaagagctggagcacttcgagcaatcggacatgcctaaggggaggcccaacaccatggaacaactacggggtgctgctgcagagctcgggctggacgagccgctgatgacaccactgcgggaggcttcctgcagccgctgatggccctgctgtaccctgactgtggcgggggcggctcgacagccaccgggcctttgtggtcaaatacgsaccgggccaggacctggagctgggctgccamtatgataatgccgagctcaccctcaatgtggccttggnaaggtcttcacagggggcgcctgtattttgggggcctcttccaggtgagtgtgtgacccatgcggcagggcct

SEQ ID NO: 1830 - DNA, 585 bp, Homo sapiens
  SITE (465): n equals a,t,g, or c
ctgatacccaggagtctccagcttccaagagaggtcgggtcacagccagcagctatgtctgacataaatcttgactgggttgacaggcgtcagttgcagcgyttggaggaaatgctgattgttgtggatgagaatgataaggttattggtgccgacaccaagaggaattgccatctgaacgaaaacattgagaaagggctgctgcaccgarccytcagcgttgtcttgtttaacaccaagaatcgaatcctgatacagcagargtcggacacraaagtcacgtttcctgatttctccagaggacattgtgttcatgacaatctatcaccacaaggcaaaatcagacagaatttggggagagcatgaaatttgttaccttctgcttgtgaggaaaaacgtcactctgaacccggatcccagtgaaacgaaaagcatcctctacctgtcccgggrggagctgtgggnagctgctgggagagggaggcgaggggtgaagtcaaaggtcaccccctgggctaagaaccattgccgagaggtttctgtaccggtggtgggcctcaccgggggtgacgtgaccccgttttt

SEQ ID NO: 1831 - DNA, 668 bp, Homo sapiens
  SITE (637): n equals a,t,g, or c
  SITE (650): n equals a,t,g, or c
  SITE (651): n equals a,t,g, or c
  SITE (661): n equals a,t,g, or c
  SITE (667): n equals a,t,g, or c
ggccaactggaaggcaacaattggatggcctgttaaagaagaaagaagcttaggacagggagaatgccactttccagtattacaaaaatatcctttaggcaaggtgaggcctttttttactctgacactatttttttttaaaccaaccctgaaagaaaaatgatagggcaaggttggtccaaggaacagtaggtagggaagcagatgaraggktcaragctytggagtgtgagcaagatattcttcttctaggcacctgagttaccttctttctaaatcagggcgaaatgtcccttttcatgtttcctgagtagtcagggaagcaacgaaccaaagtcattgggaattagaactaagaatcagacgggcctcgtttgcatgccaatggtgtcactggctagccgtgcaacccatggcaagccactgcaagtctcagagctttggtttgcttgtgtgtgaaaatgacaaatatagtgcaggcctaacagaagcatggtgaacatctgatgatgcaatatgtgcaaagtgcttaacgtagttcctggcacaatattaagtacttcataaatgtttgctgttatgattatcaatcaaaacacagcagtaataaaattaaggcatgttattagacctttanctttcctacccannaaagaactanacaatnt

SEQ ID NO: 1832 - DNA, 681 bp, Homo sapiens
  SITE (637): n equals a,t,g, or c
  SITE (643): n equals a,t,g, or c
  SITE (672): n equals a,t,g, or c
  SITE (680): n equals a,t,g, or c
gaagatccagtgcacccgagcatagtcaccacctcctgtaacaacatccgccctctacaatcctgtgggtgcatttgctccatagaacttgggtctcgccgcaagggagtcagtatattgtttccagctgtctaggctcgtggaaaagaaagcacactggaaggaggttgaagtgggtgttgagaaagcctgtatttggtatctgctgcagatgtggccagataatgagagtccagtgagccaagtcctgctgtacagttgtgttctgagggttcgctcaccatccgacacaagcacaacaaagcgagcacaaagtgatactggagtgctgacagtcagggagaagatcacagcgcgagaaagagagagcgcagaaacttcaaaagcatgaaatgatgctggggccatttcatttaggagcaaataaccctgcaraaggtagtcacaaagggcatcarcgtaatagagcagagtaaaaagaatagctgtgcgtgatccttagccatcaaggaaagtttagattgcattcaggagactttcgactagaaggcaggaatgtcttaaacaggcatccgaaggatttcacaaataacgaggtgcattttccctttacaatttggctacaggactgagacgnggaaanctggggactcatggactctggggtattantgattatnt

SEQ ID NO: 1833 - DNA, 598 bp, Homo sapiens
gctgggtttattgaaactggggaaaagtatacacttcttagcaagcagatgctaagatgwgttctttataggatatggttggtaataatttaattagcctagcttttttggggaaaagtgttaattagtttttgcttaaaatacaccatcttgatggcctctgcttctccacttctatcccctgggtgaagactcaatttctcatccacactctgcagcaagtcccagcctggtcactaccagctccagcgtctccaggaagaagcggtctgtgctgccccgctcgaagaggttgcgcattttctgcttcagctcccgcttgcctgtgtctccgttggccccaaagatggtcacgaagacgttggcatcagtgcctgccctggctcatagcctgttgtcacgatgacttcgtacttgacgggcaccaggctctggaccttgctggcaaagctctctgtcgkcttggtaacctcgaataccytgaagtacttyctcttcctcttgagggggatgaggmagtcacagttaaagaagtacacattgccgtactccatctcggtgatggtgatggtcttgacatgccaggcaagttctctct

SEQ ID NO: 1834 - DNA, 345 bp, Homo sapiens
gctcgtgccgttgtgaccaatgctgcatacaggagatgagggaggacggccagacacctggaagccggaaaatggactcagtggcctttgaggatgtggcagtgaacttcacccaggaggagtgggctttgctggatccttggcagaaaaaactctacagagatgtgatgctggaaacctataggaacctggcttcagtaggtgatgacgacaacattccttcacttagagaacaagttgcccatcaacgatatttcaagacctggcatgtggaaagggaatacttcagtaaataaaccaagcatggtgacagctaaaaaaaaaaaaaaaaaaaaaaaaaaaaaa

SEQ ID NO: 1835 - DNA, 725 bp, Homo sapiens
  SITE (698): n equals a,t,g, or c
tccatagcaacaaataccagctgatgccagttattctcaagtgtgtcttcccatccctgactccaccagtctcctgttctgtacttccaattgcctactggatctctccttttgaatgttgcgtaaactcagtgtgtctcaaatagttacccaacccaatcctccacactgaaatatcttctggcagtgctacaccttttgcagtgatactgtctcaggcactcacacagctgcagtactctaatactctgccactggccccttggcagtcgacaagagccagtgatgttgggaacagaaaagaagggatagacattagaatcatgttacatgatggagaaagggttcaagataagtatcagtgcaggacaggacttggagaatggttagttattggaatgaatggcaaatccaacaatctgaagacaggagcagyttgagcaaaggtgatcccaggactttcagcctgtcctgcatgtttctacsgtttcgtctacagtgactggatcagttctggagtctcccagttctcattatccacctgggggctggggataagactccagagagtcctaggacaagctggcctttgggaatgcagtagatagttctcatttctctgattcactctttaatttattgaataaacactgtcaagtgcttcttatgacaaggcactctgctagatgctatgtggnacataatgaagtttacagctttaaaaa

SEQ ID NO: 1836 - DNA, 696 bp, Homo sapiens
  SITE (663): n equals a,t,g, or c
  SITE (678): n equals a,t,g, or c
  SITE (687): n equals a,t,g, or c
  SITE (690): n equals a,t,g, or c
gtcgaaaattgctgtctttaagatgaagcacccagmggaccacaatcctcggattttatgagaagaccttctgccctgcctgcccttttgagacctttatctgaaaaggaacctgcaatcctagaaaagaggtggaggcaggcttgattcagttaaggaagttctttcttctcagcaattaccacgccaattctgtggaaaagcaacatttggaagacgagagaaatccactgtaggaagtattagaaatacctgcaattaggcttcaaacaagcaaatgagggcaggaaaagtaaatgacgacagcctgtgtcctctccatgacaccactctgcctccatggaaccactctgcccccatggatctctccagttttaagtctggggaaatctatcaatcacacaatttcagttagcattccaagaactaggggaaggcccgagtaatctattcaaagacatgcttcagaaagaacacaccgaccccatggagagttaaacctgattaccaagaagcaggatagttaggtgtttccgctatttacataatcattgtaaatataagttacagactaattacaatgataattatgacaatgagcctggcatggaggaagagtttaataaataatatttgatgaawraaaaaaaaaaaaaaaaattngggggggggcccggnccccaattnccnttttgg

SEQ ID NO: 1837 - DNA, 931 bp, Homo sapiens
  SITE (252): n equals a,t,g, or c
  SITE (333): n equals a,t,g, or c
  SITE (334): n equals a,t,g, or c
gttttaatttaaaaatttttttaattcactagtagaaagttttctgtgatctctggaattatccgtaaacattattttttagctctctcaaagagtaggtacggtagaaggtccctagtagaaagttttctgtgatctctggaattatctgtaaacattattttttagctctctcaaagggcaggtacaatagaaagtccctcacctctgagagccaggggacaggcttgttccacttcaagtagctgctgntactgctcaccccttggtcaatgtcgtggtcctcgaggctcaacctctggggatggtagaactggaggtgtggatccacanntggaatggtctgctggccagaccttggcagtctcttcagctgccgtaccttaatatattcactttgagcatggtgactctcatgcataacgggcaacacttttccaattttawcttctttcttcttacactgcaccctatattgcttaayctttgacatcaaattatctttttcaagcatccatgacttctctttattttggttttcagatctgagttgcagaaaatctttggtgctctcatagagcagttcttgggtgtggtgaagatttttggttagctctttgattttgttctgatttctctggtgctgaacttgtatttcctcaaggtgaatccgtctgtcctcgatgagcccttcaatttgttctcgagaaagtttggtctgctctcccagctgagcctgcagtgcttccacctagacaggccaaaaaggggtgaggaatccagccctacttccacttacttcatacctctaggaaaagtgagcctttctccagaaaaattaaaaaacaaacacaaacaaaaacatctcaatcctaatcctcttgttcatttcaagacaaggtcttgctctgtcccccaggctggaggtcga

SEQ ID NO: 1838 - DNA, 839 bp, Homo sapiens
  SITE (506): n equals a,t,g, or c
tttttatttttttttttcattttggctgttttattgcgatgcatagctaatgatatgtcatttatcattagctgttatctgacgtaccaaacataaacaaacagtgaagcaggctcaaggctctcacccattctggaaaacagaggaatacgacgataacctttgttcatgcatagaagtggcaaagtatattgcccaagaaattcatttcctgctattaaaccttgaccttcaacaacaaaacgtatcaatgccaattctgggacatgaataataaatgtgaatgtttcattccatcttggactaaaagcattttttttaattacacgagtctgctgcttcatttgatcatttggaacaccaaaaacttctataattactaatgaatcacctttgttagatgatgaatgagtaagaggcaactggataccactgatgagccttattgtaagtgtaattggcataccctcttttatgttacttgggttaaagtatgatttactctntcttaagaaatgtggtttcaaaatatatccagaaccaccattatccaaaaatttcccattttgcagatccatgggcagaccaggggtctggaaatttaaagccaccatttgacaacctatattccaaaattcttggggattaaaattagaagagtctgctcttgttgctttgggatatattctggtaatgaacttcctggtgtgaaaaataaactcatggactcgcaattttgaaagttttcgggcttgtgtctccccaatagaattattttcattaaattgctgatataatcttgaatgttgaaagcttttgaatttctcagctttcgtata

SEQ ID NO: 1839 - DNA, 503 bp, Homo sapiens
gctaaatgtgatcaggagcgggagagtaggggtaggagaggaaaagagtcaccaatgatgaaacgggagaggaaagtggcaattttagatgaattaaatgcttttcaccagagttcaactgattttcttcctaaactgtaactgaagctaaaccatgaatattgaagcacttcagggagcatctggacaaacttttcgccaaaggaattggaatgktggatatagctctgaatgaggccttcaacattctgagtgatttcaaccacacgggacaaggaagtatctgcagtcaggccatcatgctcataactgatggggcggtggacacctatgatacaatctttgcaaaatacaattggccagatcgaaaggtccatccatgttgtaaatggtaggatttccttctttccaaggctgggtaccaaagacattttttgctgtgaagtcacctcctctcccaacttgtcctttaaaatatatgtatagaaagaaaggcataaaaa

SEQ ID NO: 1840 - DNA, 734 bp, Homo sapiens
gagatcctaagtgaagtcactcgcccaatgagtgtgcatatgcctgcaatgaagatttgtgagaagctgaagaagttggatagccagatctgtgagctgaaatatgaaaaaacactggacttggcatcagttgacctgcggaagatgagagtgkcagagctgwagcagatcctgcatagctggggggaggagtgcagggcctgtgcagaaaaaactgactatgtgaatctcattcaagagctgssccccaaagtatgcagcgacacaccccaaaacagagctctgatctccaatgcmagcacatttgtgacttgtaattagagagaaaagtgactctctaggatatggacatgttgattaaggataactgggaatgcatcatatttggtctcatgctttttgtgttggtattattcctcagaattttgttacgtgggtttatgagtgaaactaatactactgataacttacatttgcagtgtaccaaaagctaaaagttcctttctcataagtttcttggaatgactatgccagttttcattgcctgtctcctaaaagtgacctactgacaaattgatggagtaaattgattccaagaaagaagaaggcattcagagactcctctctggatgcaattttaaaatatattggactaaaacaaaagacacaacagtcagcttatctaatgcacaacttcaatcccaaatacagaatcaaaagtttttttcaagtga

SEQ ID NO: 1841 - DNA, 860 bp, Homo sapiens
  SITE (755): n equals a,t,g, or c
  SITE (821): n equals a,t,g, or c
  SITE (827): n equals a,t,g, or c
  SITE (830): n equals a,t,g, or c
gaccctcccagaattgaagccccgcccccttcgggccggccggacattggtcatccctccagtcaccatgggcttttttgtggtcaagaatgtcaatgctttggcctgccgctaccgataagctatcctcacactcatggctaccagtgggcctgctgggctgcttccactcctccactccagtagtatcctctgttttcagacatcctagcaaccagcccctgctgccccatcctgctggaatcaacacagacttgctctccaaagagactaaatgtcatagcgtgatcttagcctaggtaggccacatccatcccaaaggaaaatgtagacatcacctgtacctatataaggataaaggcatgtgtatagagcagaatgtttcccttcatgtgcactatgaaaacgagctgacagcacactcccaggagaaatgtttccagacaactccccatgatcctgtcacacagcattataaccacaaatccaaaccttagcctgctgctgctgctgccctcagaggaagatgaggaaggaaaaaaactgggtggacctaaaaaaacccatcctctcccaactccttcttctctgcctctttcttgctgctgccctgagttttttgacacatctctttccataggggagtaatgggtgtgtcaagccctggcctgctgggaaaagctggttatatgatttccccggctgatgtatgaacgtgcgcacctgggttcttacaatggcattcatactgcagntcttctgggaaacgggtgcttaaagtaaaattccatacactcagattggaagaggtctattcttgngatcanatncccaaattgaatggagcagacatatcatgg

SEQ ID NO: 1842 - DNA, 334 bp, Homo sapiens
cgaagctccttagtgaggagctgccatgctgggccatccaccatctggattcctacgactcagggaatagaacactgcaccttccagaagcacttgtttcttcgtgggtacaccaccagctgagaaagaagcctcatgatgattgttgtcttatggatgcttctcattgcaggaaccatgtggaagggatataaatatcccccaggagggactccagtggaagtaagcaaggatgatcctggtgaagtaatgcagctgtgaagctcacctgaccagctgtacagttcctgttgttggtttcacataaagtaattgcacattaaaaaaaaaaaaa

SEQ ID NO: 1843 - DNA, 493 bp, Homo sapiens
  SITE (465): n equals a,t,g, or c
  SITE (474): n equals a,t,g, or c
ggaaaaataaagcaaaggagaagatagactgaataaaaaaattttttggcttggtaatgaaagatcatagatacgaaatgaaaaatcaatgatgatgaaaaatgctttcaatttagaaatcaggagaactaggaaaagttctacagtagttccgaatcatctactatcacgttctgtgcccttggcaactcaattaaagaagtatctagtaagtgctgtagtaggtactgggtgatctctaaggtcacggktatctctcaatttctttctattgatgccactaccattagaagactacctaaagagtctgaaggactcaagggtgagcttgtggaaccactgccaaaaggaataggcttgatttctaccgaagaaagtacaagttggcaatgagcccatctytaaraagggtttagaagggggcttggagccmwtgcccatgagtgctatttmagatcccatgtnactttttgnaggttaaagggttaagagt

SEQ ID NO: 1844 - DNA, 558 bp, Homo sapiens
gcggagtcgttgaggtctccgcgccgctccctgtacaaactggtgggctcgccgccttggaaagaggctttccggcagagatgctggagagaatgagaaacagccgggacaggctcctaaacaggtaccgccagctggaagagtgggccagggaattctcagaacagctttctagttcaagaggtgatggaagaagagtggaatgctttgcagtcagtggagaattgtccagaagacttggctcagctggaggagctgatagacatggctgtgctggaggaaattcaacaggagctgatcaaccaagagcagtccatcatcagcgagtatgagaagagcttgcagtttgatgaaaagtgtctcagcatcatgctggctgagtgggaggcaaacccactcatctgtcctgtatgtacaaagcctgtgatacttgggctgtgatcctctagagccagcttggactcacatcattctatggggttgaagacaactcattccctctgaggagccttgtacatacaagccttttatttataacttattttgtattgaaacttt

SEQ ID NO: 1845 - DNA, 306 bp, Homo sapiens
  SITE (8): n equals a,t,g, or c
attatagnctttagacttcagacacacaccacaccttaaatatatacacaactgaaaggaaaattaaggaagtttttcaaagaaccctattccgagtaagaagtgtgttgcatgaatttctaaggtcaaagatgttgattcattcatagtgtgaggcccagaaatcggcatttttaaacaagtaccctggacatttctaaagctggctaaagtttgagagaccctatccaagggaaatttctccgtaactctttttctcagaagaaaagtaaactaaaagtaaaaataaaaaaaaaaaaaaaaaaa

SEQ ID NO: 1846 - DNA, 653 bp, Homo sapiens
gaaaacaggcgccatggagtacacagggagcaaatatatcggggaatatgtagatgggaggatggagggcaaagcaagtacatcctccctaccgaaacaatatatgttggggaaatgaaggatggcatgtttcacggcgagggaaccctgtacttccccagcggaaccaatacgacgccatttgggaaaacggattggccataaagggcacatatacgttctcagatgggctgcactatgatgagaaaaactggcattactgcgacggctatgatcggaggttttacacagagatcctcaatggcttgaagcctgcaggtatggctcaactcaccaatatggacccacctagaaaaatccccaagggctattacgattgtggagacggcttctataacccagtcacgagggtagtcaaggactataggaaccgctttctaagaaacgcagatgatgacgagcatgagtggatcacccgtacctgtcgaaagggctaggatgagatcgtgggtcacaggcccgagccgtgaactctgtggctgcctccaccagaggtttccatctgccctactagcattggctgccctgggggacgggctgtagttctagaacctgattttaactcaggaataaagactttctgcggtcaaaaa

SEQ ID NO: 1847 - DNA, 447 bp, Homo sapiens
  SITE (1): n equals a,t,g, or c
nctcaagaaaggactttgctataaaacacgtgaccctagggaaacttttgaagttagcggtatagagagtaccaccacsagacgccaccatgcctgcggaaggaggaaaaacggacatggaaaggattggcctctttagtgagatggaatatattactgtgggtgataaatatgtgtcacaatttaatcatgtggcttaggaagctactatggaacaataggtggtccagtcccatttttcagcgcacagtcaaaacctcgagaaaaatacaaggcacctggaaagaatttatacacaaacccgggaaagaaaggaactggatatggaaagcgaatgaagagcaccatcgtttacttaaaggagcaccatttaagttaaatcttcacccaagggactattttgacgctaatccttatttttctgaggaatctttaccaccaattaaa

SEQ ID NO: 1848 - DNA, 666 bp, Homo sapiens
ctggtttttcgaagctttatcaacatttcaaatattttattattgcatcaccagaactataacagtgagaaaaggtatagttgtttctaggcatgttaacgaagcaggtgtttcctttgtgtcctatctttgcattaattttaaataaccttcaccacagctacagttttttttctgggctctatcagctttaatgcaacggcagaagcttaagcaactggtcatgagaggtcaagtggtttacttctgtatcccttccatgtacaagagacatccatttgattctcaagagagccaaataggtcagcctcttcagcgattctaaaagatttcaagagcagaggcagaagtagactggaatttagttcaattcatttctgaggttgccctaaggtaggcaagttaaattaactttgtttctatgaaaaccattggaactgataaacttgkattatacttgkaattgktttattaggtaagrtggttcaaaatgcgaatgccttaacttggtgktataaaagttgaatcggaaggaaaatatgtagaagctatttttaagtttttaacttatgtacagctcctggttgtgcaagatagaaagctgtcctaaacgaaaagattagctcttttgttacttttttttgtggtctatgtggcctttgtgcg

SEQ ID NO: 1849 - DNA, 719 bp, Homo sapiens
  SITE (618): n equals a,t,g, or c
  SITE (693): n equals a,t,g, or c
  SITE (695): n equals a,t,g, or c
  SITE (717): n equals a,t,g, or c
gtttttctttgggaagactggctgtatttcagtacctggcaaatttccagaacatcaaatgagcccttaagcaggaagactcctctgcagaactaacacctgcagtagattctgagcgtttgcctcctcaccagactcagtactgtttccctcaaggcccgggcctggctgctgcgggaggcgtggtggtggccggggcaccgtcgcacggaagtccttgttcctgggttgtgttcccggcacgggagcactgcacaaatgcagagggaggagtccaggcacatcagcccattacatcctgcacacgggccaggtccaagtcaagatgcagattcccacaacccttgtaggactgctgtgaaggtgaaccgacaccaaacctgtgcagtgctcagaactgaagctggcaggtggtccacatgtcactagcttttattatttgtagcctggagtctagaacacagggaagtacaaattctgaacggagcgctacggtggccctttgtgaatgcagagtgcttggatcttcggaggaagaggcctctggcccaccttttgtctccacgccctcgcttcttcccgacagacatgcttgattatttttaaagtgaatcgcanatgttaagaaagcaatttatgctcttaagatcggggaggggaaggacatgctatttactggttcaacttcagcangnatgggcttacagaatccactanat

SEQ ID NO: 1850 - DNA, 207 bp, Homo sapiens
tttctcagcaaagaagttctatttatttttgccaatccttttctgcctaagaaccttaaagaaaaaaatacttatttctaaatgaaccctgtatttctaaggctcagttttggttgatcacccatgacttattgtccacaagctttgtcagcagcatctcggtacaaagatgtaaagtctctgytcttttttaccaaggtggtcttc

SEQ ID NO: 1851 - DNA, 363 bp, Homo sapiens
atgaacccaatttcaggaaatctgaactgtgaccctattgctatgtcccagtgttcctcagatcatggatgtgaaactgatttagattcagatgatgacaaaatagaaaaaccaaacaattttatgaaagattctgcatcacaagacaatggactaagcagaaaaatttccaggaaaagggtctgttccagtgactcagacagtagtttacaggtggttaagaaatcatcaaaagccagaacaggtctcctgaggattactcgaagatgtgcagctacggctgccaataagatcaagctcatgagtgatgtagaagatgtcagtttagaaaatgtgcacactagaagcaaaaatggaaggaaa

SEQ ID NO: 1852 - DNA, 470 bp, Homo sapiens
  SITE (415): n equals a,t,g, or c
  SITE (419): n equals a,t,g, or c
  SITE (443): n equals a,t,g, or c
  SITE (451): n equals a,t,g, or c
ttcattgacatagggcattatgtacgtgatatcagtgcttatgaagaattggtatccaagctgaatttattagtggaggatgaactgaagcaaattgctgaaaatattgaaagcattaatcagaacaaagctccttygaaatatataggcaactatgcaattttggatcatcttggaagtggagcttttggctgtgtttacaaggttagaaagcatagtggtcaaaatcttttagcaatgaaagaggtcaatttacataacccagcatttggaaaggataagaaagatcgagacagcagcgtaagggaatattgtttctgaattaacaataattaaagagcagctttatcatccccacattgtacgttattacaaaacatttctggaaaacgataggttgttcatagttatggancttnataaaaggagccccgcttggagancatttcantcctttgaaggaaaacatc

SEQ ID NO: 1853 - DNA, 1092 bp, Homo sapiens
  SITE (1): n equals a,t,g, or c
  SITE (2): n equals a,t,g, or c
  SITE (40): n equals a,t,g, or c
nntcttaatagtcctgtcgggtttcgccacctctgacttnagcgtcgatttttgtgatgctcgtcagggggcggagcctatggaaaaacgccagcaacgcggcctttttacggttcctggccttttgctggccttttgctcacatgttctttcctgcgttatcccctgattctgtggataaccgtattaccgcctttgagtgagctgataccgctcgccgcagccgaacgaccgagcgcagcgagtcagtgagcgaggaagcggaagagcgcccaatacgcaaaccgcctctccccgcgcgttggccgattcattaatgcagctggcacgacaggtttcccgactggaaagcgggcagtgagcgcaacgcaattaatgtgagttagctcactcattaggcaccccaggctttacactttatgcttccggctcgtatgttgtgtggaattgtgagcggataacaatttcacacaggaaacagctatgaccatgattacgccaagctcgaaattaaccctcactaaaggkaacaaaagctggagctccaccgcggtggcggccgctctagaactagtggatcccccgggctgcaggaattcggcacgaggaaataatgttatgctcatgccaactggaataataaagctgattgactttggctgtgccaggcgtttggcctgggcaggtttaaatggcacccacagtgacatgcttaagtccatgcatgggactccatattggatggccccagaagtcatcaatgagtctggctatggacggaaatcagatatctggagcattggttgtactgtgtttgagatggctacagggaagcctccactggcttccatggacaggatggccgccatgttttacatcggagcacaccgagggctgatgcctcctttaccagaccacttctcagaaaatgcagcagactttgtgcgcatgtgcctgaccaggtaagaaactgaaagcaagaggaggaagataaatgcccggagattccaagtggcagacatttccctttcaatttatggcccattaaaagctctgttttggttwtgaaaaaaaaaaaaaaaaaaaaaaaaa

SEQ ID NO: 1854 - DNA, 590 bp, Homo sapiens
ggttccaagacactgagtgatttgctgaaaatcacacatctagatgcaaagccagaatgcgagcagtgaccaccacacttgacaaatccgttgttgcacacatttgtactcttcaatcaacaaaacctgatgcaaaaaacagaaaagggggagatgtacatgcattttccctcactgcaaaaaaaacacaacttgtttaactacaggtgtgttcctggtggtctttgaatgaagacattgacagaaagtaacatagcatgctggttaaagactgtttttattcgaatcctggctttgccaatcaacagctgcataaattaaactctcgacctcagctcccttatttgtaaaacaagaataacaaaaakacatttttataaggttgggttgaaggttaaatgaaataacagaagattatctcttcmctmattttagctgtagaaaacagaagccaatcgaaagagctcccagtccaaagctggaacaacttgaacaacaaaataaataatgtagcattggattacaaaccaaccataaaacaaatatccatgagtctatactgatgtcaataaatgaataaatgtgggaaa

SEQ ID NO: 1855 - DNA, 489 bp, Homo sapiens
  SITE (439): n equals a,t,g, or c
  SITE (465): n equals a,t,g, or c
gtttttttttatttcaacgatctttatttcaggttcactgccatcccagttctcactgatggtccccgaaatgtaagtgaaggctctcactcctgtcatctggttaatgtggacccaatcaggcttctcttgcatgtgtagctgcttctgccacctggtttcatttccagcacattattcctgtttatgtgggtgctgggaagtgggaaaaggggcctcactgctggacaaaacactctgcttgttaaagaccttggctgatttcgaagaggctgctgttgtgatggccgatccctatgtgtgtggctttctcgagttattgcagatgcaccagaatctacgtgaactgaccctactggagtaggaataggtctcccaacccaatcataggcataagtcaaaaggtgtagcctttcttttcaaaagaggcttgttaaanagggtccgaaatactcataatcaggnttttcaaagaagtccaatccgcct

SEQ ID NO: 1856 - DNA, 315 bp, Homo sapiens
  SITE (289): n equals a,t,g, or c
tgagccttacaaccaggaaatatgagctatactagatagcctcatgatagcatttaccgataagaacttatctcgtgtgttcatgtaattttttgagtaggaactgttttatcttgaatattgtagctaactatatatagcagaactgcctcagtctttttaagaaggaaataaataatatatgtgtatgaatttatatatacatatacactcatagacaaacttaacagttggggtcattctaacagttaaaacaattgttccattgtttaaatctcagatcctggtnaaatgttcttaatttgtctgtgtaca

SEQ ID NO: 1857 - DNA, 392 bp, Homo sapiens
aatttgggggaggatatattccaacttgggggaagggtgaaggcattttagctctgaagctcaatcatgacatttctagagagttctgcagtgcccccgcattggacaggacaggatggaagagtgtgctggactggctggattccccagtgtcaagctggcagcgctcctgaggttcttgagtgtttatcaactcagcaggtcaaaagtctgcagacactgggtggagcagcagtaagccacaaaactaacagttgtcttccactggtgcagccctgccattggcgtctctctcaagggaaagagcttggggtagacgatggtaaacataggctcactacaccgatgacagtgccccagagggcagtgcagcagctctaggagacttctgc

SEQ ID NO: 1858 - DNA, 597 bp, Homo sapiens
gaggatagagaaacaactgtagaggagcaagagatgatggtgactcagaccaaagtggaagcagtggaggtgaggagagctggtcaaattccaggcagtacctgaaacacattcatcacagtcaaaaggaagtgaagagacacagaagggaagcragatactgagatgctgccaagtatcccagagtccatgatggagtagagatgaaacaatagacccaggtcattcctctgctggaggttctgaggcaagcagtagtgctctgcagatgaacattcatgacaacttgcctttcaactggaggtgtgtgacagccagaaaaataccatcgaggtaaagcttttttctcctagaggagcaactgactcaccgcagcatgttgttatgtggacctygagtctgtggactagtgaccttcacctccttcagtgtgtgggtctgtccagggcttccatcccwccagtaagaaccctaacccacattcctgcatttgataactttgagttaaatcaagaaaagcttggaaatttggacatagttgtttataagtcactcatattatctattaaagtctaaaaatgttgtagtccctgaaaa

SEQ ID NO: 1859 - DNA, 470 bp, Homo sapiens
gtggaaacgtgctatttggaggttattttcctagtcgacatccaggagatctccagagatctatttcagccccacctgttgatttcatcatgaaaaggaggaagctcaaactgaagtgagttaaaaacttcatctcctagagaggactgtggctcggctgagttgagtttttttatgtttatgtgcaagcgcaatgaagaagaacaccagcaagactaccattaggatcaataagcaagatgctctctgcaccccacactcccatgatccgagagatcttcaaaatatgttggatggaggagagtatgcccttttgtatctcctcccatgttagagagcaattttatccagctccacccacaagatccccaatgtgatgctactggcccatctgacacctggtgcccaaaaagatacagaaaccctgtttaaaagtctcctgacatctcctcctgcagagaaactagtgc

SEQ ID NO: 1860 - DNA, 370 bp, Homo sapiens
  SITE (48): n equals a,t,g, or c
ggcaaaacacctaaaacttaatttgatgctgagttacaattcctttgnaaatttcaactgtttaggggttcacagccatttctccaaactgatttcttggaactgcactagggagagcaggtggcttgtgtgtctttttcactcttgtatgcccagcacttggcatggtgtctggtacagagtgggctctccaactacttgcaggatgagtgagtggcatgcaggcctggctgtgggcctggcacagarataatatgttcatttccatattttgtaggtgtcacaatctgaaatctggttatttcagattgacccttccagaggcagagatttatctagaatccttgaaaccttacaatttcaaaaaaaa

SEQ ID NO: 1861 - DNA, 641 bp, Homo sapiens
gaagaccccagctggatcacacgcatccatgagcgctcgcagcagatggagcgctacctgtccaccacccccgagaccacgcactgccgcaagcagccccggcctgtgcgcatccagaccctagtgggcaacatccacatcaagcaggagatggaggacgattacgactactacgggcagcaaagggtgcagatcctggaacgcaacgaatccgaggagtgcacggaagacacagaccaggccgaggcaccgagagtgagcccaaaggtgaaagcttcgactcgggcgtcagctcctccataggcaccgagcctgactcggtggagcagcagtttgggcctggggcggcgcgggacagccaggctgaacccacccaacccgagcaggctgcagaagcccccgctgagggtggtccgcagacaaaccagctagaaacaggtgcttcctctccggagagaagcaatgaagtggagatggacagcactgttatcactgtcagcaacagctccgacaagagcgtcctacaacagccttcggtcaacacgtccatcgggcagccattgccaagtacccagctctacttacgccagacagaaaccctcaccagcaacctgaggatgcctctgaccttgaccagcaac

SEQ ID NO: 1862 - DNA, 564 bp, Homo sapiens
gccgccggcgggcaccctgcggggaccacagccggacgccagaagtgacctgaccgtgaatgtgcgctttgcgtgcagtcattgcatcgtcgcaggcctaggagacagatgaagagatggctcttaaggaaattctcggttatactgaaaaatccagaagctctgaagataccagtcaaataaaatcacaccctataactctacaccagacttgtggcatggtttctgtagctgccagcggtaaaaccaagagaaactttacaaaaaccttttgtgcatctgaaaaggaggaagtgtgagagacactggaaattcaatatgtcagacaaagccgtctcctgacactgcaggacagtagaccagtcaaacaatctttttaaagcccccatgtaagaagttgctatatgaggtggcagcttgggtcagacattatgtatggcctttggtattttagtagcactgcatgtaaaatttaactttctaaaatcgctgtattcgtggatagcttttatcattgcmctagacaacaagttacaatttaaaaattgaaaaaaaaaaaaaaaa

SEQ ID NO: 1863 - DNA, 523 bp, Homo sapiens
ggagagaaagttgcttacttttcctgagcctcaactttctgaaaacatagaaacacaattagatgatgagttatgaggtgaaggaggggatgactcagcagcaatgtgccagctccatagtgacttctccaccaagctggagaaggatttgcagcaatggttccagaaccaactgtgtgtatctacaggatgaagaaactaaggcaacaagcaggatacatccagctgtgctacctgggaggagtcctctcttctataatcaaactcaacagaaacaggcccttgcttctgggacatcaaacatgaagaggctcctgttctgcagaaaataaataaggcgawatcaaagatttgtagaaattttgattaagacactttctcagtctttccacatagcagacactgaactactgacatgtgctgtagctagaattgagcctgtggacttttatctttgcctttgaattctgttatattgacattaatttggacactcaataaaaaattamcaaaawaaaaaaaa

SEQ ID NO: 1864 - DNA, 616 bp, Homo sapiens
gtccttgtcaccatcttcccttctcagcctctttttycatgctaacaggcataaatgaaatgataaaagtttgagctcttctcgtggaattctcgtgatacagatatgtgctacatgttcatcatctcgttggtcttcaccatgataactgtggagtaagaattataagcaggtcacagattagggacttgagattgacagtttggcttccctgttctgggtggcaaagcctgtggagtactcacctacctgctgcatgaaggcagcatggagggactgtggtggattatctgcaaagatggccaaaattctctcatccctgcaggcacatacaagatgccagaatcagtcaaaactaagctcactgtccttgctaatattctgccccagagaagaactgaagctcagctcttcaccctacagaaagcctgaattttgtaaatgttctgcttagaatgaggaagaaagatgaagaatgaggaggaagaagggaggaacgagagagaggtaaagccaacaagcagaacagacctacatttgcagcatctccaagtttctgcaacagcattatgttgytgttatgttttgttttaataaaagcacawaccatttaaaa

SEQ ID NO: 1865 - DNA, 727 bp, Homo sapiens
  SITE (92): n equals a,t,g, or c
  SITE (93): n equals a,t,g, or c
taaaggtgctgaggggaaagacgcgggaggtctctggcctgacactatgaaggaagagagaaactatttgcaaacatagcagaagtcaccgnnaccatcagtgacacgaaggaggcagcagcgcttttggatgattgcatattcaacatggttctcttgaaggtgccttcttcactaagtgccgaggagctggaagccatcaagttaattagatttggcaaaaagaaaaatacacattcactgtttgtttttataatccctgaaaattttaaaggttgtatttcagggcatggcctggatattgctttaactgaaccactgacaatggaaaaaatgagtaatgtggtaaaatactggacaacatgtccctcaaacactgttaagactgaaaacgcaactgggcctgaagaacttggattgcccctgcagaggtcctacagcgaacacctgggatattttcctactgatctatttgcctgctctgaatctttaaggaatggcaatgggcttgaattaaatgcttcgttgtcagagttcgagaaaaacaaaaagatctctcttcttcattcaagcaaggaaaaactaagaagggaaagaatcaaatattgctgtgagcagctgcgtactctcttgccgtatgtaaaagggagaaaggaatgatgcggcttcagttcttgagggcaacagttgattatgtggaaatatatcccgggagaaaatctcttcc

SEQ ID NO: 1866 - DNA, 486 bp, Homo sapiens
  SITE (358): n equals a,t,g, or c
gacccctggctctggcaggtgagtctggacaaagcaggagctgactttgccttcggggagggcatgagtcacatctctggctctgtcagcagatggaatacccttcttccgctctgccaatggggtgattctgactccagggaatactgatggcttcctccttcccaagtacttcaaggaggccctgcaggtaccgcctacccgtgagaacmacmaccccagcccctattccttgttcctgaaagctgtgcccttctgccctcacctctctcctagcttccaaccctagactgacttaggtgtccctttctctaaccaactcttgtctttatcaggaaagcccctttccttggctggntgaagagacagagtgtcagagtagccccaagcacagctccagagaaaggaggaggatccaacaataaaatattaatttataaaaaagaaattttaaaaagtaacaagaaagaactccgtttgaaacca

SEQ ID NO: 1867 - DNA, 657 bp, Homo sapiens
  SITE (548): n equals a,t,g, or c
  SITE (552): n equals a,t,g, or c
  SITE (572): n equals a,t,g, or c
  SITE (578): n equals a,t,g, or c
  SITE (613): n equals a,t,g, or c
  SITE (647): n equals a,t,g, or c
ggcacgagcttaactctccaagagtattcttatctggttttattagaataatacggcctctgggagcaaagataccgcctagcactcagcactggaagtcaaggtggagaatatttccaaggcaaccatgaccttccctttggtgctatgttacacagtttggaaggtaattcaaacagtacataacatcagcatgctgaacatcaagaacttggcttcattgaaggtgtcaggcaggctgctggccaggaaagccaagawgaagctccccagtggccaaaarggycargawtccagaaccagaagtggraaggcaaaagawtacctcatcattgagaagtcctggatggcactctttgatcccatgccaaattccagagagttacttggataaggaaacagatgaaaataactgtgctaaatactcccagtccccaaaaccactttggctttctctctgatgctgtagccttacaggctataagcacagtgatagttttagctaacgcagttgaaacaaccacagtaaaaatgattccaaatggtgnctgncagaggatacaagtgactgngtttgnacagccagtgaagagcaaggagcaagaagaaaacngacagagagatgccctgagagtcttgactattantggggggatg

SEQ ID NO: 1868 - DNA, 428 bp, Homo sapiens
  SITE (381): n equals a,t,g, or c
  SITE (404): n equals a,t,g, or c
  SITE (418): n equals a,t,g, or c
ggcagaggcggcagagcagggatcttatcctcttaaacttccacttctcacactagagagaaagataaggaagatgagcaagtgcctggaatggggcaggctgagtggtcacacaggcacagaggcacactgagaacctacaggggagactgcagagtgccttccctgatgctgcagctggaagtcatccttccctccacctggcccctgagacactctactctgtagtgtgcagtctgatggcactgctagatttctttttcagctcagggccacagcttaaacagctttacctttcccctcagcacctgtcccaytaccttgcacacaggtactytatccgtgtttattggaacaaaggagggaaactgatttcacttntcacttggttccattatccattncaatttttatgtgnaaaatgggca

SEQ ID NO: 1869 - DNA, 395 bp, Homo sapiens
ggcagagtttttgtgtaaatctagcatttattgagtgtctgctttgtgctcagcactgctcaaacactgtgagcaaatacaaaagatttaagagactgggtacccacttcagagggtgaacatacagttggaatttccattcactccacagttagagaacagtagaaatgagtttctatcaggcatgctctgggagttcacggaggcccctggctctagttttgtgttgtcagggagatgttgatcaagcaccttggaagtgaaaaagcaatgtcctctacctgttccctggattcttctctctttagacctgtcaccttgaagaaagcatgatcgattccaaacatcactgtaggcaaatcaccatagtacttgaactgagttactgtgaagaa

SEQ ID NO: 1870 - DNA, 402 bp, Homo sapiens
  SITE (364): n equals a,t,g, or c
  SITE (375): n equals a,t,g, or c
  SITE (384): n equals a,t,g, or c
gggaacattgaactaggtgatctttaagatcccttccggctctaaaattgtttgacattatcttggtggtcagtaactgtgagaaacacattcctgaggaaaatttgcagctatagttgacttcaggacagcatgtttagggagtagaatgtaagctccctgagggtaggggccttttctgttgtgttcactgccatatccccagcagctagcacaatgcgtgttacatagtaggcattcattaaatgtttgttgaatgaatgatgtgaaaagtatgttgatggtttgttaggagcacacctaggaaagcctcaaagaaaaatgggtgtgctttaggggagggaaaagaccagatttcttctgnaagtaatcttntgccagctngattttttatcccttatt

SEQ ID NO: 1871 - DNA, 457 bp, Homo sapiens
  SITE (12): n equals a,t,g, or c
  SITE (382): n equals a,t,g, or c
acaaaggagtangcgtctgaaggagaaccattgtttgctgggggaagtgccattcccaaagaggagaatctttcagaagattctaagagctcatcactaaattcaggaaattatttgaatcctgcctgtagaaatcctatgtatattcatacttcagtctcccaggatttttctcgaagtgtgccaggcaccacaagttcaccactagttggggacatatcccccargagcagtccccatgaagttaaattccaaatgcagaggaaaagtgaaggaaattgatgggaaggctctgttcctactcaagagtgatgtgatgatgaagtatatgggggctgaagctggggccagcattaaagctgtgttactacattgaaaagcntaaagaaggaaaatacagttaaaaaaatgtgtaagtttagattggacataattcccaggtgtactgttaacattt

SEQ ID NO: 1872 - DNA, 400 bp, Homo sapiens
  SITE (325): n equals a,t,g, or c
  SITE (372): n equals a,t,g, or c
  SITE (380): n equals a,t,g, or c
  SITE (388): n equals a,t,g, or c
gaagctttttcctagaggttgagcggtttgcacaatgtcggmaatggctgagttgtccgagctgtatgmagagagcagtgacctgcagatggatgtgatgcctggcgagggtgaccttccgcagatggaggtaggcagcgggaccgggagctatccctgcgtccctcccgcagcggggcccaacagctcgaggaggaaactacttgaggagggacccaactttccgctatcttttgggttcattccaaatagttttgtgccattgaaaaacttgaccttcaaaaaaatttgtttttcagaatagaacacaataggacagtgactncacagtttgtgaaaaaggaagagaatcattgaaagaaaaagataaangtttttangaccgttngaaatcaatttt

SEQ ID NO: 1873 - DNA, 601 bp, Homo sapiens
  SITE (344): n equals a,t,g, or c
  SITE (492): n equals a,t,g, or c
  SITE (501): n equals a,t,g, or c
  SITE (505): n equals a,t,g, or c
  SITE (551): n equals a,t,g, or c
tcgagtttttttttttttttttttttttttttttttttgatatgttaatagaggaaatatttatatcaatgaagtaaatgtgatcacaagtccatatgtttttgtgaagcagcaacccaagtgttttgcataacctgtgccaacaagtagatgcagccagttatgtctgttcctgagacaactggaaaggattgcctagcacagatcaaacagtgcacctaaagggaggagaaattgccaaattcctggaaataggtgtattccagttacctcttgctacacaacaaattactccaaaacaatcctaataattttatcatctctcacattctccatgggtcagngctaagaaagggcttgcctgcaaagttccagcttaatgtctgtcatccagttgcagtttgacgtgtctggagatgggacagtgggggggctgaagcagctggaagcaggtcaggcatctttctgtctttctgtagccaccaagcctcntcctgkganctyntctgcatggacttacttttggggctttgatattaactttggcaganccagatttagcttgaacttgttttacattgaaggccaaaggttcaagttg

SEQ ID NO: 1874 - DNA, 465 bp, Homo sapiens
ttttttggaatgaaaacaaacgtttatggtatggaacttgggctgtactgacagaaggctttgatgagtctcggttagactcaaaatggctacaatgaagcaacatttattcctcatggtaagtggcaatgcttggctgtgatgacctccaagagtgttgtgtctcacatgtgtaattactgtcaggccaatgactcatgcaggtctgtggaccatcgagatccccatggatcgctattaacacatggagccactgagccactataacatgagccctaaccacaaccacaagcaggacactatcactgacatacagcgtgggtgcccatttgtctgatttataggtgacgtcgtggcaaatgtggcatcagtttcatttcggggcagtggcaagttacagatatttccttcacaacaagaagtgcagaccttgtggccttcatgctcgggagtttctgcagccag

SEQ ID NO: 1875 - DNA, 385 bp, Homo sapiens
  SITE (1): n equals a,t,g, or c
  SITE (29): n equals a,t,g, or c
nttttttttttttgaatccttgcagaaantttaatccttaamaactgatcttgggtctgtaraagctctaagagacaggaarcctarcttgggaccaggcaggtcgggtgtgaaagttaacatccacagcgttagatcaggctcgtcatacaaatgtgggtccccagagtcagagtcaacaggactgcgttcatgtgagctgccagccactctaacagctgtgggcagcacctagaaacagccggcaaagtcgatttccccatctcaacattcttctctctcctgcaggtactcactgcagctatcctcatctccttgatgggctggagatacggctgcttcagtaagagtgggctctgtcgaagcgtaagcaccagctcgtgcc

SEQ ID NO: 1876 - DNA, 404 bp, Homo sapiens
ggcacgagcctgtgcccatgggccatctcggcttgtccgtggccctcggcccagggcatgcgttccccctaccgcagccaggtatgggctggcccaggccccgatttcccaggatgttcaagtgtagccgcagaagatatcaacagggtctccgaggtcgaactgccagcagtgcagccatcaatcctgccaccagggccatgggtatcaacaacacccacactgacaccaccatagtgtggatcttcccacctcaagttctcagacatctcaggcaacctgggatttttctgatcctctagaagtgcccagaagctagcccagaagcttggtttgccctggacctgcatctcctaggggccgtgtgggtggtgamcaacaaatacagtcattctgctcaaaaa

SEQ ID NO: 1877 - DNA, 417 bp, Homo sapiens
agagagagagagagagagagaactcgtgccgctcgtgccgcttcaatccattgagaaacagctggaatctaatgaaatagaaataagattttgggagcaaaagtataattccaaccttggaagaggaaaattgtccgtctagagcaaaagatcaaaagaaacgatgtaggaaattgaggaggaaggaattctggggaaaatgaattacagattgaacaggaaaatgaaaaacagctgaaggatcaacttcaagaaataagacagaaaataacagaatgtgaaaacaaattaaaggactatttggcacagatccggactatggaaagtggtcttgaagcagaaaaattgcaacgggaagttcaagaggcacaggtcaatgaggaagaggttaaaggaaagatcggtaaggtcaaaggg

SEQ ID NO: 1878 - DNA, 439 bp, Homo sapiens
  SITE (84): n equals a,t,g, or c
  SITE (94): n equals a,t,g, or c
gccctcttcaagaccccttttggacccacccatgtcaatcggacctttgaaggactgtccttgtctgaggccaagaagctyagntccctacttncaatttcagggagcctgttgagctaaagaataagaccttgcttgagaaggctgacctggacccctccctggatttcatggactccttggagcatgacattcccaaagggtcctggagcatccagatggagagggcaatgccctggtggtctgcgcagcctgctctggccgggcctcaccttctaccatgctccccgcaccaagaactatggctacgtctacgtgggcactggcgagaagaacatggacttgcccttcatgctatagaatgggagccagcctggatgtttttaaacagagtctaaacatgattttcttaagcttcaaaaaaaaaaaaaaaaaattc

SEQ ID NO: 1879 - DNA, 542 bp, Homo sapiens
  SITE (2): n equals a,t,g, or c
  SITE (9): n equals a,t,g, or c
  SITE (10): n equals a,t,g, or c
gncatttanngcagggcgaattgggtacgggccccccctcgagtttttttttttttttttttttttcaaaatttgacagaagtttatttgttagacatgactcttatttctgtgttagtgcatgcaagaaaaaaaaatgcattttcaaaaaaaaaataggaagattgttgagtatctagctgagccaagcctgtgctgagcaattcagaggtgacctaagcagtgcctctccaacctcagcatgcaaggaatatgttcctgctacacctgctgcaggggctggaggaactgagaggggaaaagggctagacttgttctcaccatcaagaaagtacagcctgttcctgctgcaataacaaaatatcttagactgagtaatttataaataatagaaatttacgtctcacacttctggaggctggaagtccaagatcaaagtgccagcagacttggtgtctggtaaaggcttctctctgcttccaagatgacaccttctcactggtatcccacgggtactgccccaagatgctgaaggtctcggg

SEQ ID NO: 1880 - DNA, 261 bp, Homo sapiens
  SITE (146): n equals a,t,g, or c
ccttagaagaccaggttaggaaattatccagcaacaggaataacaggagaacaggacactctccaaactctccctccagtctaagatgatgccagctccaggaagttggggattgtcttcctcactcctgtattcccggctcctanaacagtgactgtcacccagcagctgttgagctaaatggctattgagtggacaaccactcggaggcaacaatgcagttcagcttcgtgggactttgttttactgaggggggcatct

SEQ ID NO: 1881 - DNA, 332 bp, Homo sapiens
  SITE (301): n equals a,t,g, or c
tgatacaagagacacagtggagaccgtccaatgagtagcatggctgccaggatgccaactgggacactaaagccctggcagtgggggctgcccagcagggctggccactagaaataagagatgcaaattcatcttctatcatagccaaagaagaccaacaaagaccaacagaggccatgtctcgcattcagctccaacagcaggcagtagatttgttacagagactaaaacccaccttattgccaagtgaccctcctctcaccagcctcmmctgctgcmacccaaatwcmtgmcactgaantactcmtcaaaatcaaacacagctgtaaaat

SEQ ID NO: 1882 - DNA, 350 bp, Homo sapiens
  SITE (90): n equals a,t,g, or c
  SITE (92): n equals a,t,g, or c
  SITE (94): n equals a,t,g, or c
aagtgttgggccacttaggagggtgttcaggaaactcaagtacaaatgcagcagagacagaagtgtggctgccgggcccaggcacggacnantnaagtgaggcagcaaccagggaggaagctgtcttttgtggagctgtctggaacatctagttgcaaacacagccacaggaagccacagaggagaaaaggaagactgaattcttcccctttgcaattccctttggacccctgggatccattgtctgtggcagaaaaccagaggtaaagacatgcattgtgagacgtggaccctcagccagccgtacaacccacttgctgtgtgtgctttcagtcctgtcagcatgggcc

SEQ ID NO: 1883 - DNA, 237 bp, Homo sapiens
ccagaggacccccgccggggcccgattcttctgagcgccagacatgaaccgcaagaaactgcagaagctgacggacaccttaaccaaaaattkcaagcattttaataaatttgaagtgaactgtcttataaagcttttttatgaacttggtgggaggagtagagaggcaaggtctggttgttgggactggatcgtaatgcattttggaaacatcctgcatgtggacatttgggaatg

SEQ ID NO: 1884 - DNA, 503 bp, Homo sapiens
  SITE (39): n equals a,t,g, or c
  SITE (75): n equals a,t,g, or c
  SITE (478): n equals a,t,g, or c
  SITE (494): n equals a,t,g, or c
  SITE (497): n equals a,t,g, or c
gaactaccaaaccccgggcaacagggaaaacccctgccntccgaccgaaccagtgccgttccggggaattgtggnccctgggcgtcgccaaaggtgtgctggggaccatgtagtgtgtcccctcctttagatttcccactccaaggccttcttccgtcgagaagcttctgtataaagtattctcgtctgttgatccgtgcccacagtgtagtatgtgttatagtgtaagatctttgacccaatattggcggaattttaaggtctattttccagtggtgaacctgtgaatcacgctgctgcacatttggtgaagacgtgaagtagactgtttaggatgtaaaacmttatatatatatatgtacatacatatgtaagttttagggaaagaatgtcttatataggcttcatgtggcatcttaggcaaaatctaaataaaaatatgtcaactgacatagcaaataaaaaaaaaaaaaaaaanctcggggggggccccngancccatt

SEQ ID NO: 1885 - DNA, 456 bp, Homo sapiens
ggtcacgtaggtccatgggaagtcgcctgaccacagtaggccgggtcagcagcttkctgcacmagcccgagttccctgatggagagwtgatggaagtcctcatctaactgccatccctgtggaatttcagtacagaacactgacaaacaaggaaagcggcagagaaagaagaaagacctagaaggttgtagatgggaaatcaggaatgatttgaactgataaagatttcagactcataagaacacattttataaatgttaaacacaaaaactacatgactgaagatagaagagaatgcgatggattttattacacatggtggaagagagaagaggcgtgtaggtttgcaaacaaagttaagaaataggaaactgaatttttcattgtacagaaaatgtatctcttggggagggcctgtgtacccccattctctgattataaacagataaacccaaa

SEQ ID NO: 1886 - DNA, 575 bp, Homo sapiens
aaagctgtgagtgtgcgtcctgaagctgcacctgcctcccagctggaaggagagatgagtgggcaggattttcatctgtcaacaagggagatgccacaaagcaagcccaagttacggagcagggcacacgcctgcacaagacactyatgccctacggcgtccctcttccagtcgcactcctgcaagaccaaggacctccccgtgtgtcctgtcagaccgtggcaaagytccagatccccaagcaggcaactttgttcttgtttttcctttcaatgaagcaactctcggagcttccaggaatggattaaatgtcaaaagaataatccaagagctccagaaactaatgaataagcaacattcctaagtggtaaaaaatcaaatcaagaaaaagtgacatggatttttaaaaaccaaggatcctgtcctagagaaagcaatagttcaagtccctacctgtgccaccagcatgttaactatgacattgggactgaagatgtggccatatgtataaatataacagctctgacaaagcacaatatgttcaagtggtgattaaactacattacatcccaaaa

SEQ ID NO: 1887 - DNA, 405 bp, Homo sapiens
ttagccaacaatgatacggcgtccaccagcagttgtttgctacatttgtggtcgtgaatatggaacaaaatctattagcattcatgagtccacaatgtctgaaaaaatggcataatgaaaacaacttgttgcctaaagagttaaggagaccagtacctaaaaaaccagagtcaggaccattaytgacaaatwagraaaacagttytgaaatgcctktccaargrattatcttctgatgctgagacataaagacactatgtcctggcaacactgtgcatgagagggacctatgggaatttgctgtattctccaaaagtttctttcatacatcatcaaaccctttgaatgtaaaataaataataaaatacttaaaaaataaaaatgaataaaacttaaaaaaaaaaa

SEQ ID NO: 1888 - DNA, 256 bp, Homo sapiens
  SITE (37): n equals a,t,g, or c
  SITE (207): n equals a,t,g, or c
ccttctccatcactgcctcctacaacttccacatctnccttctgtttcttacgggtaaaatcttgtaggccatggtgaagaattcagattttgttataagtgcagaaaactactgaggagttttaaacgggaatgacaggatttgaaaatttctgaagatcattcttgatactggatgcagaatgcactccaggtcctttcgaatgntctcaaactcttcaatgtcatcaagctttagctctaggcgtgttggttt

SEQ ID NO: 1889 - DNA, 1020 bp, Homo sapiens
gcagcaggaggagacgacgtcctccattttgtcggaacgactgtgggaacttggaccccctaaaaaccaaacccgtggggccgggaaacttgtcctcggaagccccaactggactctcgcattcggccaagggaacaaccccggctgctggcgtctgcgtccgcggggccacaggggacgggcacgacggtggagagacccagacgcagctccccgcctccatcaaccaagatggagggagctgcgggctcccctggagctgggctcccaccggttggagggctgaggcctgccctgggcgtccttggcgccgccgtcctgtgtccgcagcccgggcgctgccctgcccaggcctctctaccgcctgccaccgtctcctggtcctcaatggttgatggagactccatggaggctccctccacagcccgctgcatcgcggggcgcactcgctgcggccgccggggggagcggagtcagggacagacgacgacaggcgcccgaggagggcgggccccacaggccacctccacgaggggtcttctcttttgttcctcgtctacacctacgtcttcggcggacgtcatggtgctgaaccatttccaagactcacgtaaagatggaagcgatgtcgctttcgtctcgccctggcggttcttagtgggattacaactgaggatgttggttattttcccacccaaatggatgggcgacttctcaatttcacgattatctgacaccattgcctattaataaacatatatgataatacagtttcaagttcaacacaatattgatgaacatgaagtttttagtgaggttaatcacccgtgaaagactgatgtgtaaactaatagacgcaacttacagaggataatctagtagaagttgaattcattcactcattaaaaaaaataaatcaagtaggctttccaccttgtactaaataccttgaatacactgttctcttttattgaaaaaaattaataaaatgtacttgaaccagcttttcaaaaaaaaaaa

SEQ ID NO: 1890 - DNA, 390 bp, Homo sapiens
  SITE (75): n equals a,t,g, or c
tcccttagaagtgggaaacccagagctctgttgatttcctaccacaacccagtaggggcctctctctgccatggntggacagctttttgaggaagccattcagctcccacagttgagctcccacagggctttaggtgtccattccctctcaactgcttagaggcagctttgagcacagccttcctggaagaagctaggcaagacctgccacacagcgaaggttgggtttacaagggtgacattggtacccccttggccaagagtaaagaagaacaagtctaagccttgcttttatcttagttgtctgggtggtagcagaacttcatcagctccttatcctcagtctgtttcctctataaaagatgagagatgttcactggactttgtgca

SEQ ID NO: 1891 - DNA, 612 bp, Homo sapiens
ggcacgagagcacgagaacctagaccgcccccgaagtgcggagaccccctgggcaggctgaaagatggcggcggcgtctgtctctgcggcttctggttctcacttgtcgtgtgcagactagggaaatgaagtacaatgttgaccagaattgataacagctttgctgagccatcaaggtctaatggaagcatggttcggcattcttcatctccatatgtagtatatccttcggataagcctttccttaatagtgatctacgacgctccccaagtaagcctacacttgcctatccagaaagcaacagcagagccatattttctgctcttaagaatcttcaagataagrttcgacgsttggaacttgagaggattcaggcagaagaaagtgtgaaaaccttgtytagagraacaattgawtwtaagraagtactggatgaacagatacaagaaagggagaattcaaagaatgaggaatcagagcacaatcaagaactgacatctcagttgttagctgcagaaaataaatgccatctattagaggaacaattggaatacctgccgaatatgaataaggcatgcgaaattgagagggcatctgtctaggagaaccag

SEQ ID NO: 1892 - DNA, 488 bp, Homo sapiens
  SITE (462): n equals a,t,g, or c
aacaacgctactttagagctcaagtcctttatgtttctggaaattctgctgaggtattctttgtagattatggcaataagtctcatgtagatctacatcttttgatggagattccctgtcaatttcttgaacttcctttccaggctttggaatttaagatttgcaaaatgagaccatcagcaaagtctcttgtttgtggcaagcactggagtgacggggccagccagtggttcgcctctctggtgagcggctgcaccctccttgtgaaggtcttctctgtggtgcacagcgtcctgcacgtggatgtgtaccagtactcaggggtccaggatgccatcaacataagagracgtcctcatccagcagggctatgccgagctcacggaggagtcctacgagtcccaagcaaagccatkgaagttyttcaaggggcctctttttccaagttcagttaggaaaacntgacagtgggctctgtggccttttcc

SEQ ID NO: 1893 - DNA, 621 bp, Homo sapiens
  SITE (8): n equals a,t,g, or c
  SITE (13): n equals a,t,g, or c
  SITE (25): n equals a,t,g, or c
  SITE (30): n equals a,t,g, or c
  SITE (49): n equals a,t,g, or c
  SITE (119): n equals a,t,g, or c
tctaatcncaggnggatttaagccntcggntactgatgatgatattggngaaataatccaagtagatggaagcggtgataccatcttcccaatgaggaaataggaagtaccaggggatncagatgaggaatgaatttctagggaatattgacgggggagatctgaaggtacctgaagaagaagctgacagtatttcaaatgaggattcagcccacaaacagtagtgataatgaagaccctcaagtaaacattgtagaagaggaccctttaaattctggagatgatgttagtgaacaggatgtgccaagacctgtttgacacggataatgtaattgtctgtcagtatgataagattcatcgaagcaagaacaaatggaaattctatttgaaagatggtgttatgtgttttggagggagagactatgtatttgcaaaagccattggtgatgcagagtggtaaaccttgtgagctcagtacatctattttgtgaacatcagttggactatattgcatattgtgaattcatttttattttgaatatagtccagcacagagctgttcaaatttttagttcactgtatggaatttaataaaattataattcagatgcagatacaatt

SEQ ID NO: 1894 - DNA, 370 bp, Homo sapiens
  SITE (66): n equals a,t,g, or c
  SITE (92): n equals a,t,g, or c
  SITE (271): n equals a,t,g, or c
tgcatggcacccaagaaggagaaaggaggaactgtgaacaccagttctaagatatgggaaccctcnctcatagctgcacagttcaatcagancgattggcaggcctccattgcttttgtggttgggaaccagattgaagatgatcttctcatccaagcccttaccgtggctgtccaggtccctcagcgtaaactcttcagtatggtgtcgtggcaagacattctccagcacgattaatgaaataaatacacttgttggatctgcttcatcnaaaaaggcaaaaaaacctgtaggtggtaatgctcctttatattatcgaggtaagtgaaagtgtttatagaagatatttttgtgtttttagaaaaaagaa

SEQ ID NO: 1895 - DNA, 221 bp, Homo sapiens
  SITE (218): n equals a,t,g, or c
  SITE (220): n equals a,t,g, or c
gatgcccagtggcgggaggcaaggaaggccctgcggggcagggcggactccgtgctcaaggggctgaagctggtsctgctcgtggtcaccgtcctggccctgctgggggcgctgctcaagtgcatccacccttccccgggcaggagaagcacacaggtgctggtggtgaaataaagcgagcccccggtgcacaagcggaaaaaaaaaaaaaaaaaaantng

SEQ ID NO: 1896 - DNA, 477 bp, Homo sapiens
  SITE (2): n equals a,t,g, or c
  SITE (19): n equals a,t,g, or c
gnggaaaaaaatcttcccnggacactcctggagatctgatgtattcatgaggattgttgacccaatatcaaatagaacagaggttaattgcatgaactgagctaatagaagactaaaataattttttgtgtgatctttttgtctgaaacattggtgattcttttcattttttgggttgtttacagcttttaacaattgagtaaaatatgctcttgtgrgcaaaatttaaagcatatttctttctctctacctgatttctccagaatttgaaaactatttttgagtattcttaatttataacaatatagttatttgtatgagctcaataagaatctgctttcttttgtaacaggacacaattggagactattattttactaaagctttgactagaatgaaatattttaagctataaacaaaacaacaaactgttttaaggaattgccattgacttatagagccaataaaagatcctta

SEQ ID NO: 1897 - DNA, 582 bp, Homo sapiens
  SITE (9): n equals a,t,g, or c
gagccgagnagtcggtatggaagatagatcggcttccagacaaaaattcaagtctagatcatccccattgtctgtcatacaaattagagcttggatcagaccaagaaattccctctgattggtatccatttgctactgttcagttttccgtgcctgacacctgtgcctcaaggacagaggtcaggtctctgggagtggagagtgatgtccagccacagaaacatgttcagcagcgagcttgctacaacatccagcctaaactctacagatctgtaattgaagatgtaattgaaggagttcggaatctatttgctgaagaaggtatagaggaacaagttttaaaagacttgaagcagctctgggaaaccaaggttttgcagtctaaagcaacagaagacttcttcagaaatagcatccaatcacctctgtttactcttcagttgccgcacagcttgcaccaaacattgcaatcgtcaacagcatcattagttattcctgctggtaggaactcttcccaagttttaccacggcggaactgggcatttcaaaytccatggcaaatttcattttcccggttatccc

SEQ ID NO: 1898 - DNA, 637 bp, Homo sapiens
  SITE (496): n equals a,t,g, or c
  SITE (593): n equals a,t,g, or c
  SITE (610): n equals a,t,g, or c
ctaaccgttttacacagatgtttgcagattacgaagcatttgtcattcagactgcccaggacatggaatcctggctgaccaaccgggaacagatgcagaactttgacaaagcttcctttctgtctgaccagcctgagccttacctgccatttctttcacgcttcattgaaacacagatgtttgccacctttattgataataaaattatgtctcagtgggaagagaaagatcctttgcttcgggtctttgacactcggattgataagataaggctgtataatgtaagggcacccaccttgcggacatctatatatcagaaatgcagcactttaaaaagaagcagcccaatcaattgagcagagactgatgaaaatggatcacactgcaatccacccacatctacttgatatgaaaattggtcaaggcaaatatgagcaggggttctttccaaagttacagtccgatgtcttggcaacaggaccaaccagtaacaatncctgggtaagtcggagtgccactgcacagcgcaggaaagaacgccttcgccagcattctgagcatgttgggctggacaacgacttgagggagaattntatgcaagaggcacgantttaggaaaaaacctgaggcaacccaa

SEQ ID NO: 1899 - DNA, 551 bp, Homo sapiens
  SITE (114): n equals a,t,g, or c
aaaaaaggagacggcatgatacccatgtagggaattccccaaagcagggcttgccatacctggaccccgaggagcctgcttgctggtaaaggctttcctgtctgatgtgcaggnggcagattgccaaactgaactcttcaaggggcaactgcaggggctcgagaccagccagcagtatctcatccttcgattacaggggatatactgtacagtcctttttctagaagtgagacrtacaagatttactctacaagaggaagattccaggggctcaaaaacgcaaaggtttgcactttgagagccccttggaatgttgacaactcaggatctaaaacaaagttctgtgttaatgagttacagaattcacgtggaagtcaatgtcactttataatcgataataatactgagtgaggaacactatgcaggaagaaaccttccgtagaaagacaggcagggaaaagcttaggctgaccttaaacttacctaatagagcaagcctgagatagactccaaaatggccaaataagagactgttatttcctcggtggccg

SEQ ID NO: 1900 - DNA, 484 bp, Homo sapiens
  SITE (481): n equals a,t,g, or c
  SITE (483): n equals a,t,g, or c
aaaaatcctgatgatttacctgtttaccctataaaggtatactttcatgatctaaagttgacaataatgacaataatatgtgtcatttcagggccattgattgttttaattaccttctctttatgaaaaacatgaccagttaattatagctccaaataccccacaccagacccacaacaacacagatgcacacgggtgcacacacatacacacacacaggcacatatttccccsgtctagttctgtattctactgttaagtccttattgagaatacttaaaatactcactgtgaagagtgctttggaaaatcttaaatggataatcataaagggatattgttttcagggtgtagcttccaatagaaaaaattgggggtttggtatttcaatgatactttgggtgtataatcgggagaggcccctttatgataggggktcccatagktccygtaaaaacmaggggtagtggtgaatctattngnc

SEQ ID NO: 1901 - DNA, 341 bp, Homo sapiens
  SITE (325): n equals a,t,g, or c
aattcggcacgagcagggggcggggggagtggggagaccccgctgctgcgcgacccctcgctggagctgctgggttcggggtgagcgggagtcggcattcgacaggtcccgaggccaggccctaggagtagaggctgtgctccgctggtgtccaagcaggactcttactttggcctcggtggccccatttcccctcctggagcccgtgttcttgtctgcaaagtgggatattgatgcctgtytytgtaaggtgttatgaatgattaaaggaatttataaatatgaagtggytggaaaggacgttggcatcccttcctggacattnaagctagggaggaggt

SEQ ID NO: 1902 - DNA, 116 bp, Homo sapiens
  SITE (100): n equals a,t,g, or c
gaagtttcactatattacccagcctggtcttgactcctgggctcaagtgaatcctcctgccttggcgtcccaaagtgtctgggattataggcatgagccnctgcgttccagcctgt

SEQ ID NO: 1903 - DNA, 289 bp, Homo sapiens
  SITE (271): n equals a,t,g, or c
  SITE (272): n equals a,t,g, or c
aattcggcacaggggctgctgtaaccaattacagcaaatgtagtggcttacagtaacacatttatttttttcttacagttctggaggttagaagctgaaatgggctgatatcaagatctcagcacaaccatgctacctttgaaaccactagcaggagtgtccaatcttttggcttccctgggaccacattagaagaagaattgttttgggccacatataagatacactaacaccaatgrtagctgatggaactaaaaaaaaaaaaaaaaanntcgggggggggcccggt

SEQ ID NO: 1904 - DNA, 362 bp, Homo sapiens
aattcggcacaggttgtgggtccaaggagacattttccgatccaaactgaaaaatcgaccatccagtgaaggaagtattaataaaattctttctggcctagatgatatgtctattggtggaaatctttcaaaaacacaaaacatggaacgatttggagaggataacttagaagatgatgatgtggaaatgaaaaatggtataacccagggagacaaactacgtgccttaaaaagtcagagacagccacgtacctcaccatcctgtgcatttaggtccagatgatacaaaaggrcatccaagrgcagtgttcccagcctttcagattaaggttcatccctgcaaggttttgcatttacttttg

SEQ ID NO: 1905 - DNA, 385 bp, Homo sapiens
  SITE (342): n equals a,t,g, or c
taattcggcacgagctccatcgggttcccctcacagtggcctcgttgttgaatctacctccaaatggcaagataaggtcccctaaattcgccggtggcctttgaggcacagttggttgcctggctttggaagtggctccatgtagaggatagtacgtgtgcaggagccttcaacagccgccctgcagcagggccaaggggtaccagctataccagacaccagctgaaggcatgtgtccacagcttctgtcttcggcatggactttctgaccaaagtgggaaccatccaccctttcagttgagrtaaccttttacccaacaaaggttgggcttattttttggnggattttgggcacaggccaccaaaaaaggatttttttcagggg

SEQ ID NO: 1906 - DNA, 409 bp, Homo sapiens
  SITE (2): n equals a,t,g, or c
anataaccctgtctcagacaaaggtgttatttagcaggtcttccaaggtggcagggggcgttggcaaggctcccgggagggaatatactctccagtatcatctttacctttgtgactgcatagatgaaggcagctaacactgaccccattcactctcgctggctagatataggcaggtcaggtcccaaaccccaatgtaatataggctccctctttcacactctgtcaatggcacaaagccctattgttaatacagttctctactcacactcaagataagagtaaacaacactgtccttcgactacacaactttcttcctctacacacatctgctctgacagctttcctccaggcgtctcatcacagcaatactgaaagggactgtgcaagccagttttgggacccgtc

SEQ ID NO: 1907 - DNA, 343 bp, Homo sapiens
gggtcatttctttattatattatttgtattggttaacaatgatcagccatgcaagaataaatgattattgtaaaatctgcaaacaatgtagatatgtagagagtcccttccttggagcttgaccttgtcagacaggtatagatgagtgttccrgggcagccgtaaaaactgccagagactgggctgcttataacagaaacgcatggtctcccagaagcccacattcaagktgtccaaaggcctggctcctggaggctctggaggagagcctgttccctgtctctcagcttctgccggttgccagcaagtgttgccgttacattcattccagccattggcttcc

SEQ ID NO: 1908 - DNA, 340 bp, Homo sapiens
  SITE (113): n equals a,t,g, or c
aattcggcacaggcactttgggaggccaaggcaggaggactgctgagcctgaggagtttgagaccagcctgggcaatatagtgagatcccctatctataaaaaaaaaaactgncaaaaatctgtcttctagcttctttaaattatgataggcattcatcagcaagggtaagatggcagtaagtaatagaaaatcccccgtaagaagagggactttgctttgttcaatactatatttacagcacctgaaatggtacttgggatacaataggtgcttaattattaactgctaaatgaaagaataggatttctgggttttgggcagtataatggcaatttaca

SEQ ID NO: 1909 - DNA, 260 bp, Homo sapiens
  SITE (239): n equals a,t,g, or c
  SITE (249): n equals a,t,g, or c
aggtccgcctagccacttaggcctggactcagggttctgcggaagttacacccctggtcagacgtggtagcactcccatcttattcaagatcctgtttgaaaattactgaggcagaaactaggrggtaattaaaaggcctcaaaaatctcgcctcattccatccacagaggaaactaatgaggttttgttttttttttctttgagacaaggactcgttacgttgcccagtctggttttngaactcctgnaggctcaaggg

SEQ ID NO: 1910 - DNA, 344 bp, Homo sapiens
  SITE (92): n equals a,t,g, or c
  SITE (131): n equals a,t,g, or c
  SITE (240): n equals a,t,g, or c
acagagtttgagacagaggtgaatggacaggtgtgcttcttagggaagcagtcgagaggtggcaagaagttggcagctgccctcaagagggncctggcaccatgggacaatgacaagcctcttcagcctgngaacagaagatgagattgaaattgagccagtacgacagagcagcgataaaatgctctactgtgaaggccgaatccccgccgactgttgaaaaagtgaaccagcccgggnggaattcggaaacagacctggagattgaagatgatgagaatttttcaccactggacaaaaggagctgtacctggagggcctgcaagctgatgggtgttagtgcc

SEQ ID NO: 1911 - DNA, 204 bp, Homo sapiens
  SITE (150): n equals a,t,g, or c
agcttctcagctctgaggcaggcagtgggcagcttcgcctccaccctccgtccagcgcccttcccatggggccatccgcctctccctaaggcactaaaaaccagtggaggagtgaggycatgttggcaaaaagggctckggcagcagccncagacctatagtcctaaatatccatgtacccagccctggggtcacgagccatct

SEQ ID NO: 1912 - DNA, 553 bp, Homo sapiens
  SITE (193): n equals a,t,g, or c
aattcgccacgagtttttttttaatcaagtttgttttgtattattagatctttgatatttgttttctgtgcctcgtgtcarctgaattcggcagctcggccgcctgttgccacaggtcctttcttccacggcgtcccttgcgggacccgccagagtgtgcttggcttccgcgtgtccgtgtgtctgcgcgtcncggcgtctgtcccgtgttccctgtgaggctgccacgcccaggcggcaatcgtgcgtctcgagacctgtgggcctgggcggcagaaaggcttcccgtggctgttgcacgctgggtgtccctgggtgctccaagagagccccacggtgggacgcaggcgtgacacgggaaagtttcttggctgagcttcaagacagagacagacagacaagagaacagcagcttcgagggagtgctacaggggcggctcctcttccatgggctcctcatctggtctcttttcggcgggcttcacgccacggacagcgaaggcaatggcggtgaacgtctcggcttcttcgttctcgcaatctgagcctcgat

SEQ ID NO: 1913 - DNA, 215 bp, Homo sapiens
  SITE (143): n equals a,t,g, or c
  SITE (175): n equals a,t,g, or c
agttctgttaggttgctagaatggttggtgccatcttgtcaccttgaagggaaagcccacccaagaatgacaccaacacagagggaagtaaacatagccaagaggtcagcagaggtggttcctggtgccattatccagcaccnagctacagaccaggtgaagttggccgggcacntagtcacaggcactggagtgatccataggtcacacacgaa

SEQ ID NO: 1914 - DNA, 511 bp, Homo sapiens
aggacgagtgtatgtctcctcgtggttgtgtggccaggcttttgtttcccttgcagcacttaaaatgctgggcatgcgtgtctagatacctcaccagatgtgttcccacccaccctgctggttgctgccacactccactgtgacttttcagagctcttgggctgtttctgttgcccttctcctctactggatgaccacctgctgtgagattatccctgggatctctgattatagcccaaggacacctaagaagtttctagggaaatcagatagccacgtaacgtttttcaaacttgaattagatctcttttctgcccaatggtgactattctttggtgcacactgtaggaaaatcaggtccttcctgtgctaaacttaaactcgatagttgttgagtgactccttttactagtgaatgattacaaatagagatccagagtcattttaaatcatggttctctttgctttatgtgtaatatctacttgacctaaactctcaatttctttagtg

SEQ ID NO: 1915 - DNA, 457 bp, Homo sapiens
taacaatctttccctgaaatacagccagactggctatttgtcatcaagtaacataattaacgatggattctatgattatggtcggataaatcccggcaccaaactgttgcctttgaaggrgctctgcttacaagaaccaagtgacctacgggctgtactcttaatcaacagtaaatcttacgtttctccaccttcatctatggaagataaatcagatgttggttatggacgaagatttcttcttcatcttccttaagaagatcaagtaaagaaaagaataaaaaaaatagttatcattttagtgctggatttggatctcccatagaagacaaatcagagccagcttctggacgaaatactgttctcagcaaaagcgccaccaaagaaaaaggatgggaggaaaagcaaaggaaaaaaagaagaggaaaaagtgaaagaggaggaagaggttatggtg

SEQ ID NO: 1916 - DNA, 510 bp, Homo sapiens
  SITE (407): n equals a,t,g, or c
  SITE (449): n equals a,t,g, or c
  SITE (460): n equals a,t,g, or c
  SITE (489): n equals a,t,g, or c
tgtttgactaaccattatgcaaacaaggaagtatggactttaatgataaaaacaatttagtatcacttgataaatagtttaattgaggctattacacctcatgtattttttttcaaatgtagacattgacatagaactcttactgaaatgcttttaatgtgtttacatttgtttttcacttagctgaatgcaatatccatacatctccttctccgggaattcaagtaaggcatgtctacaccccctctacaacaargcatttctcacccataaaacagtcaaccactttaaccaacaaacacagaggaaatgaggtctctaccacacctctgttagcaaattctttgtctgttcaccagttggctgctcagggagagatgctctatctggctactcgtatcgaacangaaaatgttatccaatcacacggttggaagaagggtttactncctcttgatgntggggctgcagcacacggggaaatggctntggtagggttcctacttcaga

SEQ ID NO: 1917 - DNA, 853 bp, Homo sapiens
tttttttttttttttttttttttttttttttttgaaatgtaagtatacagattttaatttatttttaagaataattgtatattttaaaaacaggacacgtactgtatgagtaaacagcgtggctaacaccaagtccacactggtaagcttttgagaaccatttacactatgttgacagtagtactgctgcaggcagacagcggaagaataaataatagtgcttcaagaagagtagtgattgagaggataggtaaagagggcgcctcatcgtggaagctagagcaggaacacctccccagtagtgacatgtgcaaagttccagatctccacgacaaagacagctcaacccaytggaacaaacagactcccaatgtggctggcaactgcgggggtagaagaactcaggcaaagtaggcacaggaatgggggagatgagagccaagggacaaacgccgagaaagcgttccgacaagcatgtgtgttcatacatgcatacccccaacaaagggcaatgcactgtgtaacagaactgaacacaatttaacaaagctgctcccagccttcctgtcacctctttggcagtagggcaggccatctcaacttcggacacacaaagacattctcttcaggaggaaggctgtcctgtgtggtggggacaaggcttcagttgyaagatggtcgtctctccttcttcctgaataagacaacgtaccactgttataagattccaagtgaattccttcagaggaagagaaggacaacataagarggcgtggwtgacagactttcagttaaactaacaaagaaagaacactgcagcaccatctatgcctacctttttctcagcgtttat

SEQ ID NO: 1918 - DNA, 198 bp, Homo sapiens
agctcgaacggtagctcctcccccagtctctagctccatgaccctcaaactcgaggtaggcaccatttcctttctgggtctccagctccatgaccctcagacttgaacagcagcaccagctcctttctgggtctccagctctcctgatcttcagacttggaatggcaacaccagcttgctgccccacgtctgccagct

SEQ ID NO: 1919 - DNA, 353 bp, Homo sapiens
  SITE (195): n equals a,t,g, or c
  SITE (269): n equals a,t,g, or c
aattcggcacgagcttacatctgatttttgtttgtgtcattcagcctgtcttctgagtaatgggcagagaaggaccagggttcgtagaagaagcatgtggcagctgagtggcagcagtcttgccctttcattttaatacktgagtacacagaaaatagaatttttgagtgactctgcctgtggatatatatactnatacatacatatatatatatacacacacacatatgtatgtatgtatgtattactattcagtctcttaaaaccanaaacagtagatccctgagggtagagctttatgtatgacatattgtcactgttgtaccaccttgcaggttcagcttaactaggtg

SEQ ID NO: 1920 - DNA, 308 bp, Homo sapiens
  SITE (285): n equals a,t,g, or c
  SITE (300): n equals a,t,g, or c
  SITE (308): n equals a,t,g, or c
aattcggcagagcacgttttgtcaggaaaaaggtagcaatgaaaacaggaaatgctttatcaattcaatatatacccttttctcaaggrttcccaattgsttcctacctaaactatgtgacatgggctgatgctttgttagaatgaagctagcagaatacatacttaagtgttttgtcagcagcccatggtgcaggccaaagacttctattagtatccattatctacattcactgcccccttaaatagaacatttcacttcttttctggcataagattgaccttnagtatcatccagttnactctatn

SEQ ID NO: 1921 - DNA, 324 bp, Homo sapiens
  SITE (154): n equals a,t,g, or c
aattcggcacgagtttggtgtctactaagaacttcacagactctcatttgatcttcagggtgttcccctgagacaaacgtcttacctccattctacagaggaggaaatgggactcagagaggaagagcaacttggccatggtggcgcactgtanacagagggctgggattcagacccagtgtctctaatggtgaagtcctgcttggtgacagcggtaggacaaaggaggcaaaggaggggcatttcgaatctggggggcaggagggaatgggcaccaggatcagccagcccatctatggcaagaaaaactggcaggtggttttg

SEQ ID NO: 1922 - DNA, 411 bp, Homo sapiens
  SITE (372): n equals a,t,g, or c
  SITE (379): n equals a,t,g, or c
  SITE (401): n equals a,t,g, or c
aaattcggacgaggaagaaatgaaacaactagaacacgacattggcataattgaaaagcacaagattatttatattgccaataacgcatgataccaacagcacaactttgaaaactgttagtattttgaactggaaatagtaacacgtgccttcttgctactctaaactgtctccaacacattgtttctgagctccacaaatgcaaaagatgtattttcctgtggcccatgacatttgcagttattcccagtgagaaatattttcagtattcgtaacactgtatatgatgaaaggcttctatttggrggaggaaattwagagmcacttacaaatcaagtgacacttttaaaggacattgagggtgttaaggngatagcnccttctagctaccacctggtanctattttttc

SEQ ID NO: 1923 - DNA, 244 bp, Homo sapiens
  SITE (55): n equals a,t,g, or c
  SITE (124): n equals a,t,g, or c
aattcggcagagctccctcccctactggacacacacctcgggttcctggcatctnagtgccttggaaacttttttttttctttttaaatagagacggggtgtcgccgtgttgcccaggcaggtnttgaactcttggcttctggcttcaagtgatcttccagcctcggcctcccaaagtgctgggattacagtcagccactgcaccggaaatgttttcaaccgtgacccataaaggcccagaccg

SEQ ID NO: 1924 - DNA, 417 bp, Homo sapiens
  SITE (181): n equals a,t,g, or c
  SITE (321): n equals a,t,g, or c
  SITE (398): n equals a,t,g, or c
aattcggcacgaggaaaaggccattgtggacaatggacgtgaataaatttgaggcctctgtgggttttctcgatgtcaaaaagttcctcagtacctggaagttgcagaatccaaggacccattttgttctttctccgcactgctttatgggaggcattatggcccccaaagacataatggnaaatactcatgctaaatccatcctcaattcaatgaactccctcaggaagagcaataccctctgtgatgtgacattgagagtagagcagaaagacttccctgcccatcggattgtgctggctgcctgtaagtgattacttntgtgccatgttcactagtgagctctcagaggaggggaacctttattgttggacatccaggtttgactgcctctaccngggaatttattgggctttg

SEQ ID NO: 1925 - DNA, 222 bp, Homo sapiens
  SITE (188): n equals a,t,g, or c
aattcggcacgaggagagagagagagagagagagaggaattcatgatttctttttaagttatagaagtggaataatgtttgagatattcattgcattacatttaccagaacttgagttcttaacatggaacctgagagtttctcgaattcttaagtcccttgggagaaattgattagctggatgaggnactgagaggaaaaatggtcagagatgtagcaagt

SEQ ID NO: 1926 - DNA, 473 bp, Homo sapiens
  SITE (419): n equals a,t,g, or c
  SITE (444): n equals a,t,g, or c
aattcggcacgagatgacctaatgcttgcttggaccagtcttccgaagaactgaccattgctggcatgacgtttacaacttttgatctgggtggacatgttcaagctcgaagagtgtggaaaaactaccttcctgctatcaatggcattgtatttctggtggattgtgcagaccacgaaaggctgttagagtcaaaagaagaacttgattcactaatgacagatgaaaccattgctaatgtgcctatactgattcttgggaataagatcgacagacctgaagccatcagtgaagagaggttgcgagagatgtttggtttatatggtcagacaacaggaaggggagtatatctctgaaagactgatgccgaccttagragtttcaaggtagttgtcaaagacaagttcggggaggttccntggtggacatacatgttacaaaccncttggtccagttaagtcggttccagggtt

SEQ ID NO: 1927 - DNA, 251 bp, Homo sapiens
  SITE (221): n equals a,t,g, or c
  SITE (231): n equals a,t,g, or c
aattcggcacgaggcggtgagggccccaggacagaagcagacagacacggctcctkctgtcgattccgatccagratgcctccaactcaggccgaaagtgttataaggagtattatacgagaaataggacaagaatgtgcagcccatggrgagattgtttctgaaactctgattgcttttatggtgaaagctgttgtcctggatccaagtaatggctttkncrtggatagnaccctcatgaaaagtgatgt

SEQ ID NO: 1928 - DNA, 385 bp, Homo sapiens
  SITE (355): n equals a,t,g, or c
  SITE (384): n equals a,t,g, or c
aattcggcacgagctctgttccaaagtgcttcttgtattgccagcatctcaccttatgggtatgtatgtccaattctaaaagtgtatatttttcaaacaacttggccttaactgcagatcagttcttttatctgttgttcagccaaaatggctacaatctggtccagtggtagaggaaactctagctgtgttaggtttccgggaaaatggcatgttgttctccaaaatggtgcctcaagggattttcaccctgcaagctgctgttatagcccaatggccacataagagtcaggaccactcaggagtcagggacttgggctttggtatcagkcacatctatccaagagtgggtttntaccctggaaacttttgggccaggggcant

SEQ ID NO: 1929 - DNA, 406 bp, Homo sapiens
  SITE (274): n equals a,t,g, or c
  SITE (393): n equals a,t,g, or c
  SITE (405): n equals a,t,g, or c
aattcggcacgagcggcacgagcagaaatcccttctccatttaggagctcagctttggttcttttcttcagttttggctctagtttcttacagaagtggcactaaaaagctcacctgttctctagtgctttgccaggggagaacttatgaccctactgttctgctctgttctcagaagaacagaagcatccccttccttccctacgctcaaaacttggcaagagggccctctctagccataacacagggcaagtggacactgcccagaagacgntcccagtcggagcaagaggtctacaaacaattccccttcataacctattatcagcctttcgaagsctcagatctggccatgtctttttagtctcatgttctcttaatwaaacaaawtgnaagtacagggtnc

SEQ ID NO: 1930 - DNA, 372 bp, Homo sapiens
  SITE (45): n equals a,t,g, or c
aattcggcacgaggacggttctgttacagaaaagcagcaccgggnagaggatgaagttgactccgttctcctttcagcgtccaagatcctaaattcttcggagggggtgaaggaaagtggctgcagtgacacagataaggaaacgggcacagagaggttaactccctaaggtcacacaggcagcgaggaatggagcgggcattcagcagggcggctccggactrcctgtcttcaccaccacgctacgctccgttccttctctaaatgctaaaatatggctgcatagcagaatcagaaaatcaaatccaaccacaatcagcattgaaagtccttcagcagcagttggaattcatttccaggctttgcaaatgc

SEQ ID NO: 1931 - DNA, 398 bp, Homo sapiens
  SITE (327): n equals a,t,g, or c
  SITE (345): n equals a,t,g, or c
aattcggcacgaggaagcccccgacacgcccgccacagcttagaagcaaaattaacagactcatcagattctgagcttctgcgggatattttgcagaagactgtgaagcatcctgtgtgtgtgacgcacccgccgtcagtcaagtatgcccggtgctttctctcagaactcatcaaaaagcacgaggctgtccacacggagcctttggacgagctgtatgaggtgctggtggagaccctgatggccaaggagtccactcagggccactggagctatttgctggactktcctagagcttggcagtggtgctkgcctcacagccctggncatctgcaagtgtgccgncccgggcatacatttcagcgattgtcacagcgggtctcaacagttcgagggat

SEQ ID NO: 1932 - DNA, 337 bp, Homo sapiens
  SITE (317): n equals a,t,g, or c
  SITE (323): n equals a,t,g, or c
  SITE (337): n equals a,t,g, or c
aattcggcacgagtgctgctcctccacctggaactgaagcgctgcctcttcaccgtggagcccttgggggataaagagccttcaccagaacagcgccggcgcctcctccgaaacttctataccctggtcacctccacgcacttcccaccagtgcctttacacgtaatgaaagaatgaaatcacttcatcctcacagagccagggccaccagagaagacagaagatgaggtctaccaggcccagctgcccagagcttgctacctggtgttggggactgaggaaccaggcacaggagttcgtcttggttggcttgcagnttgggnttcggcgggttgtn

SEQ ID NO: 1933 - DNA, 308 bp, Homo sapiens
  SITE (103): n equals a,t,g, or c
  SITE (293): n equals a,t,g, or c
  SITE (308): n equals a,t,g, or c
aattcggcagagccaacctgaagaaaagaagcaggtggaatatgccgtcttaagaaatattacagaattaagaagaatctacagcttttacagcagcctgggntgcggccactctctggataatacctttctgatgacaaagcttcacttctggagatttctaaaagattgcaaatttcatcaccacaaactaactcttgctgatatggacaggatattaagtgccaataatgccataccagttgaagaatccattctccatttacaccaatacttttgagacattttgattnctcctgcatttgggn

SEQ ID NO: 1934 - DNA, 370 bp, Homo sapiens
  SITE (300): n equals a,t,g, or c
  SITE (316): n equals a,t,g, or c
  SITE (356): n equals a,t,g, or c
gagaaaagcaccaacaaacaaatccactcagaattctccatttctagattgcccagaactaggccacggcagctgggttctgagcaagacagtgaggttttcccttccgaccagggtgtcaagaagaattgtaagcagattgaatctgctaaattattacctgatacacccgttcaattcatacctccaaatacattgaaccttcgtagctttaccaagatcataaagagactggctgaactgcatccagaagtcagcagagaccatattataaatgcacttcaggaagtgaggataagncataaaggttttctgnatgctttatctattactacttattgtgggggtgccttcantcttcctgaaaact

SEQ ID NO: 1935 - DNA, 305 bp, Homo sapiens
  SITE (290): n equals a,t,g, or c
gggcctccggggccgaggtgggcctgctcattggaagatcgcatcgcagccatgagcagtaaggatttcttcgcgtgtggacactctggccattgggctcggggatgccctagaggaggagctggagggcgaagaggtggaggccatggcagaggttctcaatgtggttccaccaccctatcttacacctgttactgctgtggtgagtccggtcgtaatgctaagaactgtgtccttctcggaaacatctgctacaactgtgggagaagcggccacatcgccaaaggctntaaggatcctaaacg

SEQ ID NO: 1936 - DNA, 417 bp, Homo sapiens
  SITE (351): n equals a,t,g, or c
  SITE (363): n equals a,t,g, or c
  SITE (378): n equals a,t,g, or c
aattcggcacgagctaccattataatacccattattcaacagcaacatctactttatcctggcttgttcgaattttatgtcccaggcactacctattacccataaacgagatttgttttggcttttaaatggaatgaagagaaggaaaagaagaacagaacagaactacaagaagcgaggatgtaaaagattattatgagatgactaagcgaaaatcgtgtaagacagaagaatgaagaagttgagtaaagagaagaggcaacagggaaacggcattagatgcccacgatggrattagttgatctgtaatcatccaaagcaagaaggctgttagtgtcttcagaggggacnaagggggtatgntagattacagagggncaggtactttccatgcaggcaaggacccttcacaacctt

SEQ ID NO: 1937 - DNA, 421 bp, Homo sapiens
  SITE (185): n equals a,t,g, or c
  SITE (358): n equals a,t,g, or c
  SITE (391): n equals a,t,g, or c
  SITE (419): n equals a,t,g, or c
aattcggcacgagccaacctcctggtcccagaaacctggccgcatgaagtcagcgcttcccatgctggaagaagcaagcagccccagggtggaatcttaaaaattaatgaagagcatcggcggggtgccattcaggacttacttgcaagcccaggatttacatttggaaagcgagtggtgtttgnttcccactgtttaaaaaggcaacacacgttcgctgatggtctacattccagctgcactagcagtaagcttgcaccaagtgccactgtcctgccaagcactctcctgaatcactgcgctggagtctcagagccacctgatgtgttcttgtaccattataccctttttgcaattngggggcacaaataagtggggttaagtaaccctncagggtcacattgttgtaagtgacctgngg

SEQ ID NO: 1938 - DNA, 557 bp, Homo sapiens
  SITE (542): n equals a,t,g, or c
  SITE (549): n equals a,t,g, or c
aattcggcacgagttttaagtttgcaaatcttttatatttccagctgttgagacagtatttttgagggctgatgttacctctagcggcgaaaccagagccagctattaagcagccagaaagctacagtaattgaatacatgaccatttctcttttagcacgttctttgttctcctcttccagaagttgtagacgtctatttagtttgattatctgtcgtcttagtgaagctgcatctacaacagtcaggtcatctgacgttccttcaatggttgtatctatatttgaaatgccatacgtgtactccggtgcagaaatcggtgcctggaaccttgaaattttatttcttggggcagaatctgatctgtgccacagagaatcatttctgaccagctgtccattttggcgaacagcattttcactcatagaccgctctctttttagtctgccaactgctcggatttcttcattttgagggggttgtaggaggtctttctaaatccagaaaatctagtggtctttcactcagcgtaagtacacgangtggtgntttcagtg

SEQ ID NO: 1939 - DNA, 315 bp, Homo sapiens
  SITE (216): n equals a,t,g, or c
  SITE (219): n equals a,t,g, or c
aattcggcacgagctctgaagcagaaccctgccccgctcacttggtggtcggctgaatccagttccttgggcttacagggctgaggttcccaatcctcgatggccgtgagccccggctgttctgcgctcctggggcctgccgcgtttctgcctgaactctccacactgcccctccagcaacagcaggtcaagccctcctcacgcttcgaatccctncgnctgcagctggaggaatgttttctgcttttaagggctcatgggattagactgggccacccagattaacccaggatcatcctttcttgtattgtcaag

SEQ ID NO: 1940 - DNA, 403 bp, Homo sapiens
  SITE (386): n equals a,t,g, or c
  SITE (401): n equals a,t,g, or c
aattcggcacgaggttctaccagttgcacaacaagggtattcatttcccaagcctttgataaatatgtctttgtcacctgctgtgtgtagtggaactgaaaacactcattaccaacttttctgtcacctccagcagtaattctcttctcctttccaaggctgcagtaaagtctcccaaatctcaggaacttagcaaaataaaggatggccaccaatgccaattacatttcatgaagatagaaagccgatatacagttaaaaacggcatattagamctccacaatgacaaggaaawtggrgatgcaaatcagcaawtgaagrcttgggggargaataccctmcaaaacmccaaattttccttargttggggaaggcagaaccagganggggcagaaccaggngg

SEQ ID NO: 1941 - DNA, 298 bp, Homo sapiens
  SITE (116): n equals a,t,g, or c
aattcggcagaggttctgggccttgaatttgatggggcttccttatgaatcaaggtatatttctagtccacagggatggactctccctgccaagtgccttcatgggaaccatgtgnacagttaaatttgattcatgcaagatgcttctctgggcaaatttcattgtgagttctacatgccaggaattcctacaatctgtcatctgagaaagcccccagaatgctgagacaggagccaagctctgccctgtatgccagaggggtgatgattctgtttgtgaaaatttagttgctcagaa

SEQ ID NO: 1942 - DNA, 435 bp, Homo sapiens
  SITE (335): n equals a,t,g, or c
  SITE (371): n equals a,t,g, or c
  SITE (380): n equals a,t,g, or c
  SITE (402): n equals a,t,g, or c
aattcggcagagcagaccccaaagctgcgtgactgtaccatcacagaagatggagagttgcatgcatccagtgcaggtgtttgaccaagcagggaaattaaaagaccaaaaggcaagggagatcgagaggctgatacaagcagtgattgaaatatgaaccatggactctaccatagatagaaaagttggaactgatagatggagaaaaaggaatgctaccaagcaagagaaagtcctaatgagttaaaaggcacggctgggagtgggagatctattaaactgacagttttaaaagattcatggtcaaagagtggggatgtttagaactggtgggntttttatgggaaccattttccatgtggagggccaantctttacantgtgggccccaggagtggggtnggctttagggcagattggggggaatggttcact

SEQ ID NO: 1943 - DNA, 332 bp, Homo sapiens
  SITE (322): n equals a,t,g, or c
aattcggcacgagcggcacgaggttcaaaaattcctggcctgggacaaagacctgagggtgtcagacaagctacctggccagtgacatggaggaggacaaccaggccccgaaacaagacatcttctccttcctctacgggaagaactactcccagcgacccttgttccataagcttcgataccagctcctctgttccatgcgctggaggacgtgggtttccccagaggagatggaggagatccaggcttatgacccagagcactgggtgtgggcccgagatcgcaccctcattttctagagttccggggacatggaggcctnaggtcatcgg

SEQ ID NO: 1944 - DNA, 356 bp, Homo sapiens
  SITE (320): n equals a,t,g, or c
  SITE (352): n equals a,t,g, or c
aattcggcagagttgaaatggacctaaacagtattgtaaactttttttattgctttcttaaaaacacaaaatcatcatcttagcatcctccaaaaagattaagaatagaagttgacttaaaagttagtaatacctctgaaaatcatgattcagaagaaaagaggtaagtctattgaaatagagatttaatttgcctcttttattgttaatttcaggacattcaacttggaaaatgtccattctaaagcattacgtatagaaaamcactatttgggccaggcatagtggcttacactgtaatcccagcacttgggaggccnaggcaggtgggtccattggggtcagggttccngacc

SEQ ID NO: 1945 - DNA, 338 bp, Homo sapiens
  SITE (319): n equals a,t,g, or c
aattcggcagagggcagtggagggggataaggtatctgcagctggagtctggggccattcagacaagggagtagacagagtggcaagaggtcgggaaaacagcaagaagttagcagatgggggtaactcgtttcctggggctgttggaacaaattaccacaaacttggggcttcaaacaacagaaatgtctactstcacagctctggcggctagcagtctgaaatcggtttcactgagcagaaaatgaaattaagatttctcacaccaggtgttcaaatcccagagagaaacttcctcttttcagtctgacatttcaantgtgttgatacatacccgt

SEQ ID NO: 1946 - DNA, 342 bp, Homo sapiens
  SITE (246): n equals a,t,g, or c
  SITE (339): n equals a,t,g, or c
  SITE (340): n equals a,t,g, or c
gaattcggcagagcacaattgccttctgaagctacttgaaacagggcatgggacttaaaggagaaaaaaaaggaaatggaccatctcttctaacacctggaatgtgatccaagcctggagacaaattgatggtttgcagctagaagacagtaaatctagcaatggagcccatatatgaggagtacctagcaaatcatggaacaatagtaaaaccatattactggctaagcttctctctcgattgcnctaattgtccttaccatattcgaacaggtgaagaagcaagagtttccctcacagaatttttgtcagatttttgggttcccttatgggacaacnntt

SEQ ID NO: 1947 - DNA, 192 bp, Homo sapiens
  SITE (129): n equals a,t,g, or c
aattcggcacgagaagatttcatcacactgctcaaaattgcacaagatttaaaacttacgaattgtttctttctggacgtctkttctatatttgtatactgtggttgaccataggtaactgaaccatgncgatgagatggtggggactattgtattcccttatggcaacaattaatagggagctgagttgca

SEQ ID NO: 1948 - DNA, 416 bp, Homo sapiens
  SITE (362): n equals a,t,g, or c
aattcggcacgaggttttttcctgtgagaggaacattaagactcctgggagggctggggctaacgcctccgagagccccacctggtcagcctagggttagacgtgtagccagggtgctgggagggggccgctgctgggccccagatagaggggtagaggccgctcaatcacggagccaggccccacctgctgtagaaaccgccaccgagagccggccgggcttgctgcacgctctggattccgcctgcctataggcgaggcacaagggacttcgaagaccaggcctgaaggcagagaggtmagmaggcttcgggggcctctgttccagcggacaacaagcgcaccggggcgggaacggccgncttccccaggcgttgcagcctagcttttcatgtgacccacggaacttagcccct

SEQ ID NO: 1949 - DNA, 384 bp, Homo sapiens
  SITE (377): n equals a,t,g, or c
aattcggcacgagcagcttcagccttcactgggtgcatctggttcacacctgcacacctgacatccatgtagctggcagagttttatgcagagttgttttgttgaccttgctgagggagacgacaaaacgttcaaagactaggggaggatcacgcccgccgaggggcacttgctgacacctagatcagaaagttcttccatgggaccaggaaggggtatgagacctctcagaatatgtccctgatgctcataatgtgtggccactaagtgttctgggaggractgcagcttaaacccttggacctayttccacagytccgwtagcccccacgtttcataaaccgagctgytgaaaccacmgrgraaagtcacgttgnccagatt

SEQ ID NO: 1950 - DNA, 331 bp, Homo sapiens
  SITE (280): n equals a,t,g, or c
  SITE (291): n equals a,t,g, or c
  SITE (330): n equals a,t,g, or c
aattcggcacgaggtttgattcagaaaggcggggcaacaaagcaggggcttccagggtataggtaaatttaaacattttctggttgacaattggttgagtttatctgaagacctgggatcaacagaaaagaaatgtttgggatgagataaaggattgtggagaccaagttttactgcgcaaaggaagctctcagatagcagacttcagagagagcaggttgtaaaatgtttcttattggaattagaacggtccctggctcttagttgattatctcctggnaccagaaaggnaggaaggaaaacaaaggggagaggagattctctacagant

SEQ ID NO: 1951 - DNA, 417 bp, Homo sapiens
  SITE (2): n equals a,t,g, or c
  SITE (4): n equals a,t,g, or c
  SITE (387): n equals a,t,g, or c
  SITE (390): n equals a,t,g, or c
gntngctcaagcctttattatattgaagaagaaggagaagcagcagcagcccctgtccaccctcacaggctagaaatcatatttgttctccatgataattagtgtggtttttatatctctccaggtgacacacagtgaccttcctcaggagagtggaagctctgcaggtggggataataggacctacctagctgggctgttatgaaggctaaacgaggaaacacttgtaaarttctcagaactgtgcctcgaacaaggtttggtttcaactatccatttagtccagtctttgaggtttgtacctgagttaatctgccacttatgatttggacacacacaatgggrtggactytaagtctagtatctkgggggcaaaccctaaagatnccnggcaatatttggccaaggaaacctttt

SEQ ID NO: 1952 - DNA, 367 bp, Homo sapiens
  SITE (302): n equals a,t,g, or c
  SITE (305): n equals a,t,g, or c
  SITE (320): n equals a,t,g, or c
agcggcagagttccgctcccgcccaggactgtgcgctcggctcgcggtggggtccggcgggcgcggcttcggcgggcggcacctgcagacgagctgcgggctctgctgccatgaaggtgaagattaagtgctggaacggcgtgrccacttggctctgggtggccaacgatgagaactgtggcatctgcaggatggcatttaacggatgctgccctgactgcaaggtgcccggcgacgactgcccgctggtgtggggccagtgctcccactgcttccacatgcattgcatcctcaagtggctncanggacagcaggttcancagcactgccccatgtgccgccagaatggaagttcaaggattaggcc

SEQ ID NO: 1953 - DNA, 355 bp, Homo sapiens
  SITE (285): n equals a,t,g, or c
  SITE (309): n equals a,t,g, or c
  SITE (337): n equals a,t,g, or c
aattcggcacgagggacatctcagtgggctgagatgggtaggctgggcttggggactccccagtgaccacagatgggtcgcctgggcttggggacacctcagtggccataaatgggtaggctgggcttgggaacacctcagtgcgctgatatgactgggccaggcttggagactccccagtgaccacagatgggtaggctgagcttggggacacctcagtgggctgagatggctrggcaaggctaggggactccccagtggccacacatggatagtctgggcttngggacacctcagtgggctgaaatngggtagcctgggctttgggacacctcantggccatagattaggtag

SEQ ID NO: 1954 - DNA, 441 bp, Homo sapiens
  SITE (154): n equals a,t,g, or c
  SITE (376): n equals a,t,g, or c
  SITE (401): n equals a,t,g, or c
  SITE (411): n equals a,t,g, or c
aattcggacgagccaaaatgcacagatccgtcctgtcgctcaacctcaattgtagttcccacagattaacagcagatggagtagatggcctagtgaacagagagccaataagcgaagcctgaagcaggagctcctggagggagaccaggacctngtaggccagcgctggaacccaggtttacaagaaagtcacttgaaggaaaccccatcgttgaggcgggtgcatttggggaccggcgcttgtccttggagtggttcttttccattggaaaacacagaattggcaaatgtgggagctaaccaagtcactgtaagaaaaggggaaaaggaccatacaacttcattgtcacggcagcgatcatgccaaccaactgtncattcaaattcctggctggagttanaggggcagtncacacaaaagttttttctgggaagcagcaa

SEQ ID NO: 1955 - DNA, 422 bp, Homo sapiens
  SITE (362): n equals a,t,g, or c
  SITE (363): n equals a,t,g, or c
aattcggcacgagacgaaataattctctttattgagactacttgacaaatactttatgctaaaaattttgtcacctaagtgtttgggaggctttttcttattaaaggttggtattggtcctgtcatgtggttttagagatactaacagagggctagagaaagcatcttctgcagaggaagcacttatgggaacagtctgtgagattgatgtcctgagaagaccaagatatcaggaatgaggaataggggcctgaggagagaggggaagggtacagagaaaccatctacattccatggaatgtttttaataagtaggcaagaaaaatgccactaatcaaagcattaagtgtgtccattaatgnnggccatcatataaatctttccctaatcttaggccattggcctttttttgggtcttacta

SEQ ID NO: 1956 - DNA, 750 bp, Homo sapiens
  SITE (692): n equals a,t,g, or c
  SITE (719): n equals a,t,g, or c
  SITE (743): n equals a,t,g, or c
  SITE (749): n equals a,t,g, or c
aattcggcagagggaataagccatttacattagtgcaagatagaaagcgagtccagatgaatttcattgctatagtttttcataaagtactatgttatctagcagcaaatataataaatatttatttttaataacaaaagatggtttaacatcaccaaaaaatatgatcactaaaaactgcagacatgctggcatgggtgctaacttaaaaatgagatgaatatgggacagagcgtttccatttctttacctactgccaaaacagatgttgaattagggtccaaggttttcttctaattgcaaaattttgcaaaaattttaagggcaatgaaaatttgttgtgcaaataattatgcatagtctgtagattaaaatggttcaagtataacaaataagttttgatttttaaaaacagttccatgcatcacataccactgataaaatcaactagtaaaataaagacagtctttcttggataaattgaatttttaattaagctgtggaaacatggcatcagtacagggattcagctagtctagccagctatgcactgtttgattctgtgggcttggggaagtaatccttatttgctatttccaaagagtcatcttgagcctgagggatcctaggagagttgttgggaaaatgaggtggaaattttcctacttggatggttttcttaaggaagtttntaacaggcacaggatgtgcccgggttnggcattcctacccctggaggtgcnttgaant

SEQ ID NO: 1957 - DNA, 318 bp, Homo sapiens
  SITE (272): n equals a,t,g, or c
ggcacgagctcgtgccgctcgtgtcgcctcactccctctctagtaatgcaagaactgcggtccccagcccggtggaggcagcggcggcgagcgatcccgcggcggcccgcaatggactggccgagggcaccgagcaggaggaggaggaggaagacgagcaggtgcggctgctgtcttcgtccctgaccgccgactgcagcttaagaagcccttcgggcagggaggttgagcytgggggaggatcggacgatacgatatgtccgatatgaatncgagctacaaatgcccgatatcatgagactgatcaccaaagatctt

SEQ ID NO: 1958 - DNA, 292 bp, Homo sapiens
cccaccctcagactcacttgccggtgaccaagtctggctcacaacatcagacatttctttcctttaggaggatttagattttagaggtcctaattcagtctggactctggtttcatacaatagaatctggcagtggtaaacttaaccatatggggaatggatcagaagagtatgaagtaacccagcaaaaggctggcatcttgcaaaggtggatggagccaagactcttctgagatttcataagtggctttgctgcctgaaacaaagatagccaaatgaagggatgagcagt

SEQ ID NO: 1959 - DNA, 369 bp, Homo sapiens
  SITE (327): n equals a,t,g, or c
  SITE (366): n equals a,t,g, or c
ggcacgagcccctttgaggatgacctcagctgacaaaagctgcctaacctagcctacacactcttcataggtagccttcattcaatgactgatgaacatgtggttataaaagcctggccacttcaccccaattcaggacagctggtgttggcccccaaaatacttcctaataaatctcctgcatgaaatcaccatctcaaagtgtaccttctggagaatacagtgtttggaaagcagtaagtcatggctaaatacagcaatatgctctggagttcacttggatacttccctaggcaaaaggcaagtccaattatggataaacatggntagactacgagctcaacatcaagaaaagccatttcaccnatg

SEQ ID NO: 1960 - DNA, 422 bp, Homo sapiens
  SITE (407): n equals a,t,g, or c
  SITE (417): n equals a,t,g, or c
tgtattcattcaataatcaagtctagttaaattgtttgaagccattttaatgtttaaaaaaatactaaaagaggccattgaatagtcatggaaaaagaaagcaaattattgtttttctttaagtatcagttcatctgatagatgtgggttaccacaaagcattggtggctcaccaaaaattgcctgttggtagcctgtgtttgcaaactgatacctctctatttcatggagtgatatcaattaggttatacttaaatacttcaaatgcttttggttgtctattggtttgggttttaaattagtacacgttaattgttgaattgggtagccacattttgtttgttttatgtatatttaaacaatgtgaccaaaaatactttttccatttgcggcacattggtggaatnatggggaccnttgtg

SEQ ID NO: 1961 - DNA, 574 bp, Homo sapiens
  SITE (69): n equals a,t,g, or c
ctccatgtaggtccacgtttaggttgggaggatctaccatgaagaaggtcaagaagaaaagggcctctnattcgcgccggcccgcattcctgctcctgtgccacttgcccctgcagctccgcttgctggcgtcgtctggggctatgccatagccgcatcttcgatgtccttctgcctcgggactggcagatggcgccagggagaggactccccaacctgctcaccttctacagaaaatcttcaagaaaaccctccagtcatcgtaacgcgtgtcctccaagccctcggaactgtggctgtggctctgggggctctaggagctgcctactacatcactgaatccttgtgaacaagcccctaggcccacagtctggcaggaggtgcttttaatgtgctgataaaccaacctcaggaaggtattatgtacagaagattcccaaggctgctgttgctgaaagagacttgggctactgccagggaactagaaacgtgctgagaagaggactgcaatgactgctttcaaaaatgcaataaaaataaatggcaaacaagcaaagtgaaactaaaaaaaaaa

SEQ ID NO: 1962 - DNA, 427 bp, Homo sapiens
aggctggtcccccccagcacttcccyctwctaggtgcatctkaaaacccmcmaaccmccttctttaccagttttcccatccccaccccttagaactctcaggtcccttttcctgcccccatgtccccatttgagttaaattcagatccacagcttgcaggagaaagtcagtggccccagacacacgtaacagggtgagcactgaaataagagcacgctggggcgtccacaccaagggactacgccccagtctgcccacctatcttttctccatcattaacccagcgctctttctccctggacttccaagtaccaatgaccttggggcttctttgcagtttaaagggaaaatgctctacaaaataatttcactttcaaacatttcagcagaagaataaaatcttttttctgaatatctarwaaaaaaa

SEQ ID NO: 1963 - DNA, 463 bp, Homo sapiens
agagaagggagcaatggccagtcaccttcaccttctaactaactagcctccggatgaggtggctgccaccaggcccgaatggatccccaggagcccagcttccaaaccccaacatcgaatcaaacatctcccatcccccaagtgcagtaacacacaaaaaccaaacactctgcccygggaaaggccctggtgcgattctcagtaggactcacacccaccctacctagaagtactgggctggccctgggtactgcatccgtgtgttttgataagggggtgatgtggccacgcccttatctagatttcactttgtatccactgggcacagatattctagagaacttatctttcactcttgtaaaagccacatatccacatctctttcattttctcagtgtgttatgcagcaatttattaaagtatttattgtctaataaatactgccaagtggaaaaaaaaaaaa

SEQ ID NO: 1964 - DNA, 442 bp, Homo sapiens
  SITE (1): n equals a,t,g, or c
  SITE (278): n equals a,t,g, or c
  SITE (421): n equals a,t,g, or c
naattttttttttttttttttttatttcatatgcctttttatttcatgtcaaatgtaatatccaaacaatgttgaggtatttccagaactgcctatttggacatttaaaatcttttgaatattcttagttcttggcccgctcattcacatttgagagcacatgacacaagagggttcccatagcctcccacaggtaaaacttctgcagtgacttccagggctactgattcagcaatagagacaatattctgatttttttttattacatttcccagggntaaagcctgcagggttttgcccaggattacatttctgttcatgggrgtattccagtgagggcctctatctgaggttaggattttcattaaacatcaccaaagtgaactctcattggaatggctatttgggctttgcttggggnaaaaagggcacaaggcctctc

SEQ ID NO: 1965 - DNA, 312 bp, Homo sapiens
cggcacgagggaacctctggcctgcagttccagatccaaggtgactgagacaaactgccrgctgccactggcttatcaggagcacctggagatggcgacatgctcccaggctgagagccttcctctccgaacccattggagaaaaggatgtctgctgggtggatggcatcagccatgagctcgcgatcaatttggtcaccaaaggtatcaataaggcctacatcctgctgggacaattccttctgatgcacaagaatgaagccgagtttcagaggtggctcatttgctgttttgggtgccacttgagtggtg

SEQ ID NO: 1966 - DNA, 541 bp, Homo sapiens
  SITE (40): n equals a,t,g, or c
ggcacgagggggcagctgccatcaggtggggacacttaanaggagccccaggagcctccccatatggcaaggaactgagamctgctgccaacacccaggaccaatttgccatccatgagagtgggccgtctcgaaagtgggagaatgtggtcagtgtttcagccagtgcttgctgctgaggcaggagagaataattgtgtaaagagggggctcccgcagtgcaggacaggaagccaccatgtgagcaccacatccacgtgcaggtcgcaggcttcatcatgtcctgaataccatgccttagcattttatttagatgagatcatgtgactggatccctcatgatgagatgagtgcccccaaaagaagacaccagagagcttgcttctcattccacacgcatgctccaaagaaaggccatggcagagcacagagagaaggagagctcccaccagaacctggcaaagtgtgctgctggcatgcttgtctcataattctgccctccaggactgtgagaaaataagtttctgttgcttaaaccaaa

SEQ ID NO: 1967 - DNA, 375 bp, Homo sapiens
  SITE (55): n equals a,t,g, or c
aaacacaggttctcactatattgcccacgctgctctcgaactccagggctcaagngatcctcccaccccggctttccaaagtgttgggattacagacatgagccactgtgcctagccacagaactttgttttaacaagtttgtcaccagaacacaagcaccataagctccacaatgtagcctttagacacatatactcatgatctacagacatatatattcataatctacaaatgagacctgataatagaactactgggtgttagatacacactgaaggtcaaacatgaataccaccaccaccgatatttccctgaagatatctgaacccagcaaggactgttggccactgattctgcggaaccagaagtttttt

SEQ ID NO: 1968 - DNA, 1120 bp, Homo sapiens
  SITE (126): n equals a,t,g, or c
aggcccaggttcacaagttgagagaagaattgatcaatgtgaactcacagcggaaacagcagctggtagagctttgtcttcttcgtgaagaggaaaagcaaagggctacaagggaacatgagattntcgtcaataaactgaaggctgaatcagaaaagatgaaaatagagctgaaaaagactcatgctgctgagacagagatgacactggaaaaggccaacagcaagctgaagcagattgagaaggaatacactcagaagcttgccaaatcttcacagatcatagcagaacttcagacaaccatttcctctctgaaagaagagaacagccagcagcagcttgccagtaaaggcggctccaggatgttagacaaaagtttgaagatgagaagaagcagctgattagagataatgaccaagcaatcaaggttttacaagatgaattagaaaaccgttctaatcaggtgcgatgtgcagagaaaaaattacaacacaaagaattggagtcacaggaacagataacttacatacgacaagaatatgaaacaaaattgaaaggattgatgccagcatccctaagacaagaacttgaagacaccatttcctccctaaaatcacaggttaattttctgcaaaagagagcttccatccttcaggaagaactgactacatatcaaggcagaaggtaactgcacgagagaatgcaacggatgcaatttccaggctgtgctgtggacttcttccagcaggtttgaagatttggatattgtaaactgtgagatcagtggcattttttaaatccttaaatgtaattaagatcataaaaacatgcatcattcatacactagtggggtggttttatttgtgtctgcctaagttatttttttaacattccttyatttccgattttcatgtttgtgtgcatttgagtatgtgctgagaactgcttatattgggcaaagtgatttcctatgatatgccttgttaatccttttgcatagaattttaccagttgcgtacgatcaaaatcacgtttgtagtatcatatcaaaaattctaacctgtttacattgttttcatgttcatgttcctatgttattaaaatattattttgtaaaaaa

SEQ ID NO: 1969 - DNA, 435 bp, Homo sapiens
  SITE (27): n equals a,t,g, or c
  SITE (421): n equals a,t,g, or c
attgccatccatggctgggagtctgtnagggacagatagaaggggagttttgaggaagaatcacgtgatttggccattgatggccctgggtggccaggaaatgggaggagctggagatgtcaccacccgtgcctggtagaatggtgggtcaatgaacagccaaggaaaccacaggatgagagggctctggggaaagatgaagaatctcgatttgaacatctgagttgaagcccacagcttccttcagggacccttccaggtcactccccagcgtggggccttcatcttccctggactcacccacccaggacaaaactcagcgtttcaaagttcaaccccgcagaaagaccgagaatagaatgggaagccaactttctttcctcccccactccccatttctttctgttcatgattccagttnaaaattccaaggtc

SEQ ID NO: 1970 - DNA, 338 bp, Homo sapiens
  SITE (10): n equals a,t,g, or c
  SITE (278): n equals a,t,g, or c
ccgcagaagngacgccgtgaccttgcaaggcatccctgagggtgtctcaggttcatcctggactttccctgcttgagtcctggaatcgaccttttctccaaggagccttgttccttttagtggggaaaggtatttagaagctaagatcttggtgttggctgtgttcactacaattggtgtatctacttctccatcctccagcgtcctctggtgatcgagaatctgaagttccaggttttcataggccccagtgaccttgtcctcagaaggagaaagancctctctcctttggtgttcccctcaactcccttaaataaaggactctattggtcctgccc

SEQ ID NO: 1971 - DNA, 425 bp, Homo sapiens
ttggtttcactctgtggctacgattcttcctgggtgccctttccattgcacaactcctctaggctctacgaacagaacttctccccgcccccaagcctcttagggtgagacatgttgtcggtctgccattgttgctggtccctaaatagcagcaccctttgaaggatccttgaaccatgaccacaccgcaacaaagagtccttcatcaaactcgcttccaaatcccctcccaagaacaccttcagtttcctgcaagaaccctgactgctgaagccggattttgactaagcttctaccttgtaaaccgtgactgtgggattggggtcgaggcgcaatcagaggttgtataaggcactagrtcaaggctgcctgtctgtcaggagtgtctgctttattcagtagtaaatgtgaattgtttttcattc

SEQ ID NO: 1972 - DNA, 336 bp, Homo sapiens
cccataataataataaaataaactttttgactctctgttgttctgtctacagtttttctgggttggctcaccagccacactttattggttcccatattgtcttctttcttttgttgcttttccttttgctggagaaactcctcaggtgaattttttatataggtctcacggatagtcaaatttctgagttcttgcctgctttgaaatttcttcattttgcccttgtacttgacttgttaataaaaaaataaataaaaacctgccaaaaagragagatttaaaaccatttcacatggtgaaacctcgtctctactaaaaatacaaaaaaaaaaaaaa

SEQ ID NO: 1973 - DNA, 324 bp, Homo sapiens
cgctgacgagaccctgcaggacacaacgctccgctactgggagcgcagacgctcagtccaacagagcgtcattgtgaaccagaaggccgccctgccagtgcgtccgagcgggtgtttgggagtktcggaaaacggctggagagtttgcccaaagccctgtaccctggggccaaggaggagaccctggccagctcctcgtgttgggactgcgctggcctgtccacccagaagacacagggctacctttctkaggacamctycatgaacagcagcctgcccttctgttcatggaagaaggccgctgctcagaggccgcgaacagcc

SEQ ID NO: 1974 - DNA, 547 bp, Homo sapiens
gaagatcaaagcagaggaagccacacaatgcagagaatcaacagtggagctatgcctagtgagaagcaaagagacactggatggcctgagagggaaagagactgagaaaagctgtcagcttttagttcctggttccagtcctttgtgacggccagcttgattagagagaaaaggtcatttggaaaatatagccatttttggaagactgagcagccaaggttcttaagtataggagattgggacaaaacaaaaaaaaggtttataacagttcactacttcatctacatcctcaagccaacamctatgaaaaagataatggtgtccgatgacaggcctctgctaacagtgtaaggctatctgtgaactcctcagtctacacatatcttcctcagcctctgggattccatttccacccaagaattaaattgatagaaagaaaaacagcaaaatatacacatatttttccactattaaatccaataatgatgacttaatttcagcaaaacatcatcaatcgcattaaattaatgttgctgttaatttgaaa

SEQ ID NO: 1975 - DNA, 427 bp, Homo sapiens
tattccgggacctgtgctgaatactttgtgcaatttctgtcaatgtgtttcatgtctagttgggggaacaaaatacatgtgtttgaaaagatattagatgtttccagatgagtgtgaagttgagctttcgttttagggtccaaaatcaaggatgrtcacataggatgttcccagccttcctggggccactggatttatactggttagtgaagtcaggctaagatttttctatccttcaagcccatagaaaaggggcttttctagtagcaacagaatgtgcaagatctggtaaaaatctcaaatattaaaagacaactatgaaattaaaattattaaatgtttaaattcatgcattcaatataatgtatgcctaggatatgccaggcactggtctaggtctgagagatgtcagtgaataaaataaagg

SEQ ID NO: 1976 - DNA, 380 bp, Homo sapiens
  SITE (97): n equals a,t,g, or c
  SITE (121): n equals a,t,g, or c
  SITE (337): n equals a,t,g, or c
  SITE (375): n equals a,t,g, or c
gaataacttcctctcccggagacctcggttttgcacaagccggccttgaaatcagagcctttccagcaactccgagagcgtgtgctcggcgaccgcnggcttggcaggcgcgcgctcggcnccaggcccctagccccacgcgcgcgggcggsccatggaaggagggctccagctcgcccgtgtcccccgtggacagcctgggcaccacgaaggaggagctcgagaggcagcccaagcgctttcggccggaaagcggcgcttacagcaagaattcgagcgaagttgggcagcccggaccccgggcaagcgacggcaagaagggcagccccagcgcgcnttcttttcgaggagttgcagagccagcgcttcttgggnccact

SEQ ID NO: 1977 - DNA, 408 bp, Homo sapiens
  SITE (403): n equals a,t,g, or c
  SITE (405): n equals a,t,g, or c
  SITE (408): n equals a,t,g, or c
tgctaatataattttctaataattttagatgctgtaactacaatttcattgttaatgggcaatttgttgctttacaaatggtaaattatatgataaataatatgatcattattcttgtagccaatatcattattagaaatgatggmccgcattaaagctwtaaaattaaataagaatttataaatgtaaggagttattcagacatcttgtatctagtattacaatatcagaaaactcagcaggttatatgacatatacactttgagatagtcactcagaggttttcacatacaggattaaccttgctgcagtgcgtgtgcaagattaaaaaagatgtcatgggtcactttgtaatgtcatatcgttgctgttgataaataaaggaaatgttataaataaaaananaan

SEQ ID NO: 1978 - DNA, 405 bp, Homo sapiens
  SITE (375): n equals a,t,g, or c
  SITE (379): n equals a,t,g, or c
  SITE (382): n equals a,t,g, or c
  SITE (404): n equals a,t,g, or c
gtttagcaccttagtacctccgctgcttcacttgctttaccaaagccataaaaaacctgcaacgtagagaaaataatgcagataccctgactagccagccctctactcctccaaccttttccaagatatgcaatggcctttgtgcctgcccaaaggcttcgccccctccagtgcatgaggaaccctctttcctccgctcagagatgctgcttcatttacccaggaggtcatattctttatatatatttttygttgcaaagtgtctctctagagaaactctatatattatycgaatttttaaaattawttgtttatatataaaggaaaagcccaattggcaaaaaaaaaaaaaaaaaagggggggccgctccaagnggtnccncggggggccaagtttagggggna

SEQ ID NO: 1979 - DNA, 495 bp, Homo sapiens
cttaaagaccaaggtcctcaaattcctgagtcccgaggggtggggctcagatcctttctgcctgtaattgtaccccccccaacagtgawtgcttagcaaaaatmccaagtggggarcccacttggggtycctaragaggttcttaggatgaaaatggcatatccttcttggaccatcagggttgaacctagttgactaaaaagaaggaaaccagaagtccagcatgagcatgaatggtttgctctatctttcttggttaagagacctaaccactgaactgctcagaccgacccactgtggtcaaggcagcggcctctgggctttcctatgcgtttgtcactcttgttctgtgtctcttgcccctttcacactgaggggtctcgccccttggaggatggcgtgtgattttgccacgaggtaaaatattcaacaaatgaaatgatcacaaattttgatatgtgctatacaggaaataaagtgttatgattgagaata

SEQ ID NO: 1980 - DNA, 357 bp, Homo sapiens
  SITE (191): n equals a,t,g, or c
  SITE (192): n equals a,t,g, or c
  SITE (322): n equals a,t,g, or c
gcagaattcaccaagcgttggattgttcacccactaatagggaacgtgagctgggtttagaccgtcgtgagacaggttagttttaccctactgatgatgtgttgttgccatggtaatcctgctcagtacgagaggaaccgcagttcagacatttggtgtatgtgcttggctgaggagccaatggggcgaannaccatctgtgggattatgactgaacgcctctaagtcagaatcccgcccaggcggaacgatacggcagcgccgcggagcctcggttggcctcggatagccggtcccccgcctgtccccgccggcgggccgnccccccctccacgcgcgccgcgcgcgcgggagggc

SEQ ID NO: 1981 - DNA, 419 bp, Homo sapiens
  SITE (302): n equals a,t,g, or c
  SITE (371): n equals a,t,g, or c
  SITE (378): n equals a,t,g, or c
  SITE (380): n equals a,t,g, or c
aaagataatatttgcaaccaactcactggagttgaccatcaaaactcttttccaggcacactcaggcatcgcagaaaataatatgtattgtggaatccctcacttgatgaataatctagatgatcagaaatgtggcactattttggctttcaggtggaaaagcaccctgaatccagcttcctgctatgaatgaatactgagcttgggttggtggaaattgattttcgagataagtggtgtcacctttcttcaaagcaatgtggctgaaactctcgaccaagttctccgcagcttcttccatntgcggatcttctcgcccggctgcagcttcaaagagtggcactctggggcaagcaggccccggcaaagtncccaaanantggagagcagcgcgcgccaaggctggtcttctccaaagg

SEQ ID NO: 1982 - DNA, 625 bp, Homo sapiens
  SITE (5): n equals a,t,g, or c
  SITE (10): n equals a,t,g, or c
  SITE (121): n equals a,t,g, or c
  SITE (203): n equals a,t,g, or c
  SITE (360): n equals a,t,g, or c
tccantccangctgcatcacagccgttgcggttttcctgcaaacattttgtaagtggcgtaaaaagctaatcaactttagcgttaaacttcatcgccgttaaccagttgcattgcgtcgcnttccagcttttgatattgccttttcgcctgtttcgggcacagattaaagcaaagcgcagacaatgcttggtgatcatcagcnggattcgcccttctcttcatgtgcttcatacgccgcgtcaatcagctgcacaccatagcgatgataaaattcacgcgctttctggttgtatacgttcgcgaggaaactcagatgcgtttgcggataaaccggcgcaggatcagcaaccggtttacgntgccgcgctggtaactggcaagacgcgcagcatccagcatgtcagcagcttcacggcggaactggtttaacagactgtttggtacaaacagcgccccggcaaattaatttgcacatcgcgggcgtaatagagggtttgccccagttttgccagaccatccttcagattgttcattgctttttcggcgttattggcttcgtcgaactgcccgtccagcgtatgcgtgatgctgacaccctcttcactggtgagggtcagaatcagt

SEQ ID NO: 1983 - DNA, 350 bp, Homo sapiens
  SITE (316): n equals a,t,g, or c
gatctcatatactgaatagtcactcatttaactccattaaataagatacagcaaggggaaggacagtatcacacaaaatggctttcaaattcaagtggggctatttgataattacactgtggcacagaggcagcttatgggcacttcttgttaaaacatctccatgttaccaacttctgacaagactcttagtataggcttgggcatcaacccaagattaaagtcaagaacctcaatcacttctctacarctacaggtgttgagtctttccagaaaaacaaaggtccaaatgaggcaccattcatcacagcttctntctcatttccatctagtgggtaagaggtttctct

SEQ ID NO: 1984 - DNA, 535 bp, Homo sapiens
  SITE (511): n equals a,t,g, or c
  SITE (525): n equals a,t,g, or c
aggataaaataaaatataaaagttaaagcagtcatcctggcttttaggaacccgcagaatcaggaagtaaactaaaaagtggtctcccttttgtcacgatgggaatgtgaaataggtgcattttccttctgaacttatgattctgtttcacggtgcctctgcagaaattcagtacgtccccacgggcacctgtgtccttgcaggagttgaggaaattttctccatttcttgtccctgtccctagactctgccagctcgtgcatgtagaagctcccgggaaaactgtcaacctgtgcacattcaagaccgccatatamttgttattgaaaagccatcagtcatgtgagcagaacttttttatggttgagattgtccccagggaaacccgccttgcaattcagaccttccacggagatcgattccaaacttttcatcccgtttcccactttccttgttcccatgggagggtgcggttctctctctctgtggccgctttacagattgttcatanctattttccaaaantggacacagg

SEQ ID NO: 1985 - DNA, 715 bp, Homo sapiens
  SITE (19): n equals a,t,g, or c
agtgttttgtgtgtaaggntcacctgatttggcatgccatgtcatttgccctggataaacaacacccaaaatacrtcttttattgcacccaattttgatttctccaaactaagtgaggacataaagacacttgggaaacagccttcatgcagaatttgctattttaatggcccttgcccaccaaatcttttacatttatttcaggcacacctaattggacaaactttttgtgttggggggtgggaaattcagctttgttgaatgcttctaaatcactccactgcgttttcatagaatcagcaactctttttttaacaatcatacttctgaattcagcaaacatggaattacgtttatgtaagcagcacacacaggcttgggaagaaacatggctgactttaggaagtagagcacaactgttgggagcacaagcgcccatttgtgctggtgagtagcagtcattggccatagcactgagtgtgccgtggacatcattcatgtgtttgacagagggaaaaggaaagggttagttgttgggtgatcagggtaagtggtgctccatttagagagcttctactgtactttggaaggaactacctgagtcagacaagtaaagatgtataacataataactggttaagaagaatgtgcattgcattctccatgcactatctttcctccagcctgggtgacagamacakaattcgtctcaaaa

SEQ ID NO: 1986 - DNA, 376 bp, Homo sapiens
  SITE (126): n equals a,t,g, or c
attttctgctaggcgtctgtgatattagtaatttaaacaaactgatgggcttatataagaccatttggagaggactgaactccaatattttatggcagtgaagaatatatgtgtacccccaagggncatcctgaatctcctgccacctgcctgaaattgctttgaaatctcaatttttatttcaaaaactcaagggaagtttgcattaatgataggaacacagagtgcaaagaaccagggccagttccttatgtgatcccagttcccagatctacaaataaggtamtactgtaatatgtaatagggccaggcgcagtggctcacggctattatcctaggcactttggggaggccaggcgggtgggtccatttgggg

SEQ ID NO: 1987 - DNA, 399 bp, Homo sapiens
taaatgatgtaactgatgtacagattctagcccggatgcaggaagaaagtctccggcaaggaatatgccagccaccacgtctcggcgcagttctggttcatcttgcaattctacaagacggggtacttttagtgatcaggaacttgatgcacaaagtttagatgatgaagatgacaatatgcatcatgcagtataccctgctgttaacaggttttcaccatcaccacgcaattcacctcgaccgtcacctaagcagtcacccagaaattcacctcgttcacgatctcctgctcggggaatagaatatagtagagtgtccccacagcctatgattagccgttacagcaacctcgcctttcacttcaaggccatcccacagatttacagacaagcaatgtt

SEQ ID NO: 1988 - DNA, 1039 bp, Homo sapiens
  SITE (242): n equals a,t,g, or c
ggcacgagacacttttggaggctgaggtgggtggatcacttgaggtcaggctggtctcaaactcctgacatcaagtaatccgtccgtcttagcatcccaaagtgttgggattacgggcgagagccactgtggccagctgatactatgataactttttatttcggagtttttttaagctcaactattaaaattacacattgtagaaatgtcagagagccaaaagtgcaagtggaaataatggnaagaatcttgcaaacatgacaaccatccacacctgttttcttctagccttttcccattgctgtgatcctagttctggttcaggtgtggtgaggtggtgatgagatttgaaaagtgcagcggagaaaatactaccaccactaagaattctacactgttaacatttgtacttactttcagtttcttatttatgtgcatatgttttaaacagagcaaataatatagaagcacattgtccctttttaaaaggaatatattaatagtgttaaagtctttttttttttttaaagacagtctcactccgtcacccaggctggagtgcagtggcgtgatcttggctcactgcaagtccgcctcctgggttcaagtgattctctacctcggtctcccgagtagctgggactacaggcacacgccaccacactcagctaattttttatttctttttactagagacagggtttcaccatgttggccaggctggtcttgaactcctgacctcaggtgatccacccaccttggcctcccaaagtgctgggattacatgcatgagccaccgtgcctggccagataaagtcatttttaaccactgtttcctcttctgttcccttttcctatcatgaccctggccctgtgccctaactgaaacaattacttttgcaaatttggtatatgttggttcagtacagttttcctatacttgttaccatggagaattggtagttgtttgttttagtttatttaaataacctcagcctgtaaatataacatcctgcaacttaaaaaaaaaaaaaaaaaa

SEQ ID NO: 1989 - DNA, 233 bp, Homo sapiens
  SITE (2): n equals a,t,g, or c
  SITE (3): n equals a,t,g, or c
anngattcaggttatcaagtttcttgttaaactagacttctctcctctactcctttttagatacactatcagtcaatagccagtcaccagtattcctgctagtctcttcctactctgtgttggtaggtaataagtatcatggagaactcaaaacacgtctcckctagtgggtttgaattacctttccatagaatgttccttgtatattgcattttataggataatatcatagg

SEQ ID NO: 1990 - DNA, 546 bp, Homo sapiens
  SITE (20): n equals a,t,g, or c
  SITE (60): n equals a,t,g, or c
  SITE (364): n equals a,t,g, or c
  SITE (514): n equals a,t,g, or c
  SITE (535): n equals a,t,g, or c
aaatgtttgggtagtttttnatcagcagtgagcaggtcatcagcactcatctctggggtnccttgagccaggtgtggaagggttgctctgccatgtgctagcttggtctcttgcatttttgggtgttggctttgggtgtcctctaagtttctctgcaggctcctccctgaatcccactgtccattttgtgaagggttgatacagacagaacaaggtgcctgggctactcgtcggtgctggtcaggtctaaagataccgcatggaaatccggtgcccctgggatgagcaccccaccatggagggcaccgctctgggcctgcgtgctgtggaggcccccttttccggaagagggagccgaaggaanagttcgttcttgatcagttgggctgctctgttctccagtgattatgtccatttaaaggtgtttccctgtttggcctcttacagtaaactttcacagctcagaaagctcttgccacatgggacatttttccacatttttccagcagtttantatctttgattttcagaggcntaattcaggaa

SEQ ID NO: 1991 - DNA, 291 bp, Homo sapiens
  SITE (286): n equals a,t,g, or c
ggcagaggtataaatacaaaaaaaaaattagccaggcgtggtggctaattgagaggagatggggaaaagtgatgtggggttccccaatgttgtccaaggggatttcttcttagaaatctctccctacatcactcttgtagtgaaataaaaccatctccatgtaatttattaattttgttttttgaaaaatatccactatttgaatctaaatattatagaaattcctctttaaacattcccttttactttatcccaaaataaatctccctttgcataaattttcctnttcct

SEQ ID NO: 1992 - DNA, 340 bp, Homo sapiens
  SITE (123): n equals a,t,g, or c
  SITE (151): n equals a,t,g, or c
  SITE (283): n equals a,t,g, or c
tgcccaaggtccatgaaaatcaaagatagaccctggaactgttccaaactggaggggaccaaagaggcatgacaactaaacacaacacatgattctgaaactggatctttttgcttgaaaggnaagttacagggacagttggaaaagtttngatggggcctacaatgccgtggtaatgaatgtgtccgtgttaatttcctgattttcatggttgcctgttaagttacatcagaggatgttcttgtttgctggaaagtaaaatccaatgtatttggcagggggntaaggcatcaaatggtcaccttaatttccaaattatttacaggggaaaatgtttctt

SEQ ID NO: 1993 - DNA, 216 bp, Homo sapiens
  SITE (188): n equals a,t,g, or c
ggcacgagcagggaagggatgaccatggagagggagaaagacaagagaacagctgatcaatggggcagtgagaacttacacatttattgattaascttaccttcttatatcgcacgttttgtggcaactaccaaacgtctctgcctgaaaatacaaaggttagccaggcgtggtggcaggtgcttgtntttccagctgctcaggaggctgaggcag

SEQ ID NO: 1994 - DNA, 565 bp, Homo sapiens
  SITE (541): n equals a,t,g, or c
  SITE (564): n equals a,t,g, or c
cccctcccagccacagacaccctccccagacataagtctctgcggtctgcaggaattctctttccgcctttctggaaccactggaatcccacagactggggtggacagctattcttatgaaaagtgtggctccatttctggactaaacaggcgtactggcgctgaagataaggatcccaaactccaagtcaggcctatctgcaagcaaagtctcagcctcgctcacctcttcccttcttccatcagtcattagycctgtgtgagaaagcaggggtgcattgttaccatatgacatggcaaaaagggrttacckgytaatgccatttggtttagtgatgccttgttacawaaactactytggrggrgttcaaatatycctcaggcgaacgyttccatccccaggttggtaacactatagctgagtattgttttatttgccatttttcaaaagagggagaaacatacccaagccattatccagcctaccaataatacatttcaagaaaacaaccgcaactcccaatcctttcttctgagggcnggatgttgtaggggtattgttcng

SEQ ID NO: 1995 - DNA, 497 bp, Homo sapiens
  SITE (109): n equals a,t,g, or c
  SITE (489): n equals a,t,g, or c
tacgagttttttttttttttttttagtagtgacggggtcccaccacgttggagaggctggtctcgaactcttgacctcaggtgatccgccagcctcggccttccaaagngctgggattacaggcgtgacaccgcgcccgacctcttttttatttttgagacagggtctcactgtcacccaggctggagtacagtggagcaatcatggatcactgcagccttgccctcctggactcgggattctcccaccttagcctcctcaggacctgggactatgggtatgtaccaccatatctgtctaatttcttaaatttttttttatggacagggggtctcactatgctgcccaggctggtctggaacttctgggctcaagctatcctcctacattgggcctcccaaatgctgggawtacagccttgagccaccacgcctggccamaggstataattaaaaatatgtcattggccaggcgcggtggctcacgccnttatccca

SEQ ID NO: 1996 - DNA, 285 bp, Homo sapiens
cttagactctccctctaaaagccatatttaaaaacccccacactgaccctacaatggtcacttaggaacattgtcctaatggtggtcaagggaggcctgagaaacagtaggaaaaatattcccccaaccccttattactcaccttctcctgttggtcaggggctctgatacttgacctaatttaaatcccagcctggcaccgtttggggcaaaaccaaagtgaatgggacatagagacaaggattgtaacacctagcttaatgctgcctgaggggtttttggttg

SEQ ID NO: 1997 - DNA, 392 bp, Homo sapiens
  SITE (325): n equals a,t,g, or c
agaagttgagaatctcaataaaatgttaaatgcatttgctggcagtggtacccttttgcctaaggttgggtcactgtgttataccgtgtgtgtttggggtggggggaggtgtgaactttttgtctcacacataagttgtctcatgggtcataatcttagttgyagttttcctttcaaatagggttgcaaagtagaaaacatgggcttggaagtgacagacctgagtgaatcccacctttactactttgtgccattggcctgcactttatttacaaataacctctatttgtaaaggtgcagcacctgtcccctggaactataacgncagatttttaaatactgcctggcacataataggcacttaatacatggtcgccatagtggcattgtta

SEQ ID NO: 1998 - DNA, 672 bp, Homo sapiens
  SITE (625): n equals a,t,g, or c
  SITE (665): n equals a,t,g, or c
gagaattgttttaagttttatacattaggtcagtattccatcttcccacccccagccttatgaggacagctctctacccatcctgattaaactgcagctatagctgaaaaaaattattgtaagaaaaatacacagcaaaacagagctggaaggtggtaagtgtaaaagatatggaaagatgtaatcaccaaagragctgcccaaatggcttcctgctatggaggagagtgatttggcccttacctcacctgccttcctgattcaaagaaacttgccactagcaggactgggcccaggagccccatttgccaatctcttctcttcttgggagtctgggaaaggttgtatagttctcaggctttaaaggtgtagaagacagtatggagaataagagaaggatgttttatagtcctctgtttcagtgccttccccatgcccatggagctgtcccaaaacccatccctcagtatttgttgatgccaaagacacgaaccccatggaactggggcaacttcggcagcagtacacttagcaatgaggctgtgttgatgaggragtgcgcacwtcatacttggtatagragctggccaggagatagctggggagagaaaaaatagggtgagtnaggttgaccttctctatccatattctttttttttttaagngacagtt

SEQ ID NO: 1999 - DNA, 637 bp, Homo sapiens
  SITE (590): n equals a,t,g, or c
  SITE (598): n equals a,t,g, or c
  SITE (614): n equals a,t,g, or c
tagtagttctgatttggatttactccataaaattgttttgaaagtgggcaatttgtcacctcacttgcagaatatcttttccaagagccccatttttgctggggtagttcttcctcaagttcaacaccccaaaaatgcaagaaaaaaatatccaaagcttaatggattgttggcagatatagttcakgaaatagaaaargagaaaaagcccaaggagatcaaagtcagagttattaaagtcaaaggaggaagaggagatatctcagaaccaaaaaagaaagagtatgaaggtggacttggtcaacaggatgcaaatgaaaatgttcatcctatgtctccagatacaaaacttgtaaccattgaaccaccaaaccctatcaatcccagcactaactgtaatggcttgaaagaaaatccacattgcggaggttctgtgacaatgccacccatcaatctaactaacagtaatttgatggctgcaaatctcagttcaaatctcttttcaccccagtgtggaggtttaactggaaaggaggcaaaaaaggaggacggcacttcttccacaatcttattggggacaagttatggcntaatagcngggcaagagggttccnggttcctatttcaaagccaattt

SEQ ID NO: 2000 - DNA, 213 bp, Homo sapiens
  SITE (40): n equals a,t,g, or c
gcctgagctgatcttgaactcctgagctyaagcagtcttnccaagtagctggaatacaggcgcaggccaccatgcctggctgcttcagttttaaagactttgtcagcttaagcatgtttaataaaaggaaaaggaacctttcaaacatatttttataggaataattcttcactgttcttatctgggcttatcttctaatactcttttcctgtt

SEQ ID NO: 2001 - DNA, 354 bp, Homo sapiens
gcagctttcccctacgtgtaggcccgcgaacaaagaactaccgttttctgattttttttggccgatgttcgtcatgcagaaccttgaatcccgatgaagatttggcaggccttttgtatcctcaacatcagaggtcatgaaggaaaagttcagttagaagacatacttcaccatcttgaaaaagaagaaatcaatccccttgctactacagaagaacaactctgtttggtgcttattccagccagcacagtgaagacaggctgaggactgctaccacagatgtwgaagrgcttatagtgaagcacatgggtgaaaccaaagaagtkaggactaatagcatagaattttaaagac

SEQ ID NO: 2002 - DNA, 630 bp, Homo sapiens
  SITE (605): n equals a,t,g, or c
ttttaatatcctacctcttctttatctagaacattatgaattcaatatttcacatacattgtaggacaaattactgttactctgatcatgatatagcaacatttaagtcagtttccccaaatattcattcaacaaatacttattgagcaactattgagtgctagccccctctctgttcatcagggatttagtagtaacaaagcagacaaatacatacacacagactatgtcaggtggtgttcagagctgtgaaggagagtcagagtgagggaatcaagggtgatgggtgctttttcagacagggcctttctctattaaacaggcttccagtggaagactctgctaatgtttagcagataaccaaaatgcatcagttagaaaaaaatatgattgagaatgaggggactgggttataggaatgcaatttgggcacaaatgtgggaagagctgggtagtgaagctctagaagggagaggtagagaattggaagaagaagcactggtacagggtagacaattcagaacttgcacagaatctgagaagctgaagtaggactgtgattgggagcttgtggagaggtcctatggaaattatcatgctgctgnaattgttggcccctatttatctgct

SEQ ID NO: 2003 - DNA, 556 bp, Homo sapiens
  SITE (440): n equals a,t,g, or c
  SITE (511): n equals a,t,g, or c
  SITE (535): n equals a,t,g, or c
tatatttaatcattctctttggctcacaacagcagtccagtccaaagatttactttttctattttcaaccccatcattatttttgtgtaaaaagtatgttttgagttacagcaattcatggagatcaagcttctactctgtagggagaagagagatgtcatttactacagagtttatacacacaaatgttctgctgcatgctgtgttcccactgaaatccagggggtttatttgcatttatacttaaagaagaatgacygtatttggctgactctaagccaagatgatacaggcccaaagtttttcatggaggaatgggggagtaagggaaataggaacatttggaagaaatagttgttgtttttccctgttttattcagtgggcattttattcacagatcatttgatgcattgcatttactcgtgttattctggttccntttgtgtttttttttccttttgaaacaacttcacacttacaggaaaatgggcaaaaatacttaaattaagnactcctatgaaaccttccactggntaaaaacccttccagttttct

SEQ ID NO: 2004 - DNA, 554 bp, Homo sapiens
  SITE (94): n equals a,t,g, or c
  SITE (540): n equals a,t,g, or c
  SITE (549): n equals a,t,g, or c
ctgaagtggggcttcatgtgggggccctgttccctgtctgtgcagcatttgtggctctggcagacatggtcagatgttgaaggccagaggggcntctgctcatctgcacagctgcagcaggacccacgcagggagttaagggttatggcaagccctttgagccaagaagtgtgaaaaacatacactctactcctgcttacccagatgccacaatgcacagacaactsctggctccggtggaaggaaggatggcagagacattgaatcagaaactccatgttgccaatgtgctggaagatgaccccggctacctacctcacgtctacagcgaggaaggggagtgtggaggggccccatccctcagctctctggccagcttggaacaggagttgcaacctgatttgctggactctttgggttcaaaagcgactccgtttgaggaaatatattcagagtcaggtgttccttcctaaaaaaaaaaagtctattttggagaattgaaataattcatggaagggawtcactattcmgggatttttncccttttgntcttc

SEQ ID NO: 2005 - DNA, 557 bp, Homo sapiens
  SITE (11): n equals a,t,g, or c
  SITE (498): n equals a,t,g, or c
  SITE (535): n equals a,t,g, or c
  SITE (556): n equals a,t,g, or c
atcattttggnttccttttctgccacaagccttgcctcatagatatgtttgaaggataccgtgatagtctacccttaacatagtttgtcaattaaggcagaggagataccctcaaactcttttcattattctcttaattctgcacgtatttattttccacaacaaaattatgagatgctaaagctggaggccttcactatacaaataagaaaaataaactccagagaggtgaagtaacagaaccagtctcataattgcaagagaacctgargcactgaggtttcctgacacttagtccagaacactttctccctactacacatcagcctctttttggatgatagtggagatgttctctgtacaaaatagtttagaaggaaatgttgtacattttccctttggaatatacatgatgagagatgatagtccaatagctgggtggcattgtgagcttctaggacctcccagaagctgaggatctgtatccctgccatgggntgcatctccagctggttttctgcccactcacaggctncaagtgtgcagatggtaaggnt

SEQ ID NO: 2006 - DNA, 484 bp, Homo sapiens
ggggccgaaggggcagggagattctgctgactttgatgggacccttgtgaacatgccctgaaataccatggatatttacagaaactggagtctgggcttcttatggtcttcaaatgttttagcctgggcagttgtccccacacagtggtagctggtcctatgcactttgttagtggctaaggaaaggtttaattgtcattaaccagttccccagtcctacctcatcagaagtaatgggtagagtgctagtccccttgatgaaacccactgagcacttaggccatcacaggcactgtactgagcatgcctgatttcatttagttgtcaacagccctatcagtgaggcaccactatcagtcctatttaacaaagagaaaaatgagacttaagggaagttatataaactgtttgagattagatagctcgtaagtggcagagattggattcaagtctaagcttatctatgtccctattctaaatttct

SEQ ID NO: 2007 - DNA, 527 bp, Homo sapiens
taattataaaatcacaagtattatacttttctcagagctatgtttagataaaagtttaaggaacacakcatctgtgtatgtatatttagatatttttgaaacaragtatgtatttgataaatttaataattcatttagccattccagtatttctttgttgagtgcctagtgtttgtcaggcagtggagaagctgtgggtaattggcactctcccactgcagttagttacactctggttctttcagtctacccagcagtgtgtgctgataatgtggaagtaaatgaataaacaggaatggaatacagaaggattcttatgaacttgctcatatatgcatagcaatagaaagagtacttcctaattgcaaacttatagcacatacatctgctagaaactccttgtgctaagtacatgaattcaggcattaattccacacaaaaataaaagctaaaatcccttgtaccatgtatacaaatgagacaagtgagcttgacattcaagcttttcaattcatgcaaaactaaaa

SEQ ID NO: 2008 - DNA, 596 bp, Homo sapiens
  SITE (596): n equals a,t,g, or c
ggagaattggaatcagggagagaatttraatcagaattggataagccagagggctgatttgtaaggcggtaagtaaggatatgaaacagcgttccaggtctctttgcagctgtgctgttttatgtccaaatcaacttcttattctgggaattacaatcaacatagaacaaccagaatgtgttgcagttcttcaaatatatccaataaaaaggctttctagtgtctgcttcagtatgacttatatttttggagttgagaaatttgaaaagaatggacaataattgtcaagattaagcaattgaaggaggggggaaaaaccatgtgcattagagtagatgaaggggatcctacatgtctattaccttgctcagctaaacattatctttgaaatgtgaagactaggcacataatatagktttagcaattagtacagaacacaaatgtctgcataactcattttctgcagtcactgattatggttccctatcaagaagacacatcatcaccatgatatatcagcacaggctgaacaatggtttcaagctmattggctggggaatggggtcatctttaatagtttcataacttgaaatgan

SEQ ID NO: 2009 - DNA, 248 bp, Homo sapiens
agatgcactgcaaagctggtgacgagagcccagatgtgctggaggagctcagccaagccatcgagacctccgacctcgagaaatctcagagctcagactctttctcccaagacacgtctgtrasgctgatgccagtgtcggttaaactccctgtccacccagtggaaaattctgtggtagaatttgatagccactctgacggctcctattgtaagttacggtccatgaatccaaccctcatggagtta

SEQ ID NO: 2010 - DNA, 339 bp, Homo sapiens
  SITE (74): n equals a,t,g, or c
  SITE (90): n equals a,t,g, or c
  SITE (198): n equals a,t,g, or c
aattcggcacgagcaggtgtacttgatcacagtgcttgctatgatcctggcagtgttctttgcgcagattcatnccaattacctcacgcngcaatggcaaaggctccgttctatcatcttttgttctgtttcgggatatggagtgattcctactcttcactgggtttggctcaatggaggaattggtgctcctattgnacaggactttgcaccccgtgtaaattgtgatgtatatgattgcycttcttgctttcctattctacatttccaaagtcccagagcggtactttccaggrgttaatgccgrgaatccatcaraagtatctactgtttagaagg

SEQ ID NO: 2011 - DNA, 464 bp, Homo sapiens
  SITE (457): n equals a,t,g, or c
tcagaaaatggagtgaccagtctgactgtggaacttatgggtgtaggcacagaatcaaaagtttctgtgggaattttaaatataaaacttgaaatgtatccaccactcaatcaaacgttatctcaagaagtagtgaacacacagcttgctttgcacaggatgaaaatgggataaatagaccagtctgttcctatgttaaaccacttcgagctggacggcttcttgatactccaaggcaagcagcaagatttgttaatgtccttggttatgaacgagcccctgttattggaggaggaggtaaacaggagcagtggtgcactctgctggcctttctctgtagaaacaagggtgactgtgaaagatcacgctaaccttctgtggcagccttcttcttggatatggrttagaagcctttgtttgtgttggggaccaaggcaaaagggagtacctcatgccnggggttt

SEQ ID NO: 2012 - DNA, 391 bp, Homo sapiens
  SITE (237): n equals a,t,g, or c
  SITE (241): n equals a,t,g, or c
  SITE (348): n equals a,t,g, or c
aattcggcacaggtggaggttgggttgcctgcttgtgtacctggtgatggtattgtacttcagaaaacaggtgagggaggtaaatggccatgaagggagaatatatctggtagcctagtttggcaggtgacataggcttccaaggaatgaatagacatgagatgmaagcagaagcataggagtagctgagggaagatgacactcagcctggaccttgtgctaattcgccactctgtngcancaccacgatattgagatgacttttgtggggcctggggtgtttcattcagcctggtggatatggaggcaaataaggtcaccttgtgagagtcactaggcccgagattnacggccaatgggtctaggctttgaatggagttaggtggacaga

SEQ ID NO: 2013 - DNA, 272 bp, Homo sapiens
  SITE (181): n equals a,t,g, or c
  SITE (269): n equals a,t,g, or c
aattcggcacgagtcgagaccagcctgaccaacatggagaaatgccatctctactaaaaatacaaaaattagccgggcatggtggcacgtgcctgtaatcccagctactcaggaggctgaggcaggagaatcgcttgaacctgggaggtggaagttgcagtgagctgagatcacgccattncactccagcctgggcaacaagcgaaactctgtctcaaaaaaaaaagaaaagacagtagcatatgttcatgtcaagcacctttcatcanagt

SEQ ID NO: 2014 - DNA, 390 bp, Homo sapiens
  SITE (382): n equals a,t,g, or c
catgtgccagcacgcccagcttgttttttgtatttttggtggagacggggtttcaccatgttggccaggctggtctcgaattcctgacctcaggtgatctgcctgccttggsctcccaaagtgctgggattacaggtgtgagctaccatgccaagcccacatttctctgtaaattttaaacagtattttagtccatatstcagttcccctctgtttaagataaggatattaataaccctacttttccttccactttccctccttaacttctgcgtcttaaaagctgtacttgaccatacccattcttgcatttgttaacawgtgtgttctgccctgsaaccacagccagttgtagcttaattctaaagtcgaaaataacatnatttacat

SEQ ID NO: 2015 - DNA, 456 bp, Homo sapiens
gaattcggcacgagtttacaccactcctccttgatcagtcctgaagttcatgtattacctttttacctaaatttctttcagtgttttcttctctgctatcccttgagtatatctcttgagcttatcatgtgtcttggttgttgagggccagaactgaagaactgtccctatcccttcttgtgagttaaaagggaattaaggaaaaggaatctcactgcagaagaatgttttggttgttcatcctatatttaatcttgctcctttgagtttatggtcaaacatgagcacatttataaaatgctttcctggggcagcgtggaagaaactgtgtttggaaagtgatattacactgaggacacttgggcaagaggcttctgcagcttcagtcgccattgctttgaagatcatcactcattgctcgaaatcttctatgaactcctgtaagttcagatgtta

SEQ ID NO: 2016 - DNA, 243 bp, Homo sapiens
  SITE (221): n equals a,t,g, or c
tggagagaaaccctatcaatgcaagcaatgtggcaaagctttattcgtgccagttcatgtcgagaacatgaaagaactcataccattaatagatgagaaatccttttagtggaagcaacsgggagaagctttctgttgtcccacttcctttgaaacmcmagaaaagagagtkggtgaaagaacctctggataactgcytttttgaattgagaagagagacntgccgataggggccattaaaat

SEQ ID NO: 2017 - DNA, 409 bp, Homo sapiens
  SITE (379): n equals a,t,g, or c
ccacagggtttctctttgccttctctcattctatatttgtgtttccttcaactacagtgagcattctggctcctagcaacattcatatatttcctcatttgcatggtcccacaatatatacaaaatactttcagaattgatacacgcatgcaatgaaagaaaataacctacaaagtagttaaattttttttgcattgtttgtttgtaaacagaagttatttagtcaaagtactgtgttcaagagttattctgacccccttcagagcagttatattatttatttgaaatcagttttgcctacttttgagtttcatattattattcttaaagatttacttatgttgtgaatatcaatatttccccccactgctgtaaagcngcagtccccaacctttttgggcactagggg

SEQ ID NO: 2018 - DNA, 588 bp, Homo sapiens
aagccccggggtcaggtaagtagcctcaggggctcccttggccagagcttctgttcaggcgctctccatgaaagcagccctggaaaactgagcctgaagtcagagacagctcaggcccagcacagggggcagtcccttgccactggctcgggcccttccctggactttttgccttcctccatttttgcttctctgggtctgtcttcgtccatgcctgctctgagatgctcccccacccctycctgtacctgggamcamcgscctctggtgttttctttctcctgtgagtccccccctggatactgctgctttctggaaggctgtcctgggttacgtcctgcgctcctctccctcccacgcaaagacaaccagaaggacaagccttgagcacgccgataccccagctcgtggctccccagaccatctgtttcccgtgaagacgccccgctccccgtgtctgtgtcctgcgtgtatgtgtcgtgtgttgtgtagattgtgascccctgggcagggatccctgtctgcatacatgttccatgtgcacgcccaggtgtgctaawaaacgttcatcttgcagctaaaaaaaaa

SEQ ID NO: 2019 - DNA, 469 bp, Homo sapiens
gatacttggctttactttataaaaatacacaacttaaatacatatgacactctgtttacaagacataaactggtagatttaacattttcagttatttcaacagaaagaaaatatgtaaattaccttgtaagagcaaagagttcatttatagactctgctttcacagttaagggggaagaacgcccaggggcaatcaatgcaggaagctaaccaacactgtccagctctccagcaaaactcatcttgccaacagggcctctattgcaccgcctaatattgcactgctcgttagacaccatctcacttatccatgtcaccagtgtaagcttttgtcttctctagaaaagtttaatggaaaaaaacgatgtacaaacagtaaaactgtatcttacaattgtgctaaataccaattatgagaagtacgaacctctcttcactttggcaaagcttgcaatgggaagtgggtagc

SEQ ID NO: 2020 - DNA, 348 bp, Homo sapiens
  SITE (6): n equals a,t,g, or c
  SITE (158): n equals a,t,g, or c
actgtntcataatgctagctttgtgtcatatctatctagagagtacactgaatagcttaaaccaagtagaaggtgatttcttgcttacataacagtttaccataagtaattttggctaaagacgcatctttcctgcaaaaaataattcaagttaacgnaggatctactattaccaaattgtatcttcccagattactttgtatatatcaccattccagaagacaaaagactactcatgaaatacaatttgcacacttctttatatatgaaaaattcacttttcttccctctgtaaacaacttaaagttttgcccagttactgcctacaacttagagttcaggatgttt

SEQ ID NO: 2021 - DNA, 365 bp, Homo sapiens
  SITE (327): n equals a,t,g, or c
agccctctctcccacatgagctgggcagttctctgagcagggcccatgatgtttgttcagaaaacagtaagggaagtggggcctcttcacacacaggcccttcctgccagtttaagtgtctggctttctggtgtagccaaagctattcctccctgtgctgcctcctgaggctgcaggctgctgctctgctcctgggctaggcttgctggagaagccacgtgcaggaaggattataaaagagcctttccataaatttyctgcatgacttgccaagaactgtaagttgtraatctgttttgttgcttcagagagaagtaggaaggaggnaatgggtcatttctactcagctctgggaacaacccttg

SEQ ID NO: 2022 - DNA, 748 bp, Homo sapiens
  SITE (189): n equals a,t,g, or c
agaagaagatggaaccaagtgaggaaagtcctccgatgctagctccctgatgttaggccttcagatgctaggccctttcatgctgagcctccagatgctatgccctcccatgccatgccccaaagttattcattaggctgtgggaactatggaaagttgccagttccccatctctggtgataagagtcngcccctctttctggtactgtgtgggcgccttctcaatgggaaatttatgccctccttttaggcagataggcagataaggggagggcagagaactcttcctgcatctgttggttctctgttgccctcatctcaaaataatctttatgccaacgtggcataatttaggggtgacatattctgatccccttcactggggctggggaatatggaggatcaaattggcatctgctctccatctggtcatgaacagaattttaaaaggcatttctgcttcatcccttcctcatttccttccttccttcytccyttttcyttcyttcyttttaaatgkttcatgctatagattggccctgcagatacttcagtttgccaccactawtctacatttaagcttctgaacctcctataagtacagaatacatttttctcttggcatattttgactaataaaactgtgagatgttcaatgggcattgaattttgaagtcagtccaggaggatgtacaaataatatccaaagtctgaaggcttaagctgtcatcacagagtttactagggg

SEQ ID NO: 2023 - DNA, 282 bp, Homo sapiens
tcgagtttttttttttttttttttttgagacagagtctcacactgtcgcctgggctggagtgcaatggagcgatctcagctcactgcaacttcctcctcccaggttcacacgattctcctgccttagcctcccgagtagccgggattacatgcacacaccaccacacccaactaattttttgcatccttagtagagacggggtttcactatgttggccagactggtttcgagctcctgaccttgtgaatcgcccgcctcggcctcccaaagtgccgggacta

SEQ ID NO: 2024 - DNA, 233 bp, Homo sapiens
caagctctcttcagcccttagcagtgtgggcccagaaacagggtggtcttatggaagggagcataggatgtsggtcctgaagagaaggtgttcactcctggccccatcactagttgcatcacttcatcttgcctggatttcatctgtaaaatgggataatgcctactccacaaagttgatgtgctttgaaatctttaatacaaacatttgttattggaaactaaatacaaacg

SEQ ID NO: 2025 - DNA, 540 bp, Homo sapiens
  SITE (78): n equals a,t,g, or c
ggcacgaggaaaaaatgaccaggcactacaattgacacaaatggataaaatgcataaaaaagcaacaaaatggatganttggaagcaccttaaagaggatggatttccatcaccaaggagtaagaagaccttcgggcagagactgttgggtatgctcccttcagaaaacagttctaagaggatggaagaccaggacagtcctcaagaggtccttaagatgctcatagatttgcttaatgataaagaagaagctttggctcatcaaagaaaagttagctacatgcttgctcgggcattggaagacaaagacactgcttcaaacgagaataaagaaaaaaatcctataaaagagaatttccctttcaacaacccctggcgctggcgcacagatatcttaaatggctactaattgctgctgtgtatgaaaacaaatggctatcaaggccgggtgcagtggcttacagatctggtcttgaatctcaagtccagaccagtccagagttcaagaccagcctgggcaacatggtgaaacccccatct

SEQ ID NO: 2026 - DNA, 613 bp, Homo sapiens
  SITE (599): n equals a,t,g, or c
cccctccaattggtaaaaacgccaatatgtccaagcacaataagcaaggcacaatggaccggattgcctgtattagacatgctacaaacttcataactggaaacatctcaaggaccccatgaagctcatttgaatgggacttaacaattagacagttattttagaaattgagtgcagacctaaatacatagttttccaaaaagaaaattattgtctctgatatcttaaaacataaaaacccaaaattttatatagaagaaattgactctgtaaaacgcaatgaaatagtcctctttttaaacagtttaaaggaagcattttcaccgtttgtaaaaattatttttaaatatttagggcaaaatttttgttagataataatggaaaagcttgtgtgagtttagtggttaaaataccttgtaattcatcattatttaagtgacttcttgggagccgtctttgtacctaaaatggagtttttttttaagcctccacagagatagtcacccaaagtatttccagtcagtaaaagtagaattcatagaaaaaactgaggcaaattaaaacaattccattaatcaaaatggctttaaacaaattangtattagcataaaa

SEQ ID NO: 2027 - DNA, 259 bp, Homo sapiens
  SITE (240): n equals a,t,g, or c
gttaccaatctggaaggatctgtcactgaaacaattgcttggtcgagacctctaatttttcttcctctccagccagtctcctgtggctccctggtgctgggtttctggcctttggtgacatcctaacagaagggtcyrgaagcagggaccccagacaccttgctccctctcccaaatcacacccaaaacatactggggtgaacaactgacagagggtctctgtggtgagcaactgactgnagttttccagtggggaaaa

SEQ ID NO: 2028 - DNA, 838 bp, Homo sapiens
  SITE (253): n equals a,t,g, or c
  SITE (261): n equals a,t,g, or c
gattggttttcctaaattatcaactttctttcattaaaaaaaaaaaaaaaaaaaaaagcccagcatggtttgactggatagacacgcataatttattatgaatataaatttccatgtttgtttctgttcctaaaccagagtacgaggtccctgggaatttaagtagctacgcattatctattattagactgcaagttcctgcaataactgcttagttcacagccccgtttcaccagtggagttctgggcagtnattgctgncctaaggcattactgtcgtttgcttactctatacttgtgtggtcacagtcttcttgtaattaccatctacaccagcatttcaggtatagctctttataactctggagacatgtaaaacatgtttaacacccacgagttttgaaagttgcattccttattagagtaggaactctctagcccaactccattctatgttctcagctccctccaccccccmaaatacatcagactagcaaggcagtcctatgtttacaaaacgagtttagattgtcatttcattccataactcttaataatactcaagttttatacattcacgtattttaaatgctcggtctgtagaagacactaggagaattgcattccaattactggatggttgctgctctggctttttagaacttgaaattaatttttatttagagcaaaggaggaaatcttttaagaggctaaaatcatgctgctattattgctgtgaaattgtataaagattaggattcatgccagtttttattttaaaaaataatgtgcattttaagggtttatatttagaaaaaaataaaatgtttcaagaaca

SEQ ID NO: 2029 - DNA, 693 bp, Homo sapiens
  SITE (191): n equals a,t,g, or c
  SITE (583): n equals a,t,g, or c
  SITE (683): n equals a,t,g, or c
agatggggtttcaccatgttggccgggctggtctcgaactcctgacctcaggtgatccactgcctcaggctcccagagtgctgggattacaggcgtgatcctaagtacagttttataggacaaccatgctcattcatttccgtatcgtccacggctgctctayagcagagagtttagtggtcaggacaganccggcacaacctgcacaacctgcacaactttcaaaggctgaatatttactctccggctctttagagaaagtttgcaactcctactttagactgatgcttctccaatgctaacgcgccagtcaccaaatcaccggcatctggtcccagcctccaaccataaaccacagctgaatggaaacttggtagcgcttgccttcaatagcagatgctgtaagaggaaagcaaggtgaccaagaaaacattgcaaaactctgggcagaatctggggcctgaagactctgagtcagaggcctctttttttgctctaaacacatattagcaagagtccaagaggcatcaaagatgagtttagcagcaaaatgaggctttgtccttcatgtagaaagggattnaatgatagttgaaaaatgcaatactttcaccctgtgggattcagtgatgttcagtgctgtgattatgtccaacttcaaaatcttgctggcccaactgggnaacccccaaa

SEQ ID NO: 2030 - DNA, 342 bp, Homo sapiens
catcccagcagccagcgcaggctgttggagcaggtctgtctcctcttggtcagtggcctggcatatctgatctcagttctgacttgtacagcttgggtctggtgagcagctatatggataatgtgatgtcagaggttctgggacagaagccgcagggacctagaaataacacctggcccaaccgtgaccaaagtgatggagtctttggaatgctgggagagattctgccttttgatcctgcaggtatgtgaggcctcccatccctcgcccagtgtcaacagcaaatgcaactgccgaggtcttcccagggcctgtctgtgcagccttacttgtgaaggtgaa

SEQ ID NO: 2031 - DNA, 515 bp, Homo sapiens
  SITE (491): n equals a,t,g, or c
  SITE (501): n equals a,t,g, or c
  SITE (514): n equals a,t,g, or c
gtattaatataatggatggtccaaagaaaggtgaatgaaagagtcataaaagatgttgaggtagttctctattgatgccagaatagccctatggtgcacttttgagtaacagaagccaatttgttaaaaacaacaacaacaacaacaaaaaaaaacagagagagagagatgaatgtgcatccagatgcttagagaagagtctgaatgtctgtatactaaatatcaacactagttactctgcgctgtgggattttggatgattttaatttgatccagtgttttctggaaaataaaatttcactacattgacacatcatttgataatcagataaaagaacaatggtgggaaagcaaggactcaagtgacccttgcttttgggtctagagcatcatgtaggaagccagcacagccatccctttctaggcgccaccttctggctcctggtgggactttgtaagtcccgtggtcaagttacctgattgctcttacngaccttgacncttggaaatcctnt

SEQ ID NO: 2032 - DNA, 677 bp, Homo sapiens
  SITE (458): n equals a,t,g, or c
cttccacttgtatcctatctctgttcaacaccagtgcaagtctttacaattgcataactgccttgggccaggcactatctatgttctgcctaccaggaataacagtgtccttgccactgtgacaacatgtagtctgactccaaaatcctatcttagctagcatctgctttcatgcaccacttctggtatcaactcttccagtttaggctcctcaggaagccgatatctaggtgggaattagcatgcaggaggtttattagggagcattgttggggtgggtaggaaagaaatcaaaattgagcagagggggaagttgggctgtgatatgtctaacaaaggccttaggaaaccaaccaggagatctaaacttggaatgaaccttctgacttgcccaagttggggtgaagaactgggcctttatagcccctacatcaaccagtcattgaatgtggactttncccaggaaaggaaaggccatgaccttggctgaacaatctcttcgctgagacagctcatgaagaaggtgggcagcagagggctgtctgtcaacagagcccccagcagctagaggaattaatccttcagttttgaagagggacctgagaagtgcatcatgtcatccacgatggcctaaggtgccctttcctggtttatctaacaaacatctactcacattt

SEQ ID NO: 2033 - DNA, 391 bp, Homo sapiens
  SITE (227): n equals a,t,g, or c
  SITE (238): n equals a,t,g, or c
  SITE (350): n equals a,t,g, or c
ggcaaaactccatcctgggcgaccagagcaaaactccatctcaaaaaaaaaaaaaaaaagaattactagatgttcgtcayaggaggtggttcagattatatcatccccagtattgctgagccagatcctcctatttattctcaggaacaagttcccaaatgctcacagccacagtagaaaaaaatgtttttccatacgactgcttaaagccattctctctgaaaggnaacctgggggnaaagtgctgtcagtagttaactaggagatgggcagcatcctcagggaaaatatccagggggtcaacagttttggggcccacttacaacactgccctccaggggtcttactgntcctttcacagttctgggggcacaggagttcagggccgggg

SEQ ID NO: 2034 - DNA, 518 bp, Homo sapiens
  SITE (507): n equals a,t,g, or c
  SITE (517): n equals a,t,g, or c
gattaaacatttatggagttggtgtctactctgcttttaacattgctctttgacaaaccatatgaagtgttgccatcccatgttttgggataagaaagctaaggctctgagagattaagtaattggtctgaggttttacagctggtggataggagcttaaaattctccagtggcatatgaggttcatgtgatccgggccctgctggtttctctgacctcatctgccaagaatcacagcctcattcattatgctccagctgcctgggctttcgwtaggtgtctccaacttgccaaacttgttcctgcctcagggcctttgtgcaagccattctgtatgcccggaaagccctacactcagacattatcagcctcatccttgccattcatttagatctcaattcagatgtcaccccagagagacctttgacctccaagtttaaagtagccctatattcccaacccttttattttccaaatagtacttcttacctcctgacgttgccttgnatgcttaatng

SEQ ID NO: 2035 - DNA, 507 bp, Homo sapiens
  SITE (46): n equals a,t,g, or c
  SITE (342): n equals a,t,g, or c
  SITE (426): n equals a,t,g, or c
  SITE (430): n equals a,t,g, or c
ccttatttaggaaacatttttcaaatctccaaaagtgtaaactgtntttaaaaaagcaaatgactaccacaggccgtacatagtttgctgacccctgcttttgtaggaatgaggagctcagctttgggggcttctcaggccttctcttgtataaggaagacagatatgtcatgcccagaggcaggtggcagaacatcctgaaagggaagggatagtaggaaagtgacctcccctgggcagccggaagcatttgtttaatcagattgctttcctaccacttgctgatgagtaattcttaccgcttttgggtcatggtggcttgaagaatctgatgagggcccnggcacagtggctcatatctataatcttaacactttggaaggccaaggtggaaggatcacttgagcccaggagttcaagaccagnctgngcaacatagtgagacccccatctctacaaaaattttaaacaattaaaataaaaagtctggtgaaacttctggatcca

SEQ ID NO: 2036 - DNA, 501 bp, Homo sapiens
  SITE (22): n equals a,t,g, or c
ggctagaggaggatggggtgtngctgtataaagtaattggcatgtggctcttcacgatgaaaaaaagagattttgtggcaggaagaaagcaaaagaggagggaggagagaaggaaccatagattctgagaaacacaccaggatgwctaggcctggaggagtccagggtgggcctcagaccctcacttcttgtctggcacctcccattgccaaaaatgcagacttcagagtaggaccatttttggagccatgtataagaaacagatttctatataggtcaggccttgctaaaattcattttgagaagttcagagatggaatggagcaagwcaaaattgaaattctagcatccttttcctcatacaattcaccccttgttttatgaagatgtgggacaaactgaatgaatgtaacttgcttaaaagagcacctgacacacatggatgctwtggaagcaccattcgattccatgctttaactataaatgaattgttattattac

SEQ ID NO: 2037 - DNA, 589 bp, Homo sapiens
accttctccttttttctttccttttcctttttttttttttttttggkggggggtagggggcggccagtggggaagcaatgggtttgagaggggaggcgggggtacaaatggtatgtgacgctgggatgtgttttaagttacaaaggcgaataatgttactgttgtattcttaacaatgaagtgaacctaccctgattttccactaagagtgataaatttggactgacatatccaaattctatcatggggttcataaagctagctagaaatcatatactcatcagcatggtgttttaattaccaaggcaccattactggctaggtttagggttagaacagttttaggtttacagaaaaattgtgaagatagtacaacgagttctcatgtgcaccacagccagtttcccctataatagtgacatcttacattagtatggtaaatttgacaaaattaatgaaacaatattgataccttattaactgaagctcatacatgatttctttagtttttaatttttttctgttctagaattctatccaggataccacattacacttagttgtcatgtctccctaggctcctcttggc

SEQ ID NO: 2038 - DNA, 460 bp, Homo sapiens
  SITE (1): n equals a,t,g, or c
  SITE (422): n equals a,t,g, or c
  SITE (430): n equals a,t,g, or c
nagaaaagtctgtggtttctaaaagtgcttcctgcagggtcttattttcaaagctttccttggaggcttttggtgtgttttaggtggggctactgtttctccctctggcttctgccctccctccttctctccctcgtctcctcatcttccatttctctctccactcaccttcttctctgcacccccgaccccagcaggagaggtgagagctgtggggaggggggggtttcagttcactaccccggattaggttttcctatcaatgcacattcctttgtcctcttcaacaaaaggacgaaaagcaaaaaaccacaacccacagctttctagttgctgacttaacccaattttcctgtacccccagcatgtctttctttctacctttgactcagatatttatcagcagatgataaaatgcaggnaaacccanaaagctaaagtctttggaaaaaaatagctg

SEQ ID NO: 2039 - DNA, 575 bp, Homo sapiens
tcgagttttttttttttttttttgagacagaggctcgttctgtcccccagggtggagtacagtggcgcaatattggctcactgaaatttcatctcccagattcaaacaattctcctgcctcagcttcccgaatagctgggactacatgcatgaactaccaccatacctggccaatttttgtatttttagtagaggtggcgtttcgccatgttggccaggctggtctcgaactcccgacctcaggtgatccacctgcctcagcttcccaaggtgctgggattataggtgtgagccaccgtgcctgggctgatagaagattctggatactttgaaggcagaactgatactattattcacactccatatcaaattcagcaaaacctgacatggcataaactctatgcctcacagtttggggagccacaatggttacaaaataagagtctgacgggctcttacctggagcccttatctgctaccctctgggctawtcttgcagattcataaatattaaatgaaaaattattttgtcagattgggctgtagaatagaaagctagtaagggctaaatacta

SEQ ID NO: 2040 - DNA, 443 bp, Homo sapiens
  SITE (440): n equals a,t,g, or c
ggcacgaggcagtttacaggtaacagggccagatattttcaagccatcactcaaaccccagtgctaggcatgtccagagcgaaacctgttaccttgtcggcatgctcaccaaagtgcactgccaggggtgtgcactttacactcatagcacagatcacagtttgtgtctcacagtgaaaaagactgttcatatctttgggccacaccctgaaacacaaactgaatgatcccaccctcaacacaaaggaagttgagtccataatcgcatccacagataggrtactcttagatmtgacaaataacacccatttatttattccctttttcttctttcccctaagcccccggagagctttctccagtttcatcacacactcctgactaagtagatgggggtgtagggggcactctccgaatgaggcacatttgtcttgtcattnaaa

SEQ ID NO: 2041 - DNA, 474 bp, Homo sapiens
ggcacgagtatgccctaataatgcctatgccaagaaaaatggcatactgaaactaggtaagagaaactgcatatttcataacatttagtgattctaaccaaatgaatttaaacccagtataatttttttcaaaattaaaagtgaataatgtagtagactagctagttatctctaatgtaaagatgaaaaactattgctttaatcatactttttttattgtttccccttggaagtgcttgagtacatttgttaagaacacgctttaatcctggttattagtgtgccggggcttattcacccctgtggctctcccsatagtcagtcccagttatcgtagtctactatgcccatgctactggaattktctcykcytgktttgttgctacyttagatgcttggrgaaatycycaggaaggccatawgccccattkgycagaaaatgatagtgtcataatgaaaaagttcgttatgctt

SEQ ID NO: 2042 - DNA, 1438 bp, Homo sapiens
  SITE (698): n equals a,t,g, or c
  SITE (1371): n equals a,t,g, or c
  SITE (1427): n equals a,t,g, or c
  SITE (1438): n equals a,t,g, or c
aaggaaaagataaaataggtgatttattttgtaactgtgaaaactatgtttattttgaatacaaatcttgaattatctatggatgagtttgaaataaatcatagaagagaatcactttttggatttttaatccaggtccttgtgtgtgtatgaaatacacacatatcttccttattagtcatggaagggcaaaagtggaccaaaaacaggtcagctaagacaggcatgtctggcttctgggctgtagctcagcatgttgtaggctagagtccagtgaccttcactggcaggctgcctacagtccatgagaccctaggcagtcaggcactgagctctgtcctccagctgaaaataatgaagagcacacggcttctccccggtcatcgtcagggtgactcaatcctgctggaarccctgagggcgcacatgagagaaatgcttttcaagggagccaaacttgatctataagcttatctcagggtatagtccaaataacacttatgactccaagcataggcagccatgcttactactctctaaagaagccagtacttctgatgaggaattgaaagtcaagatgggactctgcttttgtatccattccccataatagagttcagcttatatgttaaatgaattttcacataaatttgtccacttgaacttctgcttctttttgatagttgcctagagatggntctggagagtaggttcttttcccatcgtgatcagcaactgctcttcaaagtacaggagctggtccacttcaaaacagtcgctggcttgaggcaccactttttccaaamactcgcggatctcctgtcgctagcattctgatgccttgctctcttgaggtaattatagacctcttcaaatacttctgtccccagcttctgcatggctgattccctcatgcgtttcatcttggtcctggccatcacactgttgaaaattggtggtcctggggacatgtcttcagccatggtggtgatggtctttgtgtctagagaagtgcaacccaggacattttcccaaacacctggccaacgcttcgatatcactgtcctgttggtttgttctgtaagcaggctgggatccctcattcctgatttctttctctggtctttctaacgctatttcttcttcctcctcatcactctctwcacaataggaatcaaatgcatcagcgtagtactcttcagccacaagtgggtcttctgggatctcatggtatccaaggtcagatgtggcatcctctacaattgattcaagttcgtggaggtccatggaaggaataggctgagactcaggcaggttctctaaagttggttcatcagattcctcttccctgccttgccacctctcttcatnctcgtcctggggtgaacaagaaagtcttccctcaggttgctcctccttttcttccncgtgccgaatn

SEQ ID NO: 2043 - DNA, 228 bp, Homo sapiens
  SITE (184): n equals a,t,g, or c
  SITE (213): n equals a,t,g, or c
ggcacgagcaaaaactagccaggcacgatggtactcacgtgtagtcccagctactcagaaggctgagtcatgagagtcacatgaacccgggaggcagaggttgcagtgagccgagattgtgccactgcactttccagccttggtaacagagcaagaatctgtctcaaaaaaaaaaaaagtagcntttttataaaatgattgtttcctttatancttgcaaactaatgc

SEQ ID NO: 2044 - DNA, 696 bp, Homo sapiens
  SITE (81): n equals a,t,g, or c
  SITE (170): n equals a,t,g, or c
  SITE (581): n equals a,t,g, or c
  SITE (636): n equals a,t,g, or c
  SITE (651): n equals a,t,g, or c
  SITE (683): n equals a,t,g, or c
tgggagcaagagcgaggtggcagtacagcaggctggccttgctgtacgctttataattccagcgaggaaatctttcggaanacacaacttgcattctgtcacagtaatgtggagaacacatctagggttttcagcttgttctattcagctgcctggagtagttaaaattnttctgagcatattgcttcccccaaccccatgaggtgggaaagagatgtttagagacatatttctcttttaggaagaaatgcagaaccactgagacctggacaactgttggtcttattttctgcttggatgagataccttcctgctatttcttaaggaaatatagttatccatcctcacagtcacagctgaataccaggcagttggttgagtagtgagttcttctggaagatggacgggaaaactgtcaacaggattgatcattaaaaaaaaaaaatccagtgaaatgtttatttaaaaaattaattgaactcccttgcttttagagacttgactattgtccagatcagatcttgttttcgagtgtgcacattccatatataacagggctgtggaatccagactggggaaanccctgtgcctgcagacattctttcccccccccatggacaggaaacacagggacanggggggttcttaacncggttgttccaaaaaattccttttcccaaccngggggttttaatt

SEQ ID NO: 2045 - DNA, 630 bp, Homo sapiens
  SITE (23): n equals a,t,g, or c
  SITE (55): n equals a,t,g, or c
  SITE (605): n equals a,t,g, or c
  SITE (610): n equals a,t,g, or c
cttagggaattggcctcgaggcnagaattcggcacgggggatcagaattttccantggcttctttttcccggctttcatcacactgctgttttttcagcataatcgaacagcttatgacattgtagcaggaaccattgtggtaaaaagaaatggggtcagatgatgccccccaaaaccctgatttccacacactaagactaaattatgtatcaaggccatcagtatccctgggttacactaattgatgatttagaaattaaagcagtcactccagtgtgatgcaggtgactactctgaaagtattgattatacttgaatgccaaagaacttgtccagaagaaaaacctgttaaattcaagtattaaaatttttagatcaaaaaggcaaatgattttataaacaatggacaatatatactttcttaagatctaaggtactttcttaagatctaagaatttgctgaaacattttcagctttgaaatctccaaatgaaactttaaaatttattttggtttatcccaaaatgaatggaaaatgtccagttgtgttttgtgaaacacctgatgtgaactccatcttttagtttgacacttccgggggaantgtcnttggtgtttagaggagggga

SEQ ID NO: 2046 - DNA, 731 bp, Homo sapiens
  SITE (673): n equals a,t,g, or c
gaattcggcacgagagtaacctcatctgggccgtttggggctggtggttccaaatttttgcctctggcctgggcccgtcatccaacgccaggcctccctggggctcccactgtgggtacctcgctaactaataatcttcatttcccatgtaaacacaggcacctccgtatgccccatttcaggagaggtaaccagcccctagttgccctggccagaactctgggagaagctatgttcagtattagaccctgtgaattctttttawwattattattattattattattatttactgttgtgttgggctctcgctctgctgcccargctggagtgcatttgtgtgatcatagctcactgcwgsctcaaattcccgggctcaagtgatcctcccgcctcaacctctcgagtagctgggactatgggcacatgccaccactccctgctaagaccctgtgaattctatttccctaacctcgctggaatcagctccctccttcccagcagttggctttctccctctctttcctggtctggtctgtctaccaccagttgccatcctgtcctgagtgattgcttcatttcccaccctgattgacatcctcagggattccccttcagcataagctgcccccaccccgggcgtggtcccttgcacctccctccacaggctggnccctgcctgcctcctcacctcacgtatccccagtcacctcccctgctccaaggcacgg

SEQ ID NO: 2047 - DNA, 918 bp, Homo sapiens
gcggccgccgccactctcaaaccccccgactgctcctgggtccctcccagacgccgtagtcgctacacgtcacttccgggggaggggctgcgaccctaaggggtgtcgtgagccgcrtctgccagcaaacccgggtttggtgtggccgggggatgtagctcgggcgcctcctggagtcgtctcgccgctctccgtcgcgttcggtgcggttgcttccaggtccctgaggcgcccgtccggaacccgccaggacccaagctgccgcctgggccgggacctcggactcctcaaaggcgcgccactttctcctcggttggagggaagaggtggcgctcgcagagcaacctgcgggggaccacttctgttggtgctaagctttggsgagagtctcctccctcctgtgtccctcgtcctccttaccactcgctgttagaagttggggccgtcacagctttctcatcgaagtgccagatcccaggacactacaaacgcttgataaatactaaattagcactgtggctttctagcctggggactgacaaatggaagcgctggagtcgtgggaaaagcttgccctgacgatggaggcagcgaccagaaatccattcgtggctctacccctcactaactcaccaattttaagcaaccttaacctctctaaaacagtcatcatttataaggtggagagaacccaatmttagagttgttgtaatgattaaagaaaataaggtgcatgaaacacctagcaagagtttcyagcttagaggttctcattaagtaaaattcttaaggaatcaggtcacacttgatacaagaggctacttgagcagtttagcaccagaaggaatgtaaagtcataaattaggacagctgaacaaaacctccaagaaataaattaggtgtttgtttaacaagaaa

SEQ ID NO: 2048 - DNA, 362 bp, Homo sapiens
  SITE (266): n equals a,t,g, or c
  SITE (349): n equals a,t,g, or c
  SITE (350): n equals a,t,g, or c
ggcacagcttgggaggctgaggcgggagaatcatttgaacccaggagtcagaggttacagtgagccaagattgtgcctacattccaacctgggcgacagagcaagactctgtctccaaaaaaaaatagtaagttgtgtaaagaaaaatattaattatataatatggcagttcctatggagagtgtggcaaaaatcaagagggcttggaagttttttctttgctcttgcaactggctggatgcagttcatatatttttcaaccagtnggtggccaccccaacctaattttttgccagttgtaacctggtggccagaaggggcaggactgatggcttgggcaagaccgttnnggccaagtttta

SEQ ID NO: 2049 - DNA, 411 bp, Homo sapiens
  SITE (27): n equals a,t,g, or c
cagcatgtaacctatctgaaagcaaanccacacgtccatgatggagggatcgtcccgctggatcccctcactttctgagaagatggacagtgtaggatcatctgtgctagacaaacctgtggttggttccccttgattagacaggcaaggtgtggtgggagaatcaccttaaagccagctcgcatctgccccccaccccccatgaccctgtagccacagcatcacctatttggcatccctctgagcaatgccagtgatcccattcacgtagaactgcgtaaccctccttatgctacatctcaaaaaagccaccgaggggtttacccaggacgstcctcacctcagrtcacatccttcccgggcaawtaaagggaaaggaaccagactagttagtccttcactctgtgctgg

SEQ ID NO: 2050 - DNA, 458 bp, Homo sapiens
agagaggcctggaagagaagcaactttagttgtgcaagcaccagtggagtgagcggtgccagtgccagcgccagcagcagcagtgccagcatggtcagttctgcaagcagcagtgggtccagtgttggaaactctgcttcaaactccagtgccaacatgagtcgagcacacagtgacagcaacctgtctgcaagtgcagcagagcggattcgggattcaaaaaagcgatccaagcagcggaagttacagcagaaggccttccgcaagaggcagctgaaggagcagaggcaggcccggaaggagaggctcagtgggctcttccttaacgaagaggtgctgtccttgaaagtgactgaggaagaccatgaagcagatgttgatgttttgatgtaataagggtgaatttatcaacgttctttgygagcattaaaatactccatcmwtatggrtttacatgc

SEQ ID NO: 2051 - DNA, 429 bp, Homo sapiens
ggcacgaggaagaaagtacagaagggtaatgtggttcatctgaattcattgattaccagtggttatactaagaaagtggatatcacatttattccacggaggatttggagtcctgaagccacaacagcagagctgatcaggaagagggaactacggcgagagaggtttacacatgaggtggacttcgacgattttatgatgccttttcagaagaacatcacagagaaagctcgagcactggaagctgccttgaagacctaagtcatagcagttatttcttggggtaaatgctttgaggcccagggaccaatctttggagaaagtagatatttccatcaaagccaaagcaatccatacaccaagaacttgttaccaagaatttctttttgctttaacaactataaatattcttagctgtctagagaaaaa

SEQ ID NO: 2052 - DNA, 128 bp, Homo sapiens
ctttatcccctaaaaaatggtttgaaatgtcattgttatttaaaaacccgatgtgttggaacttctttaatctgctgtttcctctttttccccccctttgaaagtttcgcatagtgtaaacattcact

SEQ ID NO: 2053 - DNA, 375 bp, Homo sapiens
  SITE (199): n equals a,t,g, or c
  SITE (337): n equals a,t,g, or c
  SITE (344): n equals a,t,g, or c
aattttttttttttttttttttttttttattatatgaaaactgtttattctatagcctactgggaattggccagaagttagaaggacattggaaatgacttttaaatctccatttgagaaaaagcatgccatgagtctaaataaccaatttcatttagcaaacaaaatacaagtaaacaaaacacaacttctctgatgnaatgaagtggttaccatattttttcccattgtgtaaaggatagttctcatatggaaatatatcacctaaggcagtagttaatcaggaatattctggcaaacttattggggggtaatttaaaccccaaatcgggaaggnataggantaaaaggacattaaaggtcttttctttcaaa

SEQ ID NO: 2054 - DNA, 642 bp, Homo sapiens
  SITE (118): n equals a,t,g, or c
  SITE (147): n equals a,t,g, or c
ttgatttgtaaatagcacctggatagcaagttataatgcttatttatttgaaaatgctttttttttttttacgttaagcacatttatcttgaactggagcttctaaaatgggccccangggtgcaagatgttggtgtaattcagagntagtaaaggtttatcgcagtgtgaattataagagtccatccaaatcaacgtcccctccctcctctcatgcgatccaggtaattatgcagttagtgccacagtagactagcctagcaaagggtttgctccttgctgtctctgactgcaccacacagctattgatggcagctgaaagaaagtggatcatgccttaattttaaatattcctgtcctctggttattattttaaggaacttcatcatgttaaaatgacagcattcaaaggtgtaccacaatcaatttatcaaggaaataaaggctattgtaaccagagatttaatgcattcttctaaatgtaaatttaaaatttgccctttaaaaaagtccactttccccatatggcaaatgttaatagggtttttatgggggrttaaggargcgggcaaaactacaggaggcaggatttcaaaggtaattttaaaaaatacacacccgtttttaattcaggggaggtgt

SEQ ID NO: 2055 - DNA, 169 bp, Homo sapiens
acatagcagcggaggtggcagcagcggggacgaggaagagtggtatcagggccttcctgctgtccctggtggcaccagtggcattgatggtggccagktgggcagagcctgggacccagagaagttagcccaggaactgkcagcatcgctcacccaggacactggacct

SEQ ID NO: 2056 - DNA, 442 bp, Homo sapiens
aactccagagcctgggcctgaacagggaggtggtctctcaggcttgatgctcaggcctatatctctccatttttgccctatctcttaaatatatgtaatgtcataaaatgcttttgaatctttttaaaaagtgtcaagctcatgaaagacagcctaagaaactattacagattggaggaaactaaggaaaaataaaactgaatgcagtgtgtatcytagatcagagaaagaacattagtggagaaagaacattagtgaaatgtgaataatttgagctaataatattgtaccagtagccggatatggtggtgggtgcctataatcccagctacttggaaggctgaggcaggagaagctcttgaaccggggagataaaggttacagtgagccgagacctcaccattgcactccagcctggacaacaagagcaaaactccgtctc

SEQ ID NO: 2057 - DNA, 410 bp, Homo sapiens
  SITE (307): n equals a,t,g, or c
  SITE (368): n equals a,t,g, or c
  SITE (391): n equals a,t,g, or c
tgactatctcagcctccacatccttgcattgctatttatgctgcctggtgcacctcatgctgcctcaccccatcatctgcctcatttctactcttactccaggtctcagctcagatgccccctcccccaggaagccctccctagccgtcagttgaatgaggtgtgtctccttgggctctcccagactcctgggctcctccatcccagccctgatcactctggatcataattgtgtgagaggggtctgcccccccaaaccctacaggattgtgtgccctactgtgggacagagggcagagcagaggtngtctcaatcatcactgtgttcaacaacatcaaccaggacacacaattgggcattggggatntgttgttgggaattgaattgganggatgtttttttaaaaatt

SEQ ID NO: 2058 - DNA, 345 bp, Homo sapiens
ggcacgagtgaagacttctgtgaagattctttcagagctactaatgaagatgaaaagaagaaggaaagtgggaggaagcagggaagtgaagaaaggaaaggagggaagaaggaaagaagttaagaagcaaacgaagacattgacaacacttttataggcacttttcataaatgttgttttatttcatcttctcagcaccctgaaaggcagaagcaattgtttgctttccacagatagraaaattgagatttgatggctccggawtgataataagggccctgctgatcatacgtagtaggccaacttccccttaaaaacaaccatctctgtagttagacagaattt

SEQ ID NO: 2059 - DNA, 216 bp, Homo sapiens
  SITE (206): n equals a,t,g, or c
gcctgggcatgccaaagaccgcacctggcttttgttgttgttgttgttgagacagagtctcactctttagcccaggatggagtgcagtggcacgatctccactcactgcaacctctgcctcctgggttcaagcgattctcctgcctcagcctcccaagtagctgggattgcaggcatgtgccaccgtgcccagctaatttttgtanttttagtaga

SEQ ID NO: 2060 - DNA, 450 bp, Homo sapiens
  SITE (115): n equals a,t,g, or c
ctccccccacctcacacacatggaatatttaaacaaaaatgccctgctaatctttagagatgcccagtgttttcaacacatgaaaggtacccagtaaatatttaaagaaaatacnacaccgtaggttctctaatgaatttytttttcttctaaataccatctggcaagatggccagaatcgtggcggtccgtttcatcttaacgtttccattcaggtttcacctccttttccataaggccttggtgtgagctgagattgaatgtttaattgaagaggacataattttcacacatacagcaaagatttgatgaggctttgaggtttattgtagccattaaagtgtcgtagctgctggcaaaatcccagaaaatgtctaaagctaaaccagatgtgattagcaaatttcaagaagtatcaggccctagatctccaggcaggcagagtctttt

SEQ ID NO: 2061 - DNA, 392 bp, Homo sapiens
gagtggctcaagctggagaagtcttggaaacctgatcccaactaccaggtgtttaaagggtacctgtggggaagtgggtttagattcttctctgattgcagagagcagatccggaaataataggtggaaatgttaggagggcagattgggtttaaattttaaaaaatctttttttaatgaaatttttgatttgtaatttttgtgggtacatagtaggtatatataagaaccttattttctgttgtttcccttgctattataaatttattactgccagtcatggtggctcatgcctgtaatcctaacamtttgggaagctgaggagagtggattgcttgaggccagaagtttgagaccagcctggataacatagtgagaccccatctctacac

SEQ ID NO: 2062 - DNA, 552 bp, Homo sapiens
gcgtggacccggaagcggaggaaaggggccggggacctgtgcgagttttgttaacactcctccctcttgttgaggacctggatagaactgtttgtggagaccattgcaaaagatgcctactgttgcgctcagagggaaaaaggaaaacccttcagaggagagacttggataatgcaatagaagctgtggatgaatttgcttttctggaaggtactttagattgattgccgagcggggcagttttgtgagccttcatctgaagccttcagttcacccctctgcacaggcctcagctttgaagaacggagtctttgcacttacacacactcttcctgttctgccttcacctatgccgggataagcagagatctcatcaattagctcttctctgcaaggtcttccactatttctgtctgtcttccatatcaagcctggatgcagctgctgctcgttagagcagagatgaagaaagtgttctgcataagtggcttcctgaatgatgaggaccagaataaaggtttttgatcaaaaaaaaaaaaaaaaaaaaaaaat

SEQ ID NO: 2063 - DNA, 285 bp, Homo sapiens
gggaaacgttcatcgagcagattgaaggatgtcatggacaaggcagaggacatgctcagcgaggacacagacgccgaccgtggctccgacccagggaccagcccgccacacctcagcacctgcggcctgggcaccggggaggagagccgacaatcccaatgccaacgcccccgtgtatcagcagaacgtcctgcacaccgggaagaggtggttcatcatctgtccggtggctgagcaccccgcccccgaggcccctgaatcttcgcccccacttcctctaagctc

SEQ ID NO: 2064 - DNA, 515 bp, Homo sapiens
  SITE (479): n equals a,t,g, or c
tggtgcaaaagcaggctgagatagatcaccatgcagaaggacaagacacatagaaaagaggctcgtttccaagaccagtcaggtgctggctcccatttaaactccaagatgtaagaccagtcagaagctggttcccatttaaactccaagactcaaggagggtacaaaggctcaaaggaaaacagaaatgactttagggagctaaaaaaaaacctgtgtgcattgcaaggttagtgggtgatggagagtagggacaacaaaaaatgaagcaagggaggacaaatgggacagaagacacaggcctgggaggctttgttctcagagcaatgggaaatgagaggactatagcaggatagtggctctgccactgggacatcacagctcttccagggcagtatttcctacttatagaagccaggctaccacactcttagcagtcacccattcacaggaaggcatccaaacgctgatggggaggntggaagaagtagtgtcttactgaagaaggagaagta

SEQ ID NO: 2065 - DNA, 538 bp, Homo sapiens
  SITE (433): n equals a,t,g, or c
  SITE (526): n equals a,t,g, or c
tttttagtaacattacagtaaaacatgctgagccctaaattaaccaagcccaccttgttggaccaacttcaaaaacagtaacaatgggcccaccttgacccataaactcttttcctttatttccactggactcttcttcagagtaaatgtctaagaatgcgggcaaaaataagaataaccacattctagaagtcaaggggatcacaagagggcttttggctctgtgccttttttactatcgaggatagaagtatattttaaaatatctggtagaggagaattcagtgaacaaagtaccttaatatgtcagtatttcttcaagttcttcaaagacatgaaaaaataataataccttataataaatacacttcaactctccgacacaartgaccacttaatcattctcccatcagctcccacacctccaccctcncagctctcaaaggcccccatgtattcttaacagaaaacaaaacaagacagtggtgatacccgtgtagctcatgtagttggtgaacggagcccntgggaagcgagt

SEQ ID NO: 2066 - DNA, 450 bp, Homo sapiens
gatgttctcataccagaaattaaactgaggaatttaaaaatatgtattcattcatttcaaaattacaccaatcaatcctttacatatcacaaataacatattttcatttttaaaatttccaaaatccattgtatggaaattttaagaatttgggtgctgctacttaaccaggtattttaattaattaatttaattaattaatataactttgagtcagtttgcagagacacagaattaaacacgcttgccttaaatgaaacacaaggcaatcatttttgatgacagaagcatttcgagatcctgggttctctttcacatcagccccttttgttagtcacaggcctgaatgcttatctccatgagaaccagcttgtgctggctacagacattaggcagagacaaagagcaaactacacaaaagggaaagcagtccacttccaaacatcatct

SEQ ID NO: 2067 - DNA, 560 bp, Homo sapiens
actattcccttggatctggcttcccaaagtctttttgctttcacctcggtcagacccagatactcacacatctacctaactaacagactgtactcccacaggggttccgggatagccccctcctatttgggcaggctctcaccaaggaaytaatcgagcttccccttgctcctagcagcctccttcaatacatcaatgacctccttatgtgtagtccctcctttgatctatccatcaacacatcacccaacttctaaakttcctctatggccagggatatcaggttttacctacaaaggctcaagtagcccaaacccaagtcactaaccttggactcaccctaacccctaattcttgagccatgccagcccgatggaaggagctaatacaggatgtgccccttccccacaccaagaaggacccttcctttttgggccttgttgggtacttccagctgtggatcattaactttggcctgttgaccaaaccactctgcacggcatcacgtgggtccatcctagaacatttggacccagcttgcccattaactcccacttcag

SEQ ID NO: 2068 - DNA, 222 bp, Homo sapiens
acctggcagcatattagaaaatagcttatgttaaacaaaaaccctataaaaacattcatcccagcaaaagcctccagggctggagggtgaggggaaaagtttcaaagcacgtggatagtccagatctgggatgccctgtcctcatccggctcccatagcaccacgtgggtcccggtcgtagccccggcctcccttcacgtccaggatctggccttcgaacat

SEQ ID NO: 2069 - DNA, 366 bp, Homo sapiens
tgtcaatattgctctggaaaacaagagggcatattagaagatcaaaagtactgccaagcattgaagtgccaattctagatccagtctcagccctctgagaatggatatcattgttttcaagccattcagaaaccaatgtgaattgaacacctagtatgagctctctgagggaagagccaagtcatgcattttttatcttaaggggtcttcaatacctctagcccaaaacagtatctccatcaggattcttctctgatagtgttcatttcttttttctcaatggatgccttaaaaaaaaaatcctacaaggaaacctgtactcctcaaatacaccactcaggtgaccattaaatcatttacattgtt

SEQ ID NO: 2070 - DNA, 327 bp, Homo sapiens
  SITE (217): n equals a,t,g, or c
ttttttttttgtttgaaaaggacccattcatttattcttccaacacatctgtattataaaactactatccataaggcactgtgttaggtgctgtgttcctgaccctacagatcccattccaccatagcaaarggtaaaagtgactctacagtgagcttggtagacatagacccatgcttatatactcagggacacctggaagagatataaaaacagnaacatctcacataggaagttttcaatgcatcgtgatcaggactcaaataatccccttctcttttttcttcagtgtactaaagggagcacattgttggagaaggaccggtt

SEQ ID NO: 2071 - DNA, 747 bp, Homo sapiens
ctctgtctggtaccggatgacgcaaaatcctcctaccatgttgagggcacaggatatgacacttacctccgagacgctcataggcagttccgagactactgtgctatctgcttaagatgggagtggcctgggtctccaaaagcattggaaaagtgcaatttagaagctgctttcttygaaggtcattttttgaaagtgctgttcgacagaatgggaagaattcttgatcagccatatgatgtaaacttacaagtaacctcagtgttatctagactttctctcttccctcatccacacatccacgagtaccttttggatccttacgtgaacctcgctcctggctgtagatctctcttctctgtaattgtcagggttgttggagaccttatgcttcgaatccagcgtattcaagactttactcccaagcttctgttagtcagaaagcggttacttggtttggaacctgaaggccctattattgaccacatcacactgctagagggtgtgattgtgttagaagagttctgtaaggagctggcggcaatcgcatttgtaaaatatcatgcttcctccacaccatagttaaggagaaagggtacgataaggaattgctcaatgtgaccccagaggattgggatttctgttgcaaaggtttggcattggatctagaagatgggaacttccttaaacttgcaaataatggcactgttctcaggtaataaaacttagttgtgaagtcaaaaaaaa

SEQ ID NO: 2072 - DNA, 514 bp, Homo sapiens
  SITE (51): n equals a,t,g, or c
  SITE (503): n equals a,t,g, or c
gccccatctctactaaaaaaaaaaaaaaaaaaggatttgaagtcctggccngagcaattaggcmagggataaaaaggcacctaaggcccttttgcaataagaagccagatggataaaggaagtgctggtcaccctggaggtgtactggtttggggaaggtccccggcccccacagccctctggggagcctcaccctggctctccccactcacctcagccctcaggcagcccctccacaggacccctctcctgcctggacagctctgctgtctccccgtcccctggagaagaacaaggccatgggtcggcccctgctgctgcccctgctgctcctgctgcagccgccagcatttctgcagcctggtgagtacccaggaccgcccaggtatggtctctgcccaaaccacaggaggggccaacccaagacaaaggcagaacatctggggcaggggccaggctcccacctccagcaaacaagggcgggtcccataggggtgggtgcngccatctcttc

SEQ ID NO: 2073 - DNA, 495 bp, Homo sapiens
  SITE (1): n equals a,t,g, or c
ngtgggcagaagaaagtcataatttctgaagataacaaatgcagcacagaagtggaatagggccatgaatacctgaaaacactaacgttcttttttcctgtggatttatgcatggagggcttcgtataatgacttggtactaccactgctattaggaaccattggaattctgtgataattttggattgctttttaattcaccaagactamtgtggatgatgtcagccacattatggtgtgagccctaaatttaaggtcaatatcatgtgctaccttcatatctggtgatactagtattacctcaaatggtctgagtacaaatcccccttcccactctgctcttttgtataatgtgtcctagcctaactaccctttwaatcaagaggactaagcagagttccygtttattatttatttgtagcaagtttgaatttcatttctacacacagagttwattcaaacaagccgttacagctgggtgtggtgtcgcacacc

SEQ ID NO: 2074 - DNA, 576 bp, Homo sapiens
gtcgacgacaattagaggcaagtctatcccaaaactgagtcttatgttaataatgttttttattttctgtcttctcagacagctcagctctctcaagccagcggaatagtttcccaacttcctttkggaccagctctwaccagcccccacctgcaccttgtttggggggagttcatcmtgacttccaggtcactggaccccctggcaccttttctgcagctgatcccagtccttggccgggacacaacctgcatcagactggcccagcccctccccctgctgtgtctgagtcctggccttatcctttgacatctcaggtgagcccatcctacagccatatgcatgacgtgtacatgcggcacccsaccctcatgcccacatgcaccaccgccaccgccaccatcatcaccatcaccaccctcctgctggctctgccctggatccatcctatgggcctctgctgatgccttcagtgcatgcggccaggattcctgctccccagtgtgacatcacaaagacagaaccaactacagtcacctctgctacctcagcatgggctggagcctttcatggaac

SEQ ID NO: 2075 - DNA, 608 bp, Homo sapiens
gagcagttgttgatttagtgacttttctgaactcattctttttttttttttttagagatagggtctgagttggtgactcaagggatcctctggccttagtttaccgagtagctgggactacacgtgtgccaccgcacctagcttatgaatgaattctttaaagtctgcattgtttattgtgtgtgaccactcaggtttctgctcagttagcttagtggtcaactaatgattagagagacaggttttcttaaacaccttcaaccaaaaaatctcccagtctttcctgaggggtttagtacttacgttgggacaagccttyaacaatcagccaagcactttacattaggttggtaccaaagtaatttcgttgaaatgacaaaaccgcaattttttgcaccaaccaaccaaataattctgccttagccttcacttcttgcttctgtagtgcctcaaggtcacccagaggttagagctcagggccttctcaggcctatcttgagtgttcacataaccctagacatatgcacaccctaagcaccttctacagtctcaggaatatgttagcgtttttcaaagccctatggacatcttattccccagctaaatac

SEQ ID NO: 2076 - DNA, 529 bp, Homo sapiens
  SITE (402): n equals a,t,g, or c
  SITE (408): n equals a,t,g, or c
  SITE (477): n equals a,t,g, or c
  SITE (483): n equals a,t,g, or c
  SITE (524): n equals a,t,g, or c
actggagttgagaacctgtattttggaggcttacaaagcttttaataaaactgtgtggctgtgtctagatatccatgttaggttttgagtgaatttctgcatgaagaaaagacatctatttgggtggtgatgttgatggttggggcagtggatcctgtcttttataacaatatgattagtaataataatatgactaatatgattagtaatatgattagtaataatatgactaatatgattagtaatatgattagttataatatgattatattactaatcatattgttaataatactaactatcagttatggaatagttatattaggctctgggctaatctccatattagcactatatataaacactattattattctaaattttataaataaggaaactgangtgtantaacatcaccgtgtaatttcctcacgatcacacagctgcttgactccaaagctcatctattcatcactnctccanaagattaatttccatttaaataaggaaaatgtggattaaanaatga

SEQ ID NO: 2077 - DNA, 373 bp, Homo sapiens
  SITE (233): n equals a,t,g, or c
  SITE (245): n equals a,t,g, or c
  SITE (252): n equals a,t,g, or c
gtttttaaatattttcttccatataggaaattaatagttactttaatgcataactgtatgttatacatatgttataatgtataaaaatttattttaagatataccaaatcatgagtagttttattttttaactactagctccacaacatcttacctacatggcttctctttactttttaacattgagtatacctctttttttttttgagacagagtctctctgtgtcgcccangctggggcgcantggcgcnatctcggctgactgcaagctccgcctcccgggttcacgccattctcctgcctcagcctcctgagcagctgggactacaggcgcccgccaccatgcccagctaatttttttgtattttttta

SEQ ID NO: 2078 - DNA, 602 bp, Homo sapiens
  SITE (9): n equals a,t,g, or c
  SITE (52): n equals a,t,g, or c
  SITE (581): n equals a,t,g, or c
  SITE (582): n equals a,t,g, or c
  SITE (597): n equals a,t,g, or c
  SITE (598): n equals a,t,g, or c
gggtctctngcaaaaatccatcctaaaagtatgttccttagaactatacatngcaataaacatgttttctagctatagctctgtcttggtcatcctcattccctctctgatctttccccttgctttactaaataatttattaagcaatctttaattgtagtacaaaccacatctttgtcattctttggatgtagtgtcacaaaaatatcccagtccacatcagttacacccatagataagcttacagacagaggtaagaagggagcagtgagtggggtgcaagcattggcaatattgatgggcatcctctgtcctgtactgatgacctgaggttctggacattgggaattatagcacagactcaaaataaaacatttttttgccactgtgaaaaagtgtgttgattttgtaaattaatacaaattcttcaaagacatattcagaaaaaaattccatgatgtacatgtttaagtgaaggataactgtatgtccttacatagtgctgaaatatgtagaacattatagagctcatggatataaaatttgatgttgaacattatacagtcttcttaaatggcccnntctggctggtttaanngatt

SEQ ID NO: 2079 - DNA, 440 bp, Homo sapiens
gccaagactggtgagtaagcagtcggcgtcgggaatggggagtccttggaccagagcaaggcctgctcacctgaagaccccggcgtggcgaaggctgctaccgagacgacggcggcgggggcggtggcggcggcgcccactcacgagctcacactcattccctctcccggggccccggccccgccctccccaatacagccagwcggcgggcgccttggaaagtttccggccctccaggaggcttcctggctcttgattggccagtgtgaacagactgtagagaccggcggtcacgtgacgctgaagattcccgcttcttaaagcaacctctcttgctacgtttgcgagtaggtgtgtattgttttaacacacgtttaataagcatattttattttttttaccaccacaatagtaacgaggaaataaacagtctcaaagac

SEQ ID NO: 2080 - DNA, 332 bp, Homo sapiens
agatgttctcaggcacacgcttctaaagaaacattggagactcttctagtggcctttatctagtcactgctttaagcaaggaataaaacatctgtggctaaaatttgtaaaactgtgttcccacccacccttcagacctgacagaagagattttaggattttaagggaacagctttttcctgacctaaaagskcacagtagtgyaaaggccaatgtcacktaagtacctgttccccatctgtaaaataactttcagatactattcccacagctggaatcagtacartgttttgactgaggtattggaaaagcctatgagctcattatcattt

SEQ ID NO: 2081 - DNA, 519 bp, Homo sapiens
  SITE (262): n equals a,t,g, or c
  SITE (463): n equals a,t,g, or c
  SITE (477): n equals a,t,g, or c
  SITE (486): n equals a,t,g, or c
gccagcatgcctggctaaatgaaagcttcttttcttttctttcccttggtctcaaactcctggactcaagtgatcctcctgcctcagccttctgaaatgttggaattacaggctgagccactacacccagctcaattttcttccagtgttgctgtcctcagtaatttcagcttaatcagcatctctcaccatgkccaatgacagaccatgtacacagtaatatattcagagtgacacattgaatacagtaaatgtgtgtggnaattttttaacatgctctatgctgccatatgtgaaatagtaagcattcaataaatggtagctttcctacataaatacccagcaacagtactgtataagcttttacagataatctgtaaaatatggatctttacattatttatggtatcagaagtgataatagacaccctggtttgaatcttggtgctacttaattcataanttcacattaatacntaatatggntttttggacttttgaaaatgatggtaactgacg

SEQ ID NO: 2082 - DNA, 729 bp, Homo sapiens
  SITE (17): n equals a,t,g, or c
  SITE (29): n equals a,t,g, or c
  SITE (155): n equals a,t,g, or c
  SITE (695): n equals a,t,g, or c
  SITE (714): n equals a,t,g, or c
  SITE (716): n equals a,t,g, or c
  SITE (720): n equals a,t,g, or c
cttggaatgaatttacnataaaccatatncatggtatacataaattatgtttcttctccatataacttcccaactttaccctatttatcaaaagcttgaatttggtgatgtcacatcttcctggtttgttgggacaatcaatccagtaactaatnccaggaaaacttacacacaaaacttggaatggaaatggtgttggggaatttcagaatccctgcaattgcttttttcagtgcttctgagcmatgmttataaakcatkgctyaraagagatatgcttgtgtgtgaaggtgcttccagtacaaaactaatgttttttaattcttgcaaaataaagtgtactccactcagttttacatctttatttttgatgtgccaagtcagacatttcacttcctcccatgattaatgaaggatgattcattttttaaaatactacatactaaatctgtactgtgtttggtcatcatagctctaaccaccaatgagtctgaacccaaatgcccagtgctgttttcttaggagaatggattttgtctgctggttacagatttctgatataccagttccagcttttctaaaaatgtattgtcataacatgtagaacagttttttacaattgcttaaatattcaatccaacttcacatgtgaaaaacatgtttacctgcatttattctcatattatttaatcagngtttccaaactgatgcatncntcanaattatcta

SEQ ID NO: 2083 - DNA, 402 bp, Homo sapiens
gcttccaggtgccaaattctgtcacagcgatcttttgctgtgcaataagccatcttgaaaacactggcataaaataatgattatttattaccaatttttaaaaaagagagaatcctggcttctgtgggtcaggactttgggcaaggcacaacaagaaaggcttttctacttcatgatgtctagggtctcagccagaagccccagagctgagggtgactctagtatatgaggcggtggctggaggatccccttctaaggtgttctttttagtcctgtgtctgacacattggcagggatggctggaaggctgggctcarctgggacggttgctcaracacctctctgcggscacttyarcatggcagcctccatgggtagtgagacttctgaaatgacaggtca

SEQ ID NO: 2084 - DNA, 301 bp, Homo sapiens
ctgcctcccagccagccattaattctaaggaaatgtcttttgctgaggtcgttactgctattataagcttaaaatggaaaaacataataggcatatgagttatttttatgggttgatgcagtttccaatggtgtgtactaatttgagaaaatgaatgtgtatacatacaagagtaagtcagattgttagactcatccctcagtattccatatgttttgtgactgattttacagttctctctacmtttctcatttacaaaaaawaaaaaaaagaaaatttgattcagcaattcctaaaaagt

SEQ ID NO: 2085 - DNA, 771 bp, Homo sapiens
  SITE (1): n equals a,t,g, or c
  SITE (657): n equals a,t,g, or c
  SITE (673): n equals a,t,g, or c
  SITE (742): n equals a,t,g, or c
  SITE (765): n equals a,t,g, or c
  SITE (768): n equals a,t,g, or c
ntaaccctcctaaagggaacaaaagctggagctccaccgcggtggcggccgctctagaactagtggatcccccgggctgcaggaattcggcacgagctccaagggcctgttcttgcatagaaatatgaaaaaatgagcaaagatggtcagaatcaactttgtcagtctctagaaaatagtcaaagattcaaacaaatgctgaatcaagaaaatgatgacttaagtgcagtaggaaagctttgtggtattttcccttagcctcacccccaccaactttagtgtggcaggagtctgaaagatggcagtctgtgttctcagtgtgagtacctggtcccagagagggcagagcagaccttgttctcagaaaattgtgtttatctgtttgattcgtctgcagaggggataagagtgaaggaatgacacaagaggattgccttagttttgactaactcagaactctcagggcataaaagcagctatgcacagtgtattccttgaaaacattgaaaggcaaataaacaagctgctgctgcttggggcaaaacattgcatttgggtcaataaatagacatgtcaaaagtctgggaggaaggccagacgtggtggctyacccctgtaatcccagcactttggaagttcaagggcagatcacttgangtgaggagttcaagancagcctagacaacatggtgaaacccccgtctctactaaaaatacaaaaattaccgggcctggtggtgcntggcttgtaatcccagtacttangangct

SEQ ID NO: 2086 - DNA, 484 bp, Homo sapiens
gtttagcttgtacttgatttttactaatagtctaagaactgaatccacagataactgtgaactccgtttagtcagtagtattactctctatccagctttttttcttttttttctatgcctataccactaacatattgtagaattaatttattttgaccttttctgtctccccccctccctttttaagaatttcttttaaagatggtgataagtaagtgaaactttgaaaggtaggcagtatcagatctacataattaagaactgcaggcaatttatggattactttcctttaaacttccaaagatgtaatagtataccttttagagatgtggctactgctctctggagagaattagggtaagcagattttcactcatactttatgagctcattaagtatgggcagttcaaccgtttagtaagtaaaacaaaatatgactattttgaagattaaatctgtttatagtaacctttagattatgtac

SEQ ID NO: 2087 - DNA, 586 bp, Homo sapiens
  SITE (231): n equals a,t,g, or c
  SITE (450): n equals a,t,g, or c
  SITE (544): n equals a,t,g, or c
ggcagtgtgtggccatctaacgtgccatccagttcttcaggctgtcattctgtcagagcctggagtcgaggctgcgagggccctggctggctgggtgttgcctgagagttgcccaggggaataagacttttaagactagattttgtgctcagtgcctcattcctctgcgactttgcccatggacatgtcttagaaactgaagttgcttcagaacagccctgagaagggcanggkcaagggcctgacagaagaggaagtgctccttccagagggctcagccagagccccatgggtgtgctggtcagcaggagggcagtcggagcctcaagccatccatgcctctctctccttacaggtactctgatggctaccgcagctcctccctcctccgggccgtggcccacctgcggtcccagctctgggcccacctccctcgagcccccctagctnccagatggagcccctctgcctggtgctgggttgggggarcctgtaggccatggtactgagaagcatcccactctgcttggggcctggtgagcanaaggccctctgcagtcacacccagcggggctcgttactgagt

SEQ ID NO: 2088 - DNA, 629 bp, Homo sapiens
  SITE (2): n equals a,t,g, or c
tntttttttgagacgtatctctctctgtcgcccaggctggagtgcagtggcaagatctcggctcactgcaagctccgcctcccaggttcacgccattctcctgcctcagcctcgcgagtagctgggactacaggcgcccgccaccacgccctgctaattttttttatttttagtagcgacggggtttctccatgttagccaggatggtctcgatctcctgacctcgtgatccgcccgcctcggcttcccaaagtgctgggattacaggcgtgagcaaccgcgcccggccctcaaattgcatttaaaaaaaaaatcccctgaagttgaagttcattaagtttattcccttgttaaaacagaggaatgatcatgttgacacacagtgaaaacaattctaatgaggtaggaggcagtactggattctggaggtgaggcttggacaccagacctaattgatgattaactaaaacagggatggggcaaaaacactttcccataagacacactgaccagggtgccatgtcagtttgccattgccatggcgacacccagaagttaccaccactttccatgacaatgacccgatgacccggaagttgtcacaccttttctagaaatgtcgtcgacgc

SEQ ID NO: 2089 - DNA, 415 bp, Homo sapiens
  SITE (403): n equals a,t,g, or c
ttggcagggtatcctgatggtgagatcgacctgagaactgagtggaagagaaggcgaagtatccagattgccaaaagggcttttattccttagctcagcccttcacgtatccctgcaaagagctgctcagcaaaaggtgcttattgaattacacctcataacaggcagaatttgaatgctgttcatcacaggagctatggagtgcatagttttatagagagtatctccccgcaggcaagatacatagaacaggtgcagaattacagcatatactcatttcgcctcttgttaaataaaagcaaagacagtctcatgcgatcctgtgtgctgagtagaatatccattatagagcattttcttttatttttgttaatatttttacttgtagattcccattaaaaanaaaaaagtatag

SEQ ID NO: 2090 - DNA, 642 bp, Homo sapiens
  SITE (495): n equals a,t,g, or c
  SITE (497): n equals a,t,g, or c
  SITE (560): n equals a,t,g, or c
ccktcgggtcgcatctttcagtgcggtgcgagagggcccagtggcagaggcccagcaaacagcgcttgtcaggcggacctgagttcgagttctgactgtgccatctacgctatgactttggggcaggcgacccaccctctgcgcctcattaacccatgtamtgcatggaaaataagcgtctgcctgggttagaagagggctgtgtgtgaagattcaaaggacgaaggggaagagtcctcgctgggcgcccagcackcggtgagcgcccggccagtggcagcgcgctcgggctggggttgcgctcgggctcggttccccgcccccggcagctgcgggctttcccagctccggcccgggcccttccgctctccccggcacttacagcggtctctctccacttctcccttctaggaccgcggcggctaggtcacctcctccggacgccgacacgcgctgccctggcaaccgtcaccagggaaacaagcgacgtcactntngcgttttcaacgctactctacgggggccgagggggcgccaagagttctgaaagtgacagacgngctgatggcgcgctgggctggatccaagcgagcacgatctcgagggggggcccgtacccaattcgccctaatacgtgacgtc

SEQ ID NO: 2091 - DNA, 554 bp, Homo sapiens
  SITE (421): n equals a,t,g, or c
  SITE (429): n equals a,t,g, or c
  SITE (430): n equals a,t,g, or c
  SITE (474): n equals a,t,g, or c
  SITE (496): n equals a,t,g, or c
  SITE (515): n equals a,t,g, or c
  SITE (520): n equals a,t,g, or c
  SITE (525): n equals a,t,g, or c
gctgggacatgggtgcaggcactccttctctcgccttccctttgccctccttgctttccttctcccctcttcttcccatgggtctcgggtctcatcactcaccattgagggaatcctcatcgaaggacatcgctctttttagaaaccggtttaaagcctccaaactcctcatctctgcatcccaagctaagatctggcaccaaaccacacacattggatgcaccgactgagtggcactgccccagcccctgagcaggtcccagccatcatctcctctgtggctttgctcatagaagttcctttgttttaactctctttcacctggaaggaaagccaaggggacctagattttactgggcactcttagacttgggagagacatttggaaagagggtctcccccctgargaggacactgcgtntgkggsanngggcagwaaaggcgggggtggcctcggagaggggatgacaaggntggtggcaaggaggcttcaggngcctcaaaaggaacactgngttgngctgnctgggggggaaaaagggggtttttggttt

SEQ ID NO: 2092 - DNA, 440 bp, Homo sapiens
  SITE (399): n equals a,t,g, or c
  SITE (410): n equals a,t,g, or c
gtcaaatagccattttgtttggcgtggtggagaaaagacaaaattcttgtgcacagactgatatttgtggggttttgttttcaactggccaaataaaccagctgtgaaatcggaaagttctgtgaagcgcaggctgcacagagtttggggagaaagtgcgctggtcagaagggcatccattcatttcccagaacagagcaggcaggaggagctacaggcccattttagaacttccacttctgattctagattcaggacagcagttctgtgcgtccatgccccggggaccaatcacacctctggtccagatttcagaagccactgagaatgatgccagtgccttctcaagctcatgatcatgtggctaagcttaaaagtctcagggaattcaattccacnggggccctttncagacattaaacaatccgctttgggccaca

SEQ ID NO: 2093 - DNA, 275 bp, Homo sapiens
accatgacatcccttctcattaaacgtgggaaacaaaaaaggatttagatagagggcaattttaggaataaaataaataatgacagtaatggattataacccactgaataaaacagaaagacacgagcccataaataaacaaatgatttaaaagtttgactaggaatgggaatcctaaataatttcaaattgcctccccacaaaatacttattaattagaaagaggaaaaagagacacgctacagtgaagaaatctgggaggccctatcttaatc

SEQ ID NO: 2094 - DNA, 422 bp, Homo sapiens
  SITE (320): n equals a,t,g, or c
  SITE (368): n equals a,t,g, or c
  SITE (381): n equals a,t,g, or c
  SITE (395): n equals a,t,g, or c
cggtcgctccgggaaatccgggccctaggattgtccactcatcccagtatcagcgagatacggggagatagagttagcgacaacgtgagccagagctggagcacgtttggtgagagaccagaaagcaatggaggccggasaggggaaggagcgcgttccgaaacaaaggcaagtcctgatattctttgttttgctgggcatagctcaggctagttgccagcctaggcactattcagtggccgaggaaaccggaaaagtggctcctttgtggccaatttgttaaaagacctgggggctggagataggagaacttgctgttnaggggggccaagggtcgtttccaaaaggaaaaaaaaatgcatttgcanttcgaatagccanaccggggatttgtngttaaatggaaattggacccggaagaa

SEQ ID NO: 2095 - DNA, 594 bp, Homo sapiens
tttaaaagtggaacaaatttatttaatgtaagttttatgtgacacaggagccttcactcaaaaaccgagtgaaaactacttttgtggttaggtttaatgaatgatggacagttgtatagaagtatgattgaacaaaaaaggcatatgatctaatggtaataaactggggaaaacttagcaagtcctcagattcttctcagcctctctgtgtaacatttcttccttctgattatatggcaggtcacctgtcacatgaggatcttcaagagagagagggtgggagaaggtcagagggacctttctgtttttgtggttttcttaattgycttctgcttaaaatactcagtatgctgaggggccatattttggggtagcatttcctgaactgcatcagcatctagcatactggtgtgtctatttctcatttctcggagtgagcattgtgctgaccctgccatttagtcatcaaatgttgaagcagtctttcctagccctctaaatgacattcaaatgggtataagcagttgcccctgaatgttaacaagataagatcattctgagccctaaaactactaagactaatggtcatttcac

SEQ ID NO: 2096 - DNA, 425 bp, Homo sapiens
aaaaaagaaaaaaaacagctctgtgctgtgcaagtgatcctcactgaaatagatgtgcttgctaaaatgaggaaagctgagatggccaggcctgggcatgggacatggtggtcagctggcaagtggggacctgtagggcmcggaagacagagtacatgcctcagcaattggccaaggcaagatccagcctcctgtgacaaaaagccaagccttcggccttcagtctgagggtaaggagatcacatgctcttgttctctgatctgtcccccaggtggcagtgacgaaagaagagactctcmcsgccgaggccccagtgcatggagagaaggaagaaatcaatttcctaattggtaccatatacatcaggtcaaataatttcttattttctascctgggcaacacagcaagactctatctcaaaaaa

SEQ ID NO: 2097 - DNA, 534 bp, Homo sapiens
cctcatcttccctgatcacagttgcccgggtgagagagctgaggctttataagcgtaggcccmggtgctttccascagtcmgcacagagctggctgaaaccggggtcttgagcagagaggctcctagcgacaccactgctgctttgacttcagtcacgacctgcaaacagatgctatccccttaaagtgcattcatatgtcagctttttataattgtacaaagaacatgtttccattaggcggctgagggcagctaagctgagccataccgttttcactgcagaattcaaactaagtggaaatccttatagtcttcatgtagaatgtttgactctttagccaaataggtaattttgtctaaaattcagtaaattcccagatggattattatcttgtggtaaatgattttggggtgaggggacattgaatcaggtctctgaaagaatctggggtttttagtataatatgtatgattccatctcatttcctttaactgagctcaaagttagaaagaaaatactgcctaatttgtca

SEQ ID NO: 2098 - DNA, 593 bp, Homo sapiens
  SITE (154): n equals a,t,g, or c
  SITE (579): n equals a,t,g, or c
cacacttcattaacaaaagtaaaatgatgaaaaataaattggattccattgctatctaaactctatattccagtttttctaatttttaggtaaccaacactgctcgtgttagaattctgaatttataaagtccccttacagaacatttttctcntgtactaaaacacagcttgagaatctgttatctgaactctgggtctctaggtctttctaaagccaagtttcaggtctatgtgcagatgaacaattctgaaataccactctacacactgaggaaccttcagtaacaccacattacctacagaataaaatccaaattctgtcttgctcaccacaggttgctttcagtctttctttttggcttcatctcttattgctcctcttcagggacctgtctactgtccgscaaatgtactggctcatttctccttgagagtctttgactacactctcccgtcttttcttcacctgtctgatgccagtcagtctttcaagactcagctcatttcaaacctcctcaggggagcctttcctgacttccactctcctagccgtcattgtgggtgtcaattattaagnccctcaatcacaaa

SEQ ID NO: 2099 - DNA, 519 bp, Homo sapiens
  SITE (340): n equals a,t,g, or c
gctttatctgaaatatcttcatagacatgaatatgaaagttctgaaaattgtgttcaatggcccgtgtgtcccagaagatcctaatgtaaagatgcatatttataaagtaatttatagaataggattaaaacatatgtagaactttattaagaaatataatgacyytgggaccaattacaggcccttgaacagccacaataggctcaggagggctgtgcttctgtgtaaagtcccctcccagacaccamcagggtacagagctgggatggtgcatggcttgggcaagtccatctgggcagagagagaaggccaaggtcagcctgtgggtggggacatggncggcctcactccacatttgtacctcaagcctcccagccacaggggcgcctcctggggacccagcttgggcgtttccattcatggggggcacccacacgtgtgggctgagcccgggtatgtgggaatgtggggggtccaacccaaggaaggcaggaacccacaggggcttgtgctgggcc

SEQ ID NO: 2100 - DNA, 441 bp, Homo sapiens
  SITE (316): n equals a,t,g, or c
  SITE (416): n equals a,t,g, or c
  SITE (436): n equals a,t,g, or c
gtgtttatttcctgacttggcttagaattgtgatgatgattgtaagaccagcctttgaagtaaaggagtttgagctgcrcctttaccccatgtgcctgtagactgacacatggtgtcaccaacattgagcaccccctgccccccactccagacactgtgctctctagtaggtacactcatctctacctgccttgcaatatttgtatactgcaggggcagtgtctgggttctggccctggctctggactctagtgtcctgatggagaaagtaggtagggagactggactggattagtggtgtttgaacttttttttncttttgtttaactggaacctcttttccaaatgaaatcttaaaggcaaccctagtatataaaagagtgaaggaggaactgctgaggattaagctgagcatngggccccatcctcttttccnctaga

SEQ ID NO: 2101 - DNA, 778 bp, Homo sapiens
  SITE (2): n equals a,t,g, or c
  SITE (382): n equals a,t,g, or c
  SITE (576): n equals a,t,g, or c
  SITE (578): n equals a,t,g, or c
  SITE (730): n equals a,t,g, or c
tntgagtcaaagcactaatagaccaggcaacttaccacttggagtggatttgccttacttttgccctctcccattttctgttttgagttaatttatcttgtaaagtctgttttcctttcccaaggaataattccttttgtctacctaacattgacttatgtcttagactgacactgttttaggcttttcactaggcacattccgaaggtaccaacaagttaataacatcacctactctccactaatagatgctatgctaagagaagtgaataatctttctttggtagaaaataggctgagatataaggtgatattgctattgacctgaaaatgtgatagaacttctggttgcctattgattattcctccatgtctgataaangaatctgcttcctaccatttgtacttgtcttggagctggctataaagaagtatgctggtttgttatgtactcttttcaacagtatcatagcccaacttcatctcattgaattgttcacatataccagagtactctctcttgaggaacacctgcaggcagatagttagggatgaccatgaggagcataatctcananagggatagaagtacacttatacaacagcacttacatgggcggtttctctggtagcatgtcccataagaggccatatgcttataattaatgtgtaacttgttgatgcttttgagatcaggactgctccaggcacgctaaaaaatgtgctaaangtatagtgggctctctaaaaagaggctatttggggagtctctgaattt

SEQ ID NO: 2102 - DNA, 1128 bp, Homo sapiens
  SITE (1013): n equals a,t,g, or c
  SITE (1081): n equals a,t,g, or c
tttttttttttttwttgaaaatctaaactttatttgtagccagtatttcttcacacaaggttttcccgcacccctctgcctccatgtctctttcctggcccagagagactgactccctccaaaggagaggaagccttcccctcacaccttcaaatgcccttcagtgatctgtagaacaactcggggcatattcaagaagggcaaaacttcatgcctcttgcccctcaatcctcctttcctttggtttgttttccttacttcttgccaaaaaacagctacctttggcagggaagttattacaatccattgcaagtacttcctccaataatgaacacaacaaaatcctgtctttattcatttaaagcacgaagctggccctctttacaaataccctgtttttaataaatcctcggtaatagacatccattcacgagaataaagtgggtacattggagctgaagctggtggtacgcaaagagcagatcttcagctcatgtctgtgtgtgcacagcaaaactcattagtgtgcactttcaaataacacatagacagaaacatattttcccgcatgcatgtttttcctggaaagattcacaaaagactataacagcattcacctttaagaacaaaaatgagagcaggaagaacttccacttttcattttaatgtttctgtactgcttgagttttttagtgatacgcatatattatttctattctttcaaaaaatcagagggctatctgattatgtctttattttctttgggttacatctctatatttttctaaaaaaaacttattcttaaattaaaaaaatgaaaggcaaagacaaactgcgtttagggagtgattgtttctcaaattattctacctgacgtggtgctgcataattttattatgagctctcagttcctccacagatccatacgaacaaagagcaaaagtgcaatattccaatggggatcttttgggaaaatatttaaattctgggtctcccacccaaccttacaagtngattcctctaacttttgttaaccagataagcaaaattgtctccagagaggtgaggccacaccagtggncagtcttcctacaggccaggtcaccgtgcgcgttactgcattgaagg

SEQ ID NO: 2103 - DNA, 213 bp, Homo sapiens
gctttgagggggttagactatacaatcgacatttaatgagggcctcctgttttctgggcacagcacgaggcccgaggacacagaggtgaatcagactctgcctctgaccttgaggagcttctggaccagtggaaaggaaggcagtcatgaaaactgatgatccactgaggttctgctagaactaagtcgtccaaagtgatatggagcatcaga

SEQ ID NO: 2104 - DNA, 331 bp, Homo sapiens
  SITE (307): n equals a,t,g, or c
  SITE (319): n equals a,t,g, or c
  SITE (331): n equals a,t,g, or c
gctggcctgcctctggtctcctcctacccccactaggctcagagaatctcccctccacacccacaccacaacctactttagaagggctgctgcatttcctccaggctttctgacccccttcctgtccctgcagggcaggggccccgaggagctggaggcccaagggccttgttctggtcccagggcctggggacacctgccaccgagggccaagaggaggatggacgtggacacagccccgagagcctggyccggacacagcagcagctctgcagaaccaaggcaagcattggggacttgttgggantcggggggcaanccaaggggccan

SEQ ID NO: 2105 - DNA, 405 bp, Homo sapiens
  SITE (6): n equals a,t,g, or c
  SITE (25): n equals a,t,g, or c
  SITE (365): n equals a,t,g, or c
  SITE (397): n equals a,t,g, or c
ccccgnacttaacttggccaccccngtgaaggaaataaagagccagaggtaagggtamctatgtaggtatggtgaaagacaatataaacagttttgtttgtaamttttcctgttttaaaggacagctgccctaaagcaataattayaaaactgtgttgatgggccttataatatatrgagatgtaatttgtatgataataatagcacaagggagtgaggagagaataaaggtatattggagtgactcttgactgccactattgaaattaagtggatatgaatccaaaagagattgttttaagatgttaaktgtaatccccaggctaaccactaagagaatacatttaaaatacmtatgggtaaanggaattaccaaagggattttaaaagatccatnggaaaaca

SEQ ID NO: 2106 - DNA, 762 bp, Homo sapiens
  SITE (619): n equals a,t,g, or c
  SITE (635): n equals a,t,g, or c
  SITE (644): n equals a,t,g, or c
  SITE (672): n equals a,t,g, or c
  SITE (703): n equals a,t,g, or c
  SITE (757): n equals a,t,g, or c
  SITE (760): n equals a,t,g, or c
ctcgagatattcagggaagcaggcaattagtcagaggatatccatgtcaggagaacatcagactgtgctcctaggagtcttgagggtcctcagagatgggacaggtagcaggaaggtgtgggagtgggcaaacacagtacatgcagttttatctgcttcatttattggcccctcacttggaatttcatttgaggaaaagtttccactgctaaagaagcttactggccagaggagcagaaggaagcccagagttgtccaaagccggagcgctgcatagagtcaagacctcaacccagatcactcaactcacagcctggggctctttctacctccccaggccacttcatcatttaatcggggcccagcactgagccaggcacctttgggatacactgggcttctgcctctaagagctgactggctgggtggggagccaggcagtgccagagaggaggtgctagaactagatgccgcgtgcataggagtgtgtcagcagctgacccagggatctgttgtttgctcctccttccctagaggggctcagcactcccttactccaggcagtgccctgcagaggccacagctaaaccattccctactggggtctcctggagagatngtcccgcctacatctncctgcatgncagcctgcttatccagacccatctcttncagaacacagcttgaagcatcaggagaagtnaagcaaggcatgctcagagctgctgttcctgctgccagcttttccaagttccanganct

SEQ ID NO: 2107 - DNA, 320 bp, Homo sapiens
atttagagtattctgaatttcagtatgtatttaccatttttagtgacatttatactttagtatttttcatattgttagttagcatttcgtcatatcaatgtgaagatttcttccagaccatggctggagaaggaaagaaggtgtgttttgcctgattcagggactatagagagaaccaagttctgcaggcctgtcacctaagtctcagatgagtatgaattctyttgtgtttttcacagatttttgcagtggcaggaccaagttccaaatgagtcatagccaagtctacagtaaagatgtggtagtattctgctttgaac

SEQ ID NO: 2108 - DNA, 430 bp, Homo sapiens
catgggctgaccttctggccgctggatacaggtatgctggttgtcgctgaggaagaagccttcccggcagtggcactcatagctgcccatcatgttgacacagctctgctgacagccgccgttgccctcggcacactcgtccacatctgtgcaggataggtagtcagtggggtcatggggtacaggcarggtcaagggtatatcccaagacttcagcaccaaaggcagtcttaagaactactaccccctaagcccagccttaagccaggaagtcctcacacccttgtcagctaatatttcactaagtgtaaaaargctgccctgarggcagagctgggaagctaagcaagtgggggaaaaggggacctttgaamctcaaatgtcacctaggtgaagccatgcctccctttccctcacctgtgtaaactgg

SEQ ID NO: 2109 - DNA, 909 bp, Homo sapiens
  SITE (899): n equals a,t,g, or c
ctcgtgccgctccagagtagctgggactacaggcgcccgccaccatgccccgctaatttttgtgtgtgtgtgtgtgtatttttagtagagacggggtttcatcgtgttagccaggatggtctcaatctcctgacctcgtgatccgccagcctcggcctcccaaagtgctgggattacaggcttgagccaccgcgcccggctgaggtttggtatcttttaactaaatacttattattctttaaaatttgtaattgtctggcttatagtctttcawttagtaagccctcatagrtacytttatatgtatgaatgaatctgagtgaaagcaaacatggggataacaactgcaaggttgagcaatatgcaccagaaggatattctagaagagcagccgtacatagcttcaggagtttcgggagttagcamcaagtgaagtcaaaaccaggcaggcaggtgttttatattacagaactgaaagtaggagatcaggcaggggagtttcaatcaaacctaaatctgtagaagacctaggagttcaaagcagcccccagctgtagaagggttgggagctgctcaaaaggatacacacggcaagagagaggctccaataaggactcagttacgcagttatgcgagcaaagatccaaagcacagaattgctcctttggaacaagtgaggatcccaggtgtgagacccgaggagatgactgacttagttactcttctcagccttatattcaggagtttttcaaaacaccctgccagagactagagaattcctgctaaacatacaagaatggggaaagcggaaaaatgatgagaatagaaattactaatgggttggcaaaaatatggstccagsctcaaattctaaggggggaagggataagttgcaaagncgataattag

SEQ ID NO: 2110 - DNA, 360 bp, Homo sapiens
  SITE (331): n equals a,t,g, or c
  SITE (352): n equals a,t,g, or c
  SITE (354): n equals a,t,g, or c
cactgctcccagctgggaaccttcattttaaccagcattcctctgcagcacactaaagttttggaagcaacagtctagactaaaatcctaattcctaaacctagcgttcgaggtcttgcaaagtttggctttccttactcctcaacaagtaccttcccctgcagccaggctgaagggttccttaatgtgccttctagcttgtgtctgctcaggcctgcccttcactggcatctttcctatctctccttaatccacgtgatgccaactcagcttcaagacctaattcaagtcccatctgctcccagcagactttctgataaccccagcttcntcccaggggtccttcctttcncngattca

SEQ ID NO: 2111 - DNA, 322 bp, Homo sapiens
  SITE (205): n equals a,t,g, or c
  SITE (282): n equals a,t,g, or c
tcagagcctacctgcatgacctcaagcgggccaagatgggtctcgggggcatgcctgacaggaaccacccggcctgtgccaaggctgaccttgaggaagtggtcagggtgtgcccaggcttcaaggcgtacctggacatcggccaggtaaggcagtctcttggcttagccaatagctgagcaagaatctgtttactccttgccangctagaccaagggctaggccaagatgcagaggaaaaatttcactccctgataacagtacccatctcctccagccgtngtgaggaccgaataaaacgtgtgtacagtatttagaataa

SEQ ID NO: 2112 - DNA, 253 bp, Homo sapiens
  SITE (43): n equals a,t,g, or c
cttgcataacacaggggttggggcgccgatccccgacgcatanaaatctacatatcacttctgactcttccaaaacttaatagccggctgttggctgaaactcactgataacataaatagtccattaacacatattttgtatgttatatgtattatatacctgcaataaagtgagctggaaaaaacaaaatgttattaagaaaatcataagagaaaatacatttcctaagtgagagtggatcatcattaaggg

SEQ ID NO: 2113 - DNA, 768 bp, Homo sapiens
  SITE (43): n equals a,t,g, or c
  SITE (134): n equals a,t,g, or c
  SITE (663): n equals a,t,g, or c
  SITE (667): n equals a,t,g, or c
  SITE (698): n equals a,t,g, or c
  SITE (768): n equals a,t,g, or c
gcttgtcctttggcctcccccgtgggccttaaggctcgctgangtcttttttggtttggaaactctgaaacactaggtttttcccacctgtacggagagacagaccgcaaatacagaaacacaaaaaggtgggncgtgggaaggaatttagaagagaaaagatatggttaattaaggaatgacggtaatgacagaggttggctcaggtggagcacagtgcataaggtgttcccaaggacattagggcattcggcatctcccgtctgaactccctgttccgtcactttggcagcacccactggccacgtggtctcccttgtcctgccagccttccaccgaccaccccaggcagtgggccataccactgttgggcaatatttgagcccctccctgtaggaagttaacacctcatcacgttgctcaactcacccacaggcataggattttgctttagtcaatgaaatgtgagcagtgacttgggtcaccttcaggcggaaaattcgagagtcagcctgtgctgcccagtgctctcttttcctctgccacagagacaggctgctctgccacccaagacccagatggagaggcaacgagggttagagtggcagccagcccacaatggatattaatgagaaataaacctttgttgatgtaagatgcagntgtnctggggcggtgggtcgctgcagcacccgctngcttcccctgttctgtctctaggctggctcacccatatgggagaagcatcctcgctgagatgcttttggn

SEQ ID NO: 2114 - DNA, 578 bp, Homo sapiens
ttttttttttttttaacagcgaaagtgagatttttaataaacagtcagtcttgcaaaatcgggtgtctgacggacaggcacacccagcagtttcaacaagcaatttgtccgctagtgtgcaggctcctcccccagtttcccacaggctgagtactatggggtcacaaccttcctggacgtcacctattgattgttaggcaggggctttaggtgtttttgtttgtttgtttgtttttagggttgtcttgctgcattttgtcacagcccacaatgcattgcaatcctagtcagctcaggggctcttcaagtatttcacttacgacctaagtagctgggctgggctgataagaacagacaaagggagctattttgcaggctagtagtaagctttcattttagactaaacttcttcggttctggtgaaggcaactaatggggggtaagcgccggkaaagggggaggcctacaagcaggcatcagctwtccaagcaggggcctcgaatatccsgtttcttctgtragtctgctgacctaagccattttaaggcacttgtgcttgggaaatggggaacactgtg

SEQ ID NO: 2115 - DNA, 362 bp, Homo sapiens
  SITE (274): n equals a,t,g, or c
  SITE (344): n equals a,t,g, or c
  SITE (353): n equals a,t,g, or c
ggcacgaggtaaagatggacggcgcgagggtctccgccctctgctccgggctgaagcgctctgagagaggcggcagcggcaactcgagccccaacagtaatttagtgttggtagttttggcagcagctgccgaggccggagcaatggcggaactggagcacctaggagggaagcgggcagagtcggcgcgaatgcggcgggcagagcagcttcggcgctggcggggctcgctgacagagcaggagcctgcggacgacgaggcgcggggcggcancgcttgaccaggcgcgggaccccagggtccgtttcgaggacggtgtgtctttcttggccgcttgttctancggggacancgacgaagt

SEQ ID NO: 2116 - DNA, 448 bp, Homo sapiens
  SITE (382): n equals a,t,g, or c
  SITE (414): n equals a,t,g, or c
cttgaatcctgtgggatgagaactgtcattacagagaggaagaatcaggacattatgggcacatagagtagtggcatctacgccagaatgggaaaaagcctggataatttgcaaaggaaatcctgtattaatttttgccacattaaaaaaaaatctttttttagtcctgtggtgttattttgcactgttttatgaccttttcctggatgataggtattctgattacagaaaaaaaaaagattcctcttctctcttttttttaaattttaaattattctttcatgtatgtgtcatatgtagtctgggagcttgaatttggtaaggcaatcccaggcttgccatcttggcttagacagaacaatagcataatcctcactaaggntttctaacttggtgtccccttacatagttagncccctactcaactggagctgcctgaggtgggttg

SEQ ID NO: 2117 - DNA, 818 bp, Homo sapiens
  SITE (6): n equals a,t,g, or c
  SITE (102): n equals a,t,g, or c
  SITE (773): n equals a,t,g, or c
  SITE (799): n equals a,t,g, or c
gattcntgacagatggcaggaagcttcggggagagatttctgaaagacactcctggggttcccaaacaccgggcaactctttttcccagaggattagtgggntggagggttagaaggagaggccaaagtcaggtttggccttcggatccccctttcattctccttttgccaccgtaaaccaacttttgcttacagttagacaccagttttcggcagatgaaatccctctgatttcaggcattttgtcaattaagctgctcagcaacaataggataaacttatgaaaagaaaggagtagcagtcccacagacaaagcatccagcccctgcactgagacagtatagggaagggacttggtcctggcagacaggacagataatcaacatcctagtgggcctyacacatgtgggcatattcttttccataccttcttgtctgttttaacaagctaaccccagtcacagtagcagagagagggtccatcctaacttagctgaccaggctggattcctaatcataaaaccaaaaaaggaagaacctaaccatttctctctttcagctatgtgttccaagattactgaagcaggattctggccttcctgataagaacatgaccagatccagctggtttgcaacaagatgaacttcagtgctgagctttcaccaagtttttctcactacaatctcattgtaatactaaaatctccacccaagatggaggttatctgccattttctgtacatgtgttaccagaaaggggtcctgatccaggnccccaaaagagggttcttgggatctngacggcaacagagagttcg

SEQ ID NO: 2118 - DNA, 518 bp, Homo sapiens
  SITE (462): n equals a,t,g, or c
acttttgaaaatcaagcaaattactatggggtttcttgggtcttcattattccatttatatatattttttatttcgaataataaatcaacctttatttttggcaataagattatcactgacgaaaatatgtacagttcaagaagtagaaataatattttccattagttaatttaggaaatattggaatagcatattataattatttatgaggttcccaatgttgtttttcacagaaaataaggtaaacattcaacttaaatcccccatgaagttttttcatgctcatactcataatcattatcacataatgtgcttattcaacaaactttgtatctgggatatatttttaacaataagtttgttagcattatttatttatctttaggaggaaaatatttgcatctgtttatttaccctttggaggccattaatacttgggccactccaccttggaattgccnttggggtgtatccaccatggggcttaaaattaaatttgggggtgtcgccgggtttt

SEQ ID NO: 2119 - DNA, 489 bp, Homo sapiens
  SITE (461): n equals a,t,g, or c
caaacaaacataagtcaaaccatcataagttaagttagggaccatctgtatacttttttatcttatttaaatagcatccttattatagaagtttgaaaattacaaataaaagacaaaaatgatctctgatttccctagcaatgattctgtttccattgattcmaattactaaaaatttaaacaatattcattggtgtgtcaaaatacacttgtgcattttctgcagttataaagatatctttgggcttaaaatatttttgtgtttcgtattactttcttggtgtagattcccaactaagttaagagttataaacataacgaaagactccatgttagagtgtgtgtatgtgtgtatgtttaaataatacatttgactagggcgcagttgctccatacctgtaatccmgacttgggagcggggcaggggggtcacttgagggccggggggtttcaaccagccngggggtaatgtgggcccagggggttcca

SEQ ID NO: 2120 - DNA, 473 bp, Homo sapiens
  SITE (66): n equals a,t,g, or c
cagcattttccattgcccytarggraacttgctakgkggttaaccccagttatgattagtcaaacngggaaaacactggatcaaacytaaaawtgtaaaawcctgtctaacttttaaawatactttccacagttgtacttaagttcaattaactacagtatagagaaaaataattattctcttctttgcacccggagttgcaaacaaattaagtttacaaatctcatttaaacatatatctttgtaatgtaatctccgcggttctttctttgttctaccctcctgcacctgttgtcgatgtaatcattttgggaacagaaacgttgtgtctcaaaaagattcgttgtcagttcagccaagatgttctttacctgagattctggaaagatgtttatctatatcggaacacttctacattattaaatgtccttaagctttttcttttaaaaaaaaaaaaaaaaaaattctcggtc

SEQ ID NO: 2121 - DNA, 440 bp, Homo sapiens
  SITE (418): n equals a,t,g, or c
  SITE (423): n equals a,t,g, or c
caaatcttggttgaaatggagaagaacagttgttcttcatggttgaggagttgggatatggttgccatttggtatcctctctttgcctatcactgttcccattatttcagttctgtgtcacctgtcattatgatttaattatttaagtaattttttaaagaaatttccattttaatgtggaaacccaggtttcaattttgtttttcttaaaaggtatttcacaaaagaaattagtcttgttgtagtgtaacatcaaaggaacattctgtaaaagactaaagttaggattaggaaaataggcttcactatttacccttgtatattaactgtgtttacagatattttttgggcttgtttttcagtggataactcagtaaatgtttaggctcaggtgtccttaattggatacctgagggtngtatnaaatattttggatgggt

SEQ ID NO: 2122 - DNA, 442 bp, Homo sapiens
ccggttacactgcgcaggcacaacagagccgctcccctctcctcgccccgccaccgggacgagagcgcccgccgctgcatttccggcgacacctcgcagtcattcctgcggcttgcggcccttgtmgacagccggggccttcgtgagaccggtgcaggcctggggtagtctcctgtctggacagagaagagaaaaatgcaggacactggctcagtagtgcctttgcattggtttggctttggctacgcagcactggttgcttctggtgggatcattggctatgtaaaagcaggcagcgtgccgtccctggctgcagggctgctctttggcagtctagccggcctgggtgcttaccagctgtctcaggatccaaggaactttgggttttccyagtttgctgatggtcgccaaagttggarttagtatgttcaacagacccatt

SEQ ID NO: 2123 - DNA, 440 bp, Homo sapiens
  SITE (401): n equals a,t,g, or c
  SITE (405): n equals a,t,g, or c
gagcgatgtggcctgggaacgcctggcgcgccgcactcttctgggtgccccgcggccgccgcgcacagtcagcgctggcccagctgcgtggcattctggagggggagctggaaggcatccgcggagctggcacttggaagagtgagcgggtcatcacgtcccgtcagggccgcacatccgcgtggacggcgtctccggagggcctggcactgtcatctttccaggcctgccctcgccccacctgagctgctgtatccatctcctctccttcacctcaggaatccttaacttctgtgccaacaactacctgggcctgagcagccamcctgargtgatccaggcargtctgcargctctggaagatttggagctggcctcaagctctgtccgctttatctgtngganccagagcatccacaagaattagaagcaaaaatagc

SEQ ID NO: 2124 - DNA, 179 bp, Homo sapiens
  SITE (166): n equals a,t,g, or c
cctgaggcacgtcccttttcgtggtttacatgacaggccagtaacaggaagggcctggggagartttctgggctgagccacatgtgattttcctgatgggcagcactgggccacagctgggggctctggttggctgttgacttcccccagggcctggctgcatctngggtccctgtgga

SEQ ID NO: 2125 - DNA, 248 bp, Homo sapiens
  SITE (179): n equals a,t,g, or c
gctccctgcctactcccccaccggggatttcagactagacgcttgaagcaaagctgccatcccagaagacgacatgctctcagcaacccccctgtatgggaacgttcacagctggatgaacagcgagarggtccgcatgtgtggggcgagcgaagacaggaaaatccttgtaaatgatngtgacgcttcaaaagccagactggaactgagggaagagaatcccttgaaccacaacgtggtggatgcga

SEQ ID NO: 2126 - DNA, 186 bp, Homo sapiens
  SITE (1): n equals a,t,g, or c
nttgaacytsctccttttgcagstttctccatctcaattgatataactccatctttcagttgctcaagccaaaaacccagagtcctctctttctcctacataccacatctaatctgtcagcaaagcatggctgattgtaccttcaaaatatatccagaatccaatcactttttactgtttcttcca

SEQ ID NO: 2127 - DNA, 419 bp, Homo sapiens
  SITE (150): n equals a,t,g, or c
  SITE (231): n equals a,t,g, or c
  SITE (234): n equals a,t,g, or c
  SITE (323): n equals a,t,g, or c
ggaaggtgaaggattcaggaggtacacctgatatatttctccactgttagcgtgtctttacaatgaaccccaaatcctttcacaatcataaagaaaatattttaaataagtagtttcctaatattgaaattaataaaaatatttaaaagnactatttttgtgggtctgtaagtgccagtagttttcctgtgattgtgaggatataacttctgctgatttccaggtatggtntcnccctttgccacatgagcctgatttgtgcctaatcccttggataagcacagggcaatagataccagctaccattttaaatccatatccanccttaccggatttaaaataaatttataatggcagctatttccccagtggattccaaatgaaggcatcaggccaaaatagatcccaaattcccggca

SEQ ID NO: 2128 - DNA, 727 bp, Homo sapiens
  SITE (727): n equals a,t,g, or c
agtaaacaaatgcccctaatgtcccaacagaatgacttactattattaaaagccaaactaaacttctcctcctataatgaagaaagtaaaaaacttccagaacagttaataaacaaagatatgtaagtgaaaataagaccaaaaagggtaaaaagaaaaagaggaggtaagtgtaaaaaataacytacatgtgaagaaggttcattttcataagtgccttagaatatgtttaagcaggccacatggaaacaaagagataaagaagcaaaatatactaagccacaatcccctccttcctgctttccctttgacccagtgtccaggagcctactggtcagggccccctcaatgacccccctccccacctcaycaaagaatttagtttgggctagcttgccatcacctaagtgcagtcacttarggccrtaagtcaaatgctcagagtcttgagacagtygccatgtattatgggtggctgcaacaaaatgcagcaaaaaatgcagcaaaaagaccctaaagaacatacctgaagtcttaatacaactaccaataggtgatgcccaggaagactataaccccgtagtactcagctaatgaggaattggggaagggacttgcacactagggaagaaatagtttgttgaaactgtcccaggtgtacctgcactccagacacctgatcttgcaagactgtcgattaaaagtctctctttcgctgttcaaaaan

SEQ ID NO: 2129 - DNA, 387 bp, Homo sapiens
  SITE (326): n equals a,t,g, or c
  SITE (364): n equals a,t,g, or c
  SITE (382): n equals a,t,g, or c
cctctgctttcatcctgttggtcagaacccagtcacatgaccacacccagtggcaacggaggctgggaaatatagtctttattttgggcacccatgtgtccagcaaaactgggggttccatcagtcggcaagaacgggagagtggccgatgcagtggctgatgcttgtatcccagcactttgggaggtcgaggtgggcagatcacctgaggtcaggagttcaagaccagcctggccaatatggtgaaaccctgtctctactaaaaataaaaaaattagctgggtgtgctggcgcacctgtagtcccagctactttgggaagctgangcaagagaatcgcttgatctttgaaaagtggaaggttncaattaacccaaaaattntgcca

SEQ ID NO: 2130 - DNA, 521 bp, Homo sapiens
  SITE (14): n equals a,t,g, or c
  SITE (131): n equals a,t,g, or c
  SITE (433): n equals a,t,g, or c
  SITE (440): n equals a,t,g, or c
  SITE (511): n equals a,t,g, or c
tacaggacgcgggntatgccaccgatcctcactatgcccgcaaactcaccaacatgattcagcagatgaaatcgataagcgacaaggtgagcaaaacctacagtatgaacattgataatctgttctgaatnactcaagtccggcgggtcgctgccgataatactctgtaattgaaggcttataaggaacctccatgtccagcttgattaataacgccatgagcggactgaacgcggcccaggcggcgttaaatacggcaagtaataatatctccagctataacgttgccggatatacccgccaaaccactattatggcgcagccaatagcacgttgggcgctggcggctgggttggcaatggtgtctacgtttctggtgtgcagcgtgagtatgatgcgtttattaccaaccagttacgtgcggcgcaggaanagttagncggtctgactgcccgctatgagcagatgttcgaaaatcgacaattatgctcttccaccattaccttttcgntggcaacacg

SEQ ID NO: 2131 - DNA, 513 bp, Homo sapiens
  SITE (199): n equals a,t,g, or c
  SITE (374): n equals a,t,g, or c
  SITE (435): n equals a,t,g, or c
  SITE (480): n equals a,t,g, or c
ctcagtctgtagcctgctagggatgcacggccacgctcctgtctttgaggtgctgtcagaacagctttctcctcggtatcccgccgggtttgactggctagtgggcttgctttggtttggactcacccagatctagtgcagggacacacacgggggccggcattgctcctttccgccatgtggagttggccggggcagnaggacatgctctggtttggacagcccggccctggggctggaataggaaatgcctgcgtccctttaccctgcccaggggccaacacccccagcctagctamggcttcccccaggtgaacgaggtggtcttcagccccggggagtcccamtgcgccacatgcagtgaaggatgggantgtgcgggtgtgggccttggccagcatggagcttgtgatccagttccaggtgctgaaacanagctgctctgcctggcatggagcccccgtgctgttgccgcctgancaacaacggctaacggcttggtaaggttgaagg

SEQ ID NO: 2132 - DNA, 1284 bp, Homo sapiens
  SITE (65): n equals a,t,g, or c
  SITE (383): n equals a,t,g, or c
  SITE (1263): n equals a,t,g, or c
  SITE (1266): n equals a,t,g, or c
ggcacgagcaggtgatccacctgcctcagcctcccaaagtgctgggattacaggcgtgagcacangcacccggcctatttcttaattcttgtttagacaaggggtggattattcataagttttccagaaaaagggcagggatttcctggaactgagggtttctcctcttttagatcgtatagggtaacttctggacattgccatggcatttataaactgtcatgacgctggtgggagtgtcttttggcatactaatgtattatcgtataatgagcagtgaggacaaccagaggtcacttttgctaccatcttggttttggtgggtttgggctggcttctttaccgcattgtttcatcagcaggttctttatgacttgtatctngtgataccatcctgacctccyactcatcctgtgactaagamtgcctaacctaggaatgcakcccaataggcctcatcctcatttttatctaggcactattcaagatggagttgctctggttccagtgcttctaacagtttggcattttactgtctttcaataagcagacattgtaaatcttaatagagtccaatttattattttcccttacatagttggcccatttttggggtcttgtttaagaaacttttgcatactacaaagttgtgaagatattttcttatgtttccttcaaaaagctctattgttttttcattcatatttagatctactgtctggtggatttatttcttatgtgtggtgggagatagggaccagaattctttttttcatatggacatttcatataatccaacaccatatatttgtttttaagaaacccacraaaccttagacaaatttaatttaacagatttatttatttatttttttgatagartcytgstctgttgtccaggctacagtgcagtggtgcagtctcagctcactgcagcctwgacctccccagactcaggtgatcctcccacctcagcctccagagtaactggaactgcatgtgctctcctctaccactagctaatttttgtatttttagtagagatggggtttcactatgtcacccaagctgctctcaaactcctgggttcaagcgatccacacacctcagcctcccaaagtgctgagattacaggcgtgagccaccacacctggctaatttaacatactttaattgagcaaagaatgagaacctgrcagcctcttaacaagaataactccasaaaggttccagtgtggccttgaggtggaagatttatggacnganaaaggaaagtgacatata

SEQ ID NO: 2133 - DNA, 321 bp, Homo sapiens
  SITE (309): n equals a,t,g, or c
  SITE (320): n equals a,t,g, or c
ggccacgaggctaaacctaggtccaggacttgggcaaagctactttctaagattaatggtcacatcctgtaagtagcaaattaaaaaggtcaagtataacaaagcttaaaactaagtctcaactggatcaaagtcattcactgaagtgctttataactaaaaaataaaaacagcactttcgtgggaacatcatatagagaatgtacagtatgctatctatattctgaaaaccgactgaaaattataaaacatgtcaaaaataacaacagcaaatgaccaacacagagggaaaaggggggaaatttaganataaattaaana

SEQ ID NO: 2134 - DNA, 415 bp, Homo sapiens
  SITE (331): n equals a,t,g, or c
  SITE (332): n equals a,t,g, or c
  SITE (333): n equals a,t,g, or c
ggccacgagccagttataaccagtgtttcatgatcttcatgaaaaatctagctcaatattcttctttttcatttttcactgaactttgtctttggaaacgctaaatttacagcctatggattaaagggaccaaaaagcattaaaacactcaaaaattatttattaataatgaggttatttagaagaaaataaaaattacatctgttgaggggtttcacacatgctttaatttttactacagctttaacatgtaattattattctctttttcaaacaaagaatctgaaactcaagttaacttgcctgactgaggccacatgagtatgtggannngccacaaaaagttcagtactagggtctcctatttcaaaatctggattagataaaatgattcaagccagattttaactataag

SEQ ID NO: 2135 - DNA, 210 bp, Homo sapiens
aacctgagtgggcggggctcggggtgactcgggtaaccggttctgtggcttccgtagtggcaggtttgacagcgctggtgcccggagcgkgcgctgaagaaacttctttcctcatcccctttcccctctgttctaatcagcggtcttgcgccatagggtacgtgctgtggctccaacacttattccccagagtgctgctggggagtgact

SEQ ID NO: 2136 - DNA, 418 bp, Homo sapiens
  SITE (295): n equals a,t,g, or c
  SITE (316): n equals a,t,g, or c
  SITE (352): n equals a,t,g, or c
ttttttttttttttttttaaacatctgagtatattttattcgtargaaaaaaaggaagaaataaccacaaatattgcttaagaaaataaattcagctgacttggctacaagagacggagcttgttactcagggtcttcctccggtgggaccacttccattagcatctgaaggtgcatggtaatcggctttgagattttctgagcccatccaaacttgtagtggacaaacaggragtaaaataaaaggccgcttaatataaacagcacacagtagaggtactcccargtgggcttnctgatgatttggagccagaanccaaaacacaggagatgagtgtcatcaagacggggnatgactacggggaccttgaaaaggcctttccagctctttcctgggaaaaccccacacgatggggcc

SEQ ID NO: 2137 - DNA, 223 bp, Homo sapiens
gtaattwattttactggccacctaatgcyggacatttatttkgtttcaatcttttgttacaactatgctgcagtggatactcttttacatgtttttgtgcacatgtgtgagcatatggattaatttctagtaggtgtaatttttgggccagaggatacttttaatctgcatagatactgctaatttggggtaggcatagtggctcaggcctataattccagtg

SEQ ID NO: 2138 - DNA, 684 bp, Homo sapiens
  SITE (444): n equals a,t,g, or c
  SITE (620): n equals a,t,g, or c
  SITE (628): n equals a,t,g, or c
  SITE (672): n equals a,t,g, or c
  SITE (679): n equals a,t,g, or c
tatcagttttatcatgagagttcaatgaaatacagtctgacaattttaaaaatgctcggaaaatgttaactgtcatcattcttttgtcctcagagcatgtcagtttacacatgtggaaattatgcctacaacacgatttcctatggtaaggaggaggtaaactaagtaaaccagagggagagagttcccttgtagatttaccaaattgaaacaagagcaaaggagttcaaatatcaatcaccaaaataatggcactaccagagagacctccagatcagtgtgtgacagtgaggcctgagctgcctccttccagtcagcctgttagtgaccccagagatgggctccgagttcctgaccaggtgccagtgccagaccaggagactctagccctcctcaaaagtcatttgaggtgaggtaaagggagttttgaaaaaaaaaaaaaangaaaaaaaaaaaaaaaaaactcgagggggggcccggtacccaattcgccctatagtgagtcgtattacaattcactggccgtcgttttacaacgtcgtgactgggaaaaccctggcgttacccaacttaatcgccttgcagcacatccccctttcgccagctgcgtaatagcgaanaggcccgnccgatcgcccttcccaacagttgcgcagcctgaatggcgaatgnaaattgnaagcg

SEQ ID NO: 2139 - DNA, 585 bp, Homo sapiens
  SITE (453): n equals a,t,g, or c
  SITE (517): n equals a,t,g, or c
ataaatttcataagagttattctcagtgtgaattttaaggctaatgccagatcctgcaaaaatctatgctaaccaggctgtagtacagagtgttataaagaattttacttgtgtctaaaactacagtaattttgcttaggtaattgtgcttacctatggagcacaggaaggctcttaggttttgttcctacaagtttctttgaattttggagtaaatggaagtgtctgtctgtctgtcatctatctgccctatcataaaaatctttctccctaacattaaaatactgatccccgcccccaacttatctacctctattgtctaacacctatagtaggtgtgatcatgggataaaattcaactgaaaatgctatgataacattttatcgkttgctttaaaaatgtgctttgttttcaaataatctttacatagtgaactttggtggcgttagtgnatatgtttatgcctatttcttttttttacacaaattccttggcatattttttcataaagaacanaaaataaaatcaaaatttatttttaattcatgcttattgggatttaattattcagagcttaaaatatt

SEQ ID NO: 2140 - DNA, 523 bp, Homo sapiens
  SITE (83): n equals a,t,g, or c
  SITE (448): n equals a,t,g, or c
  SITE (519): n equals a,t,g, or c
ctcctgtttgccttggtagcttcccagcttcctctcacatgactgtttctgtttacttctccctctggccttcctgcctgcgngtccctgtgccacctagagtctcatctaccgcactagacatagcctctgcaatggccccgcaccagggcctccttccagggcatatcccgtctctgtctcacccttctagtctgcgcttgcccttctcactccccagctctctctgttactgtcagtggagggtctgtgcactttgtcgttttgatcctatgacgttgtatctgtggctcttccttcaagtgcccaggagaggcccagctcctgggccagaaaggggttagtcttgaagtcttgggttggacatttcaccatggccagcccagagctcggctgggaaacagatgagagacaacatgtgaggaggcagacaggagctggggatccnggctctgagcacctgagaaggtttgggggaaggtattggtaatggattggattgtttcccccaacaaaagntttt

SEQ ID NO: 2141 - DNA, 491 bp, Homo sapiens
gaattcggcacgaggaattattatatttattacatttagtctgtttttcgttataatgtgtttactgtgctcttctttaaaaacagaatcttaaattkggtatttaggaaggtttatgtttctgtggtccttttgcttatactttttttaatgcccttagcgmcccccccattttttatttagaatctgtattgtccatctttaatgacattctttaactttcacatgttgcttaaataccagttattgagttttcctactttccttttttcatctaccttctcttcctatttttagttgcatcattttttattcatcagaacatacagcacaaaacaaatagcattatcatataacctattattattataccctgttctcaccttaattttgatcttagatttgcaattaagtatatttaatgctaaattgctgaagtttctctagtcatttttttgtttgaataaagtttattttctagcagatttctt

SEQ ID NO: 2142 - DNA, 322 bp, Homo sapiens
  SITE (52): n equals a,t,g, or c
aattcggcagaggtgaacagtgagggagatgaccgctcacctctgctgcttnccatcaggacaaacccccagagttccccagtatggtcaggctgaagctaaaagccgctgtccaccggattttgcctgagaaaggactcatctttggcttgtytctttccctttcctgcctcctttactcccttcccagtttccctgaggaccacattcttaataaatcacttgcagagaaatcctcacttcatcaagatctgcttctggggaccccgacctaaaacagtaagtcacctaggacccccatcattgtttttgagtcttctgg

SEQ ID NO: 2143 - DNA, 446 bp, Homo sapiens
  SITE (298): n equals a,t,g, or c
  SITE (425): n equals a,t,g, or c
ttaacttagaaaaaaaaacttgtaggaatatgaagcattccccactgcctggtttctattttccttcctctgaggactgcgttttaacctgaacgtttttccttgcctgtctgtttatagaaaacaaagcccgattcccctgttgcgcctgttggagactgtggagttccttagtctctgccttatcagttgggttttcagcccaggtaaagagtaggggtagtccagtcggcttcacatttcccacgtgtaataacagttactaggctagggaagtagtagccaccgagcttgggancgaagtgctgtgtggaggcaggaataccctgtgactgacttctctgcagagtagtgaggatcacatcccctggggacaggcctttggggaggctccacaaatgtcttctcaggaggaagtcttttgncctacatgaagtatatactag

SEQ ID NO: 2144 - DNA, 689 bp, Homo sapiens
  SITE (619): n equals a,t,g, or c
  SITE (638): n equals a,t,g, or c
  SITE (659): n equals a,t,g, or c
  SITE (679): n equals a,t,g, or c
agcctcaaacacttgtcatttctttgtcgtggggacatctaaaatcctttcctctagctatagtcaagagccacataataatgacatttagtcaaggatggaccacatatgacagtcatcctataatattataatggagctgaaaaaaattcctgtcacctggtgaggtcttaaagatcctgaccctgtgtaggcctaagctaatgtatgtgtttgtgttttagttattaaaagaaaaaaaaatgtttaggccgtgtgctgtggctcatgcctgtaatcctagcactttgggaggtcaaggcaggtggatcacttgaggtcaggagttcaagaccagcctggccaacatggtgaaactccatttctactaaaaatacaaaaattagccgggggtgggggcgcatgcctataatcccagctacctgggaggctgaggcaggagaatcgctggaaccagggaggcagaggctgcagtgaggcgagatcatgccactgcactccagcctgggcaacagagtgagactcagtctcaaaaaaaaaaaaaaaaaaaaaactcgagggggggcccggtacccaattcgccctatagtgagtcgtattacaattcactggccgtcgntttaaaaacgtcgtgactnggaaaaacctggcgttacccnacttaatcgccttgcagcanattccccctt

SEQ ID NO: 2145 - DNA, 501 bp, Homo sapiens
  SITE (296): n equals a,t,g, or c
  SITE (322): n equals a,t,g, or c
  SITE (344): n equals a,t,g, or c
  SITE (375): n equals a,t,g, or c
ggcacgaggcagacgccagccaccacaactggctaatttttgtatttttagtagagacggggtttcaccacgttggccaggctggtcttgaactcctgacctcgtgattyatccacctcagcctcccgaagtgctaggattacaggtgtgaaccactacgcctggccccttattgttattatctttcatctatacctttaagtaaagtggaacaggttaaagttcgtggcataatracacttcattgaatgcacaatagtatttaacatgttaaaaatattggattaaaaatattnaaccacacatgaaccttaacattttnaaaaatacactgggttttattnttacaaaagtacaattagtacaataatatantatttgttttccattaatttttaaataaatttaaaatgttctcacaaggcaaatttttacttggacacctacccatggcttatttcattttaatttaccctaaggggctcttcacttattttttcc

SEQ ID NO: 2146 - DNA, 551 bp, Homo sapiens
  SITE (32): n equals a,t,g, or c
  SITE (39): n equals a,t,g, or c
  SITE (79): n equals a,t,g, or c
  SITE (91): n equals a,t,g, or c
  SITE (517): n equals a,t,g, or c
  SITE (521): n equals a,t,g, or c
  SITE (533): n equals a,t,g, or c
ctgccttcaaccttcccaaaaatccagataantgaaaanacccctgtcaaccttaacctttgaaactataaacggggtncactgtctgcantgatgggctccagcacccagcgtctggagctgccctcccttttcagaagagacctggatccggcttggatgatggagggaaaagggctggctcagggggaaggctgatagccaactcagatgcacggacagaaaatctgaggggacccaggaggctgcggtaacggcgctggagttctaggaagtcacagatggggctacaggaagacagcaagggaatccagactgagcaaagactaaaacattcgaaatraaaccatcaaagatttgaaaaaatgggcgawttttttttcagtctgagaacttttgaagtaaggcacctctcaaggaagctagatcagatctgaccactttaatttacaaactctagatgggcaaaagtccaaactggggaaagggaaaaaggaaaacactttttaacacatgncagngaattgggtccntgcccttaatattaaggg

SEQ ID NO: 2147 - DNA, 551 bp, Homo sapiens
ggctgcaggaattcggcacgagatttccataaaaaaataggtggcctggctatggtattatagcatacaattaggacactatgcccctgcaaaattttgtaaatcaaattcagaggcaaaaacatattttagaatcatacagtttgcacacgacaagtaggtaataactgtctctaaaaatgttttctccttagtccgcaatgrgctaagattcagaatagtgtcaacagcatgctcctatatgaagttgttttttttaaagcacatttgtttatgacaagcctacattctcagtgaatatggcatttagtatttcttttgaaaacaaacttaagcatcatgagcccaaagttgcactttgactcccaactacggtagcattatggacatctcacaatgtcaagggtttctgttawgtattagtaaagtatagattattggggcctacataatttaaaagaaatgtaaattaatattaaaagcttgtaaaaatatgtatatctttactatttctcaataaatacctttgcaattgttttccatttccttca

SEQ ID NO: 2148 - DNA, 357 bp, Homo sapiens
aagaagagtaggcttgtgaaacattcacatgcattgttttaacaaacaatgcttccccagacctccccacagagttgacgctctggaaagaaaagccaggcttttctctgaggttttgcatctccttggccaatgtgctcatgccagagaagagcagtgcatggccagtttgaggagcacggccatgtgaccttggacagcccctgcctctctctaggrctcactcccggtccctaacctcagctctctgatctgtaccacaaggagctgccactaacacctgtgtcagaactactgtaaggaccctttcctcctgctagaggagaacagtgctaaacctgtctgaacgtgatagac

SEQ ID NO: 2149 - DNA, 335 bp, Homo sapiens
  SITE (10): n equals a,t,g, or c
  SITE (271): n equals a,t,g, or c
gcgttttccnctggagccagcaatgtgtcagtaacttgtctatgaaagaacctgaggtgtagccacatgtccagctgccttctgcgcacgcctggcctccctccaggctaccccttctatgggtgcgcatggtgctgctgttggttctggcggggcctccactctgatggttccaccctgggaaagctggccttccatcctgccaaaccagatgacstcagtcccaccacctccaggaagcctctgtagatcttcattctgggttcttgtncattaaaaatacccaccatggcctgggcacagtggctcatgcctgtaatcacagcactttgggg

SEQ ID NO: 2150 - DNA, 390 bp, Homo sapiens
  SITE (389): n equals a,t,g, or c
agaccctgatccccyggatggycgtagtgagacagtgtatcactagtgcctaaatcatgccagaaagggacatcaacagctataacaggctgaggggttgggaatggagctggccttaatttgaagagaacaaaaggtgaaagtggactttggttctctccactgcaaacccattacctctgtggaagaggactgagaaccagaggtaggaaagtggatgtggagggtggcagtatagaaaggtccacatgtacatatgtgtgaaaatatttagaattcaaatacaggtgaaatattcgtaaatatgtacatatttatatatcatggtacctaccatatataagggggagtgttttgttaatgcttatacaataaatatttagaaaaanc

SEQ ID NO: 2151 - DNA, 426 bp, Homo sapiens
actgagtttattcagaaggttacgttctcagcctttattccagggcccaattttcaagacaagccttcgcgggacaggaggagtcctctgaagatagcagtgcatgagcagagaaacacacatggcttggtctcgccgcccagcagctgattccgaggaggggctgagaggggccaatttcacccttccctagcaagactcggaggaggttcttcctacacaagaagcccatctgaccaccagggcttcctggcagagagtkgtkctagatgtcagccaggractccccagaccaggkattcttccaggctcaggcataaagaaccaggaggcttttattttctattaatcaacctagttggaagcagagccattgtaaaggcagagaggtattgattacaggmttaaagaaggaaaacgctgctt

SEQ ID NO: 2152 - DNA, 685 bp, Homo sapiens
  SITE (204): n equals a,t,g, or c
gctcgtgccgaattcggcacgaggaaatctggggcacagaagaagaaaaagaactggggtgcagatgtggtggccgagtccaggcacaggctggtggtgctggagaaggagctgctccgagaccacttggctctacggagggatgaagcccgtcgagccaaggcttccgaagaccagctgaggcagaggctgcaaggggtggangctgagctggaaggggcccgaagtgaagggaaggccatatatgcagagatgagtcgccagtgccatgccctgcaggaggatatgcaaacccgcacaagcagctggaggaagaagtcaaaggccttcgggggcagctagaggcatgccaaagggaggctgcagctgcccgggaagaggctgaacaagctctcggagagcgggaccaggccctggctcagcttcgggcccacatggcagacatggaggcgaagtatgaggaaatcttacacgacagtctggacaggctcttggccaagctgagagccatcaagcagcagtgggatggggcagcactgagacttcacgccaggcacaaggagcagcaacgccagtttggactcaccccccctggatctttgaggccrccarcccctagtctctagtgttctctgaggccccagcaataaagtgtcttgatgtagaactcagtagagctgtgggc

SEQ ID NO: 2153 - DNA, 427 bp, Homo sapiens
  SITE (183): n equals a,t,g, or c
gctttgacttaaaaggataagaaagagtagtgattttcttaaatcggaggagacaaacatggaatttttataaaatgtaatatttgctggtatttaagtatactttggkggtatcttggctggcgttcagagactgttgaaatcatcttgattgtgaaaagtcgctaaatggagctgttaaanttgcktcgcaaattacatttagctgcaaagtattggttcagtctaggcctcctgaatgataacacctattatatagatgttctctgtccacatcccacctgaggaaaaaaaaatcacatcaggtttgaagttcagttgaggcaaattttatattagtaatatcgttcattattgagagagatctcggctgctgacctgcgtatgaagcacttgccccatggaagttgtgcaagccaagtgccag

SEQ ID NO: 2154 - DNA, 535 bp, Homo sapiens
  SITE (500): n equals a,t,g, or c
  SITE (501): n equals a,t,g, or c
  SITE (503): n equals a,t,g, or c
aatgacattaggtaacaggtttagagacagtaggaaaggtgtaataatagaagattggagacagatggagaacatttctgggatctagatttcagtactgttacagtaatggttgatgacagattccaaattatagataacatcaaaatagaaaataggtaatagttatgagaataaggatgttaaggaagtgtgaagctaaactgataagtgacagtgacacagtaattaacatttatgaagccaggttttttggcaagcctgttatatatgttatcttattaggtcatcataataaatcacaagtagatacgattacctgttttgcagatagagaaactgagttggggtagaggtgaggtgacgacacagagatagtggttattgggaactacagttgaagaaggctagaaatactgattaactttagtctgtattttaaaaacataaatctaaatataagtgttataaataaagagaataaacactaatataaaacnnanaaaaaactcgagggggggcccggtacccaatt

SEQ ID NO: 2155 - DNA, 160 bp, Homo sapiens
  SITE (5): n equals a,t,g, or c
ggcanagagcggttgagcaggcagggcgcagtggctcacgcctgtaatcccagcactttgggagaccaaggcgggccgatcacggggtcaggagatggagaccatcctggctaacaggtgaaccgcgtctttactaaacatacaaaaaaaaaaaaaaaaa

SEQ ID NO: 2156 - DNA, 150 bp, Homo sapiens
  SITE (146): n equals a,t,g, or c
atcttcagtccctcagactacaccatcagccccatgggggtgagcaaataacaagtaactatactgttccctgctatgtgtctggctcttggtaaaatttaaaaaagttaaaaaaaaaaaaaaaaacctsggggggggcccsggwnccca

SEQ ID NO: 2157 - DNA, 247 bp, Homo sapiens
  SITE (175): n equals a,t,g, or c
  SITE (198): n equals a,t,g, or c
cagctgcacggagcctggatgggaaagtgcatcctctgggctgacacggtgaactccgtctgtaccaaaaatacaaaagaattggccggatgtggtggcgggcgcctgtggtcccagctactcgggaggctgaggcaggagaatggcgtgcacccgtgaaggcggacttgcagtnagccgagatggtgctgctgcatnccagcctgggctacagagcaagactctgtctcaaaaaaaaaaaaaaaaa

SEQ ID NO: 2158 - DNA, 399 bp, Homo sapiens
  SITE (175): n equals a,t,g, or c
  SITE (356): n equals a,t,g, or c
ggcagagcagagagttcccaccgcattagaaaacactgcatcaccttgagcaagattggcttttgtcttcacatctctaacatgaggagtttggtctacaaagtgctgtgaacatttctgttgcctgcagaaacctttcttcagaggcaatctctatgtgaaaggtcccaatggntgtaaggccctatgtttgagaaggggaagggcagagaagggaggagatgaggtgtctggggttgggtgtgcttggcctcctcttcatcctctgtctcattctttaagattctttcaaggcagtcttcagaatcttcataaggacaaggttttgaggctgggcggttgtggactccatgccngttattcccagcactttggggaggcaaaagttgaggcagattg

SEQ ID NO: 2159 - DNA, 386 bp, Homo sapiens
  SITE (8): n equals a,t,g, or c
  SITE (264): n equals a,t,g, or c
  SITE (283): n equals a,t,g, or c
  SITE (345): n equals a,t,g, or c
ggcagagnaagagggaagatttatgtacatctattttttaaaatactaccagagggatatataagaaattggtaacaggctgggcatggtggctcacgcctgtaatcccaacactgggaggccaaagtggacaaattgctagagcccaggagttcaagactagtgtgggcaacaggcaaagcactgtctctagaaaaaatacaaaaaattagccaggtgtggtggtgcacacttctwgtcccagctactcagagggctgaggtnggaggatcacctgttcccnggaggttgagactgcagtaagccatgattgtgccactgcattccagcctgggcaacagagtnaggactatttctgggaaaaaaaaaaaaaaagggccccggtt

SEQ ID NO: 2160 - DNA, 372 bp, Homo sapiens
  SITE (336): n equals a,t,g, or c
ggcagaggtagctgtggtccctgcaaagccaagagcactctgaggaaacatcagtacctggggaggcagtgtgtggtacccagcggagtgtgtaatgggtgatgggcatgggcggaacactcacacagaagtggcagcgtgccacaggggtgctgcaggggtggccatgcctggggaaacgcgactkcctggtttgtcagtgggccctgtaggacagcagttaggcacctcccaggcagctctgcaagtgggcactccaaaggggagcttgagaatagaggagggaaaaatgggaattccttgagtcataatttggtagagctttagaaggggttnaagtcctaagttggggaacatgagcctagaaatatt

SEQ ID NO: 2161 - DNA, 249 bp, Homo sapiens
  SITE (182): n equals a,t,g, or c
  SITE (225): n equals a,t,g, or c
ggcagaggttagccaagtgtggtggtctacctgtaatcttagctacttgggaggctgaggttggaggattgcttgagcacagaagtttgaggctgcagtgagctatgattgtgccattgtactccaatctgggtgacagagtgagaccctgactcttaaaaaaaaaaaattctgttgtttanaagccacccagtttatgacttttggtatagcagcttgaatganctaagtaggtatgtttttctaagt

SEQ ID NO: 2162 - DNA, 317 bp, Homo sapiens
  SITE (239): n equals a,t,g, or c
ggcagaggcgctttgtgttttaaatagttggtgttttttagacttattttctttctttctttcttttctttcccttctttcttcttttccttccttccttctttcctttcttttttttctttcctttctttgttctttcactcttgttgcccgggctggagtgcaatggcagattctcagctcactgcaacctccgcctcccggctcaggagaatggcctgaacccgggaggcggagtntgcagtgagccacgattgtgcccactgcaccccacaatgggggacagaaggcggagactccgtttcaaaaaaaaaaaa

SEQ ID NO: 2163 - DNA, 230 bp, Homo sapiens
atttttttcttaaagaccagtgtgcttttcttggagaaagaagaaaagaagaaagaaggaagaagaagaagaaagaaaggaggaagaaggaagaagaagagccagtgtgataatacattgagtgattttttaaaaagtgcatatatgagcaaaaagttatttttcccttttctgaagtatggcagcatactatatagactgtctctgcatgtttatttttccccccattt

SEQ ID NO: 2164 - DNA, 422 bp, Homo sapiens
ttcaaagcagattcgttaagagtgtggggagtttttgttttgttttattttaagctgcattaaactccaatgtatatgaaaggggcatttttataattgtaagttataatgtaaaacttttcctaatgtaaagttagtcaagggtacaatgaggtgttttaaccagaaaatcgtaatcagaatattctagattgccattgtagtcgttcagtgtttcaacatctgaataaattctgtgtcattgtttagctgtcacagtgtgaaaaacgttttgattcacaaagacaagtacytaaaaagaggtaacagtttttgaacagcttaccttgcacactctgaaataatgttcatttaaattggttacagcctgtagttccagctacctgggaggctgaggcaggagaaattgcctggaacccagg

SEQ ID NO: 2165 - DNA, 347 bp, Homo sapiens
  SITE (299): n equals a,t,g, or c
aaaaaaaaagaaggggggattctctagtagccctaattctacccatctggctactaattcaaactttcttccttcacatctgtttgtggacttctccaatataactagtatgcctgggctcattctgcttcttctcttctggaatagtttatttcatgaccatgtgcagagggggtgatggggcaagcctcacaagccccggaggtctgtggctgaggtgtaccttggctttgttgcctggaactgctctgactctgctcttcgctctttcctggggctgtgtcactacaggctctganctcctttccaccttgggaagtttaggcttcctaaaaaaagaataaatt

SEQ ID NO: 2166 - DNA, 519 bp, Homo sapiens
  SITE (424): n equals a,t,g, or c
gaatgaattgggggataaagggattagattccaggagtaatgagttagatgcaaaggtaaagaaattagttgataatgattgggaactcaaagacaatgtaactgtctagttagagtggtgggtctttttgctagaaatctgaagttctgtttcacacctgagcccagccacccaagcagaaatcctaactgcctggagcagtatagtgcttctatattctgttgcagtctctatgaaagctccggtaccaaaggagtccagctgactcatatcaagtgataagaaattcatctttgcaaaactggaagcaactcaaatgaaaatgattgcagtacattcactggagtgaatagataattaagactatataactccgtggaaccaggtttttcttctcatttaggttaatcactgggattttgnataacatggcatctgaaactgcaatgctttcttaaaaatagtcttaagattccccactatttggtatcatcatagcaagcatatgtactaacatt

SEQ ID NO: 2167 - DNA, 285 bp, Homo sapiens
agcttccatattattttaaacaacctcctcccagtttttctaatctgattactttgaagcaaatcttggtatagttacttttaaataggaagcagataggcacctttccagaatctatagaacttttccttagaatggcagggcatgagtttgtcagaagccccagatggggtcttcatttcaatcaggtgttatgcttggcaacggtttccctgtggggaactttgagggacttgggaagcattgttatctgtttttgtagcgccatctgcgttaaaaaaaaaa

SEQ ID NO: 2168 - DNA, 504 bp, Homo sapiens
  SITE (442): n equals a,t,g, or c
  SITE (446): n equals a,t,g, or c
aaccctcactaaagggaacaaaagctggagctccccgcggtggcggccgctctagaactagtggatcccccgggctgcaggaattcggcacgagcagaagttgatgcactgagaagaaaaggccctctgatcacagatcagagcttgtgaattattattattttttttatctctggtaacaagctgatagggtgagtgagaaggatcaaagagacatactttgatttatcactgagtaataatcctttcccaagaaagacaagttaattactttttgtcttagacccagttagggtcaccttacagtgcaggtggaaagaaagcaggactgctgagaggagctcaggacccattttccaggactattgccttctcaaaactttggagagcagtgaaaatagattcccaagtgaaagaggtggcagaaataaaaccaccaaanaaanctcgagggggggcccggtacccaattcgccctatagtgagtcgtattacaattcactg

SEQ ID NO: 2169 - DNA, 88 bp, Homo sapiens
aggaaaaagtcaagattttctgaccacaatgtactacaatttgaaattagttaacaaaaagataactccttaaaaaaaaaaaaaaaaa

SEQ ID NO: 2170 - DNA, 371 bp, Homo sapiens
cattgaacacctgccgtttggtcaagcatttctaggcactggagattcaaagtattcacatattccttttctttatagactagcamgaktgaagattcatgtactcattcactcaacaaatatttgccaatcactactaaggttgccagacactattttagtgcttgggatgtatcagtaaacagaagagagagagaaaacaaatacccttccctgttggagctttcattctaatataaggagaaagatgataaatgtaagagaattatgtaatatgttagaaggcatatggggaaaaaaaaatacaccagggtaaggggtatgaggaaaactggaggaagggggtttgcaatttttttttaagagggaat

SEQ ID NO: 2171 - DNA, 499 bp, Homo sapiens
gaattcggcacgagggcctctcaaagtggtggggttacaggcgtgagccactgcacctggcctctagtttgcatttctctaatggctaatgttgttgaacatcttttatgtatttatctgtcacctgtattatctcttcaatgaaatgtctgttcatgtcttttgtatattttctaattgggtttattattattatttactctggagtcttgagagagttctttatgtattctagatattagtcatttgttgaatgcgtggtttgcaaataattctctcagtctatagcttgtcttttcatcttcctaatagagtcttcacagagcgaatgttttaaaattgatgaggtcctatttattattatttatttattatataaaaaaagacagagttttactcttgtwgcctaagcgggagtgcaaggcatgatctcggctcactgcaacctccgcctcctgggttcaagcgatcttctgcctcagcctcctgagtagctggg

SEQ ID NO: 2172 - DNA, 385 bp, Homo sapiens
  SITE (336): n equals a,t,g, or c
  SITE (366): n equals a,t,g, or c
  SITE (372): n equals a,t,g, or c
gctgaagaagcggaggatcatggacgcatccccgaccctgatgattttktgccgcctgtgcctcccccttcctattttgccacgttttactcgtgcacaccccggatgaaccgcagatggttggtcctgatgttattcccctgccacacatctacggagctcgaatcaaaggtgtggaagtgttctgtcctctggatcccccgccgccatatgaagctgtggtgagccagatggaccaggagcagggatcttcattccaaatgtcagaaggatcagaagctgctgtgatcccattggatctgggctgcacacaagtgactcaagatggggacattnctaacataccttgccgaagaaaattgcatncacctnaacttcccagttt

SEQ ID NO: 2173 - DNA, 512 bp, Homo sapiens
aacaaggctacaggctgggagtcactgccgaagtgataagctgtgggtggtgaatgcagagaaggccacaagagtgaaactccatctcaaaaaaaaaaaaaaaaaaagttgtattagaatctggccacacccctttgtgtgtgtattacttagaattgctttagcaacctccatactataacttcaaagtggagtagtggcacagagaccatatggcctgcagaatggaaaatgtcacctgtttggcctcttaccagaaaaatttgccaaccgctcaactagggtgtgatggagaatcccaaggtgtcccttccctcccaaagccactcagggaatcatctgtacccttgtggcctgcattttaacaaacatatacacaaacacattttttaaatttgctagaaatcttccctcccattttcaagtgtggttaatcaattgaccaaaacccagttttctttctttctttctttctttttttgggtgacagagcaagatcttctgtctcgraa

SEQ ID NO: 2174 - DNA, 455 bp, Homo sapiens
  SITE (434): n equals a,t,g, or c
gaattcggcacgagcagggctggtctgcaatagggcctcagtggctgcttggtgaaagggtagagagggactcagaaatgtatagtgttgggtggaaggggctgccttgtatccagagcccaaagctaatcaccaaaggctgctcagtgcaagctgtttctcaggtacgagcgcactgattgtcacgatcagccctgagaagtggcaaggcagctagtcctcccctcacttcataagcagggagatggggctcaggaggctggcttctcctctcagaacagtggaggcaggactccaagtccaaggggctttccaaatagccagagggttgtgtggcagtctytctgggccctttggtgctgcctcctckacagctctggctcggggtggyactgggtgttaggagttggttattgacttggaagctgtctgtnggacagtgagactgggagagc

SEQ ID NO: 2175 - DNA, 346 bp, Homo sapiens
ataaataatattatttggcacattgccaagctaattattatgctaaccattttagaaggtcatcacatttgatccccttcaacaaacttatcaattaggtgctactaataaccaaattatatagataaagaaactgaggtctcaaaagactaagtaacctgtccaacaggtgacacacatgttaagtggcagaaatggagtttgaaccatgtgttatggctctagggctcaagctcttamcactatcccaagtagggtgggaaaggacaatttgcctcactcttactcagtttcctagtcttgtcctttaaaactgtcctctcaagaaaaaaaaaaaaagtcgacc

SEQ ID NO: 2176 - DNA, 643 bp, Homo sapiens
  SITE (637): n equals a,t,g, or c
  SITE (642): n equals a,t,g, or c
gaaaacagttcctttctgatggggagcgtctgagtgcagatcatgaggctctttctctaggtttaattcttttccatggtgaccggacttggtgtcttgtagcctggttacgaagtgggacgttgagcttctactgacgatgccctgcatggaccagctgggatctggctggggctgccctgtgtccctaacgaccataggcaatccatcttcttgtgtcagcaatttctggacacccactgttttccaccaagagctgaggtggcaacaactcagtgagcaataaacaaaatgacacagaaatgcacagtgttgttatgaaggagcctgtttacctgtgttcaaaatctggcaccattcccttgagcagggcccgctcaggagggaccaggtctgccagtttctgtgcctgcagagagacgaagccccacgagccacaccctactctacaagaggaaagggggttggatgggaagaatctattttgctgttttggaaagcacacagccgacctacaaacctcctgtgatggtgtttcttcggatgtgtaaaataaggctttatttgtcaattccgctgtaaaataagcattgtccgagtaaaaacagcagcawcatcggggggggggggggggggngaaanc

SEQ ID NO: 2177 - DNA, 492 bp, Homo sapiens
ttgatcaaaagtatttactaagtgagtgacaaaaggcactagcaactttaaggattttgcctattagtatcatatggcatgtagctatcaagccagkttcgkttagktattttgtgttgccaagcatatgatacgtggtgtcacactgagcctttgggatcctttccctggatacataaccctagtagataatgttactgcaagatgtaatgaccaaatccaacctactgcaaatgttactatggaaatctcaatgcaaaagtagcctttgtgattttttttttaaaccrtctccataacagaacacttagaattattagccatttgctgcaaagtatttgttttaaaatgtctggcatatacaccactaacatttaaatgcccaacattcggtctatatgtgaaaaaactagaagaaaagccctgttggagttttgatgtagagtgcaataatacatcaataaaggtattttaaaatgaaaaaaaaaaaaa

SEQ ID NO: 2178 - DNA, 468 bp, Homo sapiens
gacacggttcaagacagttactcagaaggactggaaatagaagaatagctgaaaagctgtcttttgtgggggagatttgcatctgtggagagaatctacactgatgcggccaggcctcctctgaggccctccttgcctgatctgggaagagtaacagtctgacgcctttaaaggcctgaagggaacattcaccatctgttctctctcagggctgctacctgtgaggtttcatctgtagaacaaggccacctttgctagccaggcctcctctgctctcccycctgtaaccggtcttgccactgtcacctgattttccaccataaactgtggccatactttgagcccatgttctttctgtaacctcaagatggtgtataagcttccgaaccccattgggaggttggggtcatcactctggttctccctgtgtgcatgaataaatctgtatgcctttaaaaaaaaaaaaaa

SEQ ID NO: 2179 - DNA, 307 bp, Homo sapiens
tttagactataaaacagcttttaggctgtagtgctctgtagtataaataaggcagtgaggcagcaactccaaagaaaattccctttcaagacttacattgtaacctacttgagtttatagttgtggagttttaattcatttgcattctaggccatgaccaagtgaccagaggactaaaatagtataaaagcatcctgtattgagtttccatagccaagggggtgtaagatcatgaaatttggagctgtttctcgwttttaaaaaatgagttgtaaaatacatattaaataaaatttaccaacttaaa

SEQ ID NO: 2180 - DNA, 360 bp, Homo sapiens
cagccatgcattgggggattggttcccaggatgccccgctatacccaaaatctgcacgtactcgagtcccacagtcggaccctgcagaatccacagacaggaaaatttggctgttaggtttcgcatcccatgaatactgtattttcaatctatggttggaaaaaatccacgtgtaagtggaactgcacagtccaaacccatgctgttcaagggttaactgtagattgtcgtatactaatttgtatttccttgatttctaaagagttggagtctttttcatatttattgyctgtttatatgtcttcttttatgaattactcctttgggtgttttacaattatttaacggtatgtatatctt

SEQ ID NO: 2181 - DNA, 450 bp, Homo sapiens
tttttttttttttttttttttttttttttttaaatagaactgtcttatagatttattaatgaaaaatactttacaaaaacagtatgtttggcctaaaatagttcagctgactctgagggtttacattgacgactgagcaagtggcaataatggctgtgttattgaggacagaaggctgtgttagtgtgcctgactccatctgttcaaaagggtgaatgttatgttggcagctccgcattctaggcctaaggtttggagggcacagggaatgctgacaggccataatacctgggcaggggggctgccctgatgatgtcatcagaaccatgaccacagggctacatgtccccccaaggatgggagacagggaagacaaagggtcaggtaatagggataggtggataaaacaaagagtagaagttgggagtatagtagggaacagaggatgag

SEQ ID NO: 2182 - DNA, 615 bp, Homo sapiens
  SITE (32): n equals a,t,g, or c
  SITE (34): n equals a,t,g, or c
  SITE (38): n equals a,t,g, or c
  SITE (89): n equals a,t,g, or c
  SITE (287): n equals a,t,g, or c
  SITE (614): n equals a,t,g, or c
cggtccggaattcccgggtcgacccacgcgtntngatntggtgaaatggttagcagcatggactttggaaccagatagacctagatacnaaccacatgtctaacacttgctacctctgtgaccttgggcaaccccctccctcagcctcagttttctcatctgtaaagtggggagaatttccatcaagattgtccggagacctaaatgagataattcctggaaagtgtttagaacacagcatgtggtccctcaataggccgtggctgacagtacttttattacttganttttgcttaaattaaaactttatgccgggccaggtgtggtggctcacgcctgtaatcccagcactttgggaggccgaggcgggcggatcacctgaggttgggagttcgaggccagcctgaccaacatggagaaaccccatctctactaaagatacaaaaagattagctgggcatggtggcgcatgcctgtaatcccagctactcaggaggctgaggcaggagaatcacttgaacccaggacgcagaggttgcggtgagccaagatcataccattgcactccagcctgggcaacaaagagtgaaacttggtctcaaaaaaacaaaaanc

SEQ ID NO: 2183 - DNA, 771 bp, Homo sapiens
  SITE (25): n equals a,t,g, or c
  SITE (771): n equals a,t,g, or c
gaattttcttggaggccgaggcctngcgcctctgtctgcacccaaggcgaccgccagcttacccccggctcttctgagcacagggaggcctcccagcaaagcctgaaccctctaagtttagctgcaggcttcgaaccccgaccgtccccgccgagccttgggtgctgaggtggggatgaactgggcgaaagacacttgggagttaggaagaaacaaacaagcagggaagtgaccaggagacaaggtgagactttgcccggctcaggtctgaactgagtgttggagataaccacagttaacaaaataaacaaaattcttcgcccccgtggagctgttagcaaccctggtgcctgggaagcctggaagaggctcgggttagtaacaacctccaggatgccctccgaactggtactggcgccgggactctagacaaggtccagattcccgggcccttccccttacgggtgcaaaaagggagggtcaggacctgccagycctggcttcaggatgttgactggacggacctggactcatgggaactgtgcgccaaagtcctgggagcaaagtgtcataacgctcctcgtttgtctcttgccttcacaggagacagccctgctgcaagcggscagtgggaatccttggcctttgggggtatgatccaagaatgtaaacgctagcttttcagtgttttcgatttcgtgatattcaatgcatacaatacaatgkgactcttgaagcttaataataaaattatcattcttggaaaaaaan

SEQ ID NO: 2184 - DNA, 462 bp, Homo sapiens
ccaattttaaggtttatttggttgaagaggtgtcaaaaatttaaccagcattcccttttgttcacttctccaaagtctcagaatggaggcaaacttcacaacaaatgggcagcagtttttggatctgctctccaaggcacaatttttctaaattatctaaactttaggtccctgctttcctcaccaaccagagactttggagaaataaagagatatcttgacattagaaaggtgatcaaactattaccatttcattaagcacaaaaccaggcaggttttagtagaaataaggataaaggattacaccacagcaacatgggacctgatcatagtaccaaagtcttcaggtaaggtgtcaggctcctargtcttattaccaaaaatagctcaaacaaaaaccgagcttatataaagattaagaggagaaattctgcaataacatatccaaaaagattaagcagg

SEQ ID NO: 2185 - DNA, 480 bp, Homo sapiens
caacccccacacctccacaaacacacaaaaaccttgaaaatctggacaaaataatgaaacaatgggttttagactttggacaacagcagtgcaggactgtgatccctaaaagaagggaaacaaacaaagtgagctttacagtcacccacccaccctggctttttgcctggggcacattctaaattgtagatctgggacagggaatcttgagcaaagaacaagatgaagagatagagatcagaatttatggaagctgaggcagcaagaagttgtagggcaaagttcagcaggaaggacactttgtcaaaattaatgctatccatagaagtctctgactttttgctgaattctagaatgaacatacatggagtaaaactgtaaagccagacaaagagcaaccagattgatgtgaactgacagacatcagaggtcacagagggctgggaagcatttgaggttttactagctagaggggaaagt

SEQ ID NO: 2186 - DNA, 457 bp, Homo sapiens
aaatggcccgcctgcaggtacccggtccggaattcccgggtcgacccacgcgtccgttcttggyytccctgggctttgattccctcatcagtcctgcctgcgctgccaggcttctgtgagcctttaatgagcctgtgttgacagatgaatgcattcttgggactactaatcaacgcatacaactaaggccaagagaagccagggtttctaccccagggacccccttggccccaccctctagccctggagctgggtccctctgcctctcccaggatgcagtcagaggcctgagcttctggaaactcttggatctcgtccctgctcctcccagtcccacctcggctccaggtgtctatctctccagctattttctgatctggagttcaaaagaacagatctaggagcaacagccacggggaacaacagccagcaggctagttcatgttggcccagctga

SEQ ID NO: 2187 - DNA, 444 bp, Homo sapiens
atgtatgtacaagaatgtgcatagcagcattgtttgtagtagtcaaaaattggaaacatccagatgtctgtcaactgtagaatggataaattgtgttatgttcatatactataatatcatacagcaaagaaaatgattgaaccacagttacattcagtatcagagatggatctggcataatctggaatgattcaaaaaaagcactaaagaatataaacagtataattccatttatgtaaagttcaaaaacaggcaaaatgatattgaataagaatatagctcactattcttaaaatgcaagaaaatgattttcacaaagtcaagataatagatactttaaaagggagggatggagttgtgattggagaagggcacatgagtaggcttttaggactctggcaatgttatttcttgatctggggaaaaagataaagtaaaaaaaaa

SEQ ID NO: 2188 - DNA, 768 bp, Homo sapiens
  SITE (118): n equals a,t,g, or c
ttggaacgacccactatagggaaagctggtacgcctgcaggtaccggtccggaattcccgggtcgacccacgcgtccgacagaactcttttcctgggttttgtgacatttctaattgntgtaatttcttttgccattataaaaattagtcacttttgaacctaatttgtattcatcattctgaatctttttctttaaaagcctcctcttttccaattatataagctcataccccataaaacctgaatctgcccctagtaattactaataaggctagtaggagcattcttgttcaccttctgtgcatgcgctggactctaatttgaacctaggattagcactgcggcatcagaggctatgggggctgttcagctttcaaagataaagcagaaatgttttcaaagtggttgtaccaatctatactgccaccagtaccgaccacaattctctctaaatcctcgttattttcacacttcttactttttgctagtctacccagaataaataccatgtttttgtcttaatttgcattccgtaattactgataaggctgagcactttgaaatatgttattcattcatgttttctcttcctcttctaaggatgtgtgtgtgtgtgtacatatataaatgtatatataatgtatatatgtatatataatgaaacattcttttgttaattgtatgtgttgcagatatcttctccctgtttatagtgtgttttcaaataaaaaaattttttgacttattttgaaaaaatcaaccttaaa

SEQ ID NO: 2189 - DNA, 884 bp, Homo sapiens
  SITE (59): n equals a,t,g, or c
  SITE (851): n equals a,t,g, or c
  SITE (853): n equals a,t,g, or c
  SITE (864): n equals a,t,g, or c
  SITE (871): n equals a,t,g, or c
aagtgaatgtaatgtcagtagactcttgaaaatgtcccttaccctctggatctgttaanaatgttattttatattcaaagttcaggttgttttttggtttcatcctctcttgcttttttaaagttgtatatgtgattatgtcattactggaagagtcttattcctttcccttaatctctcactcttgccccctgcccctgtgtaggactgaatacttcattctgttgtagagggtctttgtacacagtacattattacattatttaatttattcactccccacctgtgaccttcctttctctgatgtctccttactaattccttcactttcacttttcctttcagctgtcatccactctttcctttttacttatctgctgaattaacttgctcacactgattaaccctcttttgtttgttattagtgctgcttagagtctttcttctattttctccatccagctttccttttactctctcattctgactttgcatccccagtcatgctcctagcctttaaagagttatccttagctacaagaaaaactggtaaataaaaatataaaatgaaacaaaacaaaaacttcacattcttctcacccgtctgcttgtgtatctgagcttaagttttctctattttcatttaatttcacccttaggacacaggccatttatttagtaaacatttgtttaatgtctgttatgtaccaggctctgtgctagagaaaacaaagtctgctctgcatgtgcttacagtctcttggggcattgtgcatcaggggtgcagggagcgacagacatgaataaattatcatagcgttgagattaaagctctgttgaaccaccagganancaagttcctgntgccaangagatttgaaagg

SEQ ID NO: 2190 - DNA, 448 bp, Homo sapiens
  SITE (6): n equals a,t,g, or c
  SITE (251): n equals a,t,g, or c
aatggngcttttcttttttcagttaaatgttagcattgctatttttcattattgcaaagcagcacatgcttgttaccaaaaactttggaagtgtagacaaataaaaagaagaaaaagctacttccaaatcctacttaccccaaagacaagatgatcatttagtcatatagtatcatacatatatwatatgtacmcatatattttaatgtaagtgtagtgtcacaatatcatgtatagtctttcataaaacnacgttggcacttaatatcttatatgaacaactttctagagcaacaagcttagtttacagcaattgtaatgtaagagtactcatttacatagctacagcatcctttgkttacctcatctcttatggtttgatgtttaggttgtttccaacttttctccacctaaacagcattaataaatgtggttttagtttcctctt

SEQ ID NO: 2191 - DNA, 375 bp, Homo sapiens
  SITE (61): n equals a,t,g, or c
  SITE (71): n equals a,t,g, or c
catgtcattttggtactcacaggttgactgcagaggagaggaaccaagctatacttgaccntaaagcagcnggatggtcggaattaagtgagagagatgccatctacaaagaattctccttccacaattttaatcaggcatttggctttatgtcccgagttgccctacaagcagagaagatgaatcatcacccagaatggttcaatgtatacaacaaggtccagataactctcacctcacatgactgtggtgaactgaccaaaaaagatgtgaagctggccaagtttattgaaaaagcagctgcttctgtgttatttctcccaaaatacatgtaaaatcttgcacacatcttagctgcattggatgttgagggaa

SEQ ID NO: 2192 - DNA, 499 bp, Homo sapiens
agtgttttaggaagttgtcccagctaagattttagctgacagttgagatcaatcactagacagacaagtgagtgaatcttcagatggtcccagcttccagctgttgaatcttcctgctgagctccaaaccttgtgaacaggatgattaagttatctctgctatgctcatgagcgtaagaagtggttgttttcagcttactctaagttttgggggtgattcgttatataactgtattaaccacaacatcatgttccatttttaccttcgctgtcaggaaactcaaggtcaaatttattccttaaatacagcaactgcaatagccttaagtgttagaacaactactttttaattttataacactgagcatatatttctattttattaatcttattttgtctttcgttgaaaaaatatgaagtgtacataaacaacaaaatgacccctacctaccccctaataataaaagtatgaatttaaaaaaaaaaaaaaaaaaaaaaa

SEQ ID NO: 2193 - DNA, 413 bp, Homo sapiens
  SITE (35): n equals a,t,g, or c
  SITE (37): n equals a,t,g, or c
ctgcaggtacttggtccggaattcccgggtcagancnacgcgtccgattcagtgtaagggttgtgctgtgtgtcagttatatgatttgatgtatggagtgtgctgtgcgtcagttatatgcaagtactacaccattttatatcagagacttgagcatctgtggatttgggtatctgtaggaagatctaaccattgcccactgatactgaggggtgactgttggcatggctgtcacaaatcccagaattcactgtgtatttgttgtcttagtcttcatcttaatcagtattctaggatttttttctacatttttgcytgtggtcttcactaaaatattttaacttttctgccctgtatcttatcttattttgacatttttatattatgyataatatctcattttgaaaacttaa

SEQ ID NO: 2194 - DNA, 497 bp, Homo sapiens
  SITE (467): n equals a,t,g, or c
  SITE (471): n equals a,t,g, or c
tatacagagaacaggtgtccaaagagaaatccattctcgcaaagccattctttctttcacacasagtgcctaaagmctccatagatggtsaaggctatagtgccaaaagtcagcccaargagactacctcctgataaatcttggtttggtggagatgtgtggtcccagattttttcagggaaagtagcagtttggtggattctacatccagtacccaggctgtagatagcatctgcaaatgtaccaagaaacagtcttaaattggaaatggcaacagccaaccctcagggatgggaactgcagtgaatcactattgtgtgtgctgtctgagatggtgatatgcatgggatgtggtctaatcttgtgatccatcagaatcacttccargccattaagaataatgtgymgcagctcaaattataataaacagtatcaggcaataaacacacaaatgacmwagaawaacnaaanggacaaaaaaaggggggcctttttaa

SEQ ID NO: 2195 - DNA, 592 bp, Homo sapiens
tgttcaggacctcactctttgagagctggactcccacagtgaaaagaccgccatggtacctgcccaatacagccccttgagtgttttgaccattgagccsgatggctcaattscctatmaagagtacgawgwtatgatwgctmcaaagtgcacctgtcgttaacaaatggtcctcttaaaaccttgagcctatttggcaaagtaactactgtgtgccyatgtgtgccttcaagagaaagcttcatatattaagtcyctaaatgtagcatatgttatataaagaggagcctgtgtaggttagtaccttctatggcatctatcaggataaagggataacatcaattgttgctacagagcctttttttatttccaaatttaaatgaaatataattattgtggagaactttacatttttttccttgagtgattttttttcttttcataggagtcttattcttgatagggaaaaaaccttaattagcatcaaycctggatggacttgcagctataaataggcaattcagattgctgtagtcttaatagaagaataaatttctgtcaatggcaaaaaaaaaaaaaaaaaaaaaaaaat

SEQ ID NO: 2196 - DNA, 478 bp, Homo sapiens
  SITE (374): n equals a,t,g, or c
  SITE (433): n equals a,t,g, or c
  SITE (435): n equals a,t,g, or c
  SITE (463): n equals a,t,g, or c
gggcacgagctcgtgccgcttcattttagtcatactgtagactcattaaaaccagggttcaaggactcacctaagtgcagccaagctggaagaattcattccgagtttggtgtcgaattctctcaaatcaaccagccagactctaactgtaccctcagcattgccaacaggctctacgggacaaagacgatggcatttcatcagcaatatttaagctgttctgagaaatggtatcaagccaggttgcaaactgtggattttgracagtctacagaagaaacgaggaaaacgattaatgcttgggttgaaataaaactaatggaaaagtcgcaaatctctttggaaagagcacaattgacccttcatctgtaatngtcctggtgaataccatatatttcaaaggacaaaggcaaaataaatttcaagtaagagngncagttaaaagtccttttcagctaagtgnaggtaaaatgtactt

SEQ ID NO: 2197 - DNA, 345 bp, Homo sapiens
  SITE (293): n equals a,t,g, or c
  SITE (294): n equals a,t,g, or c
  SITE (295): n equals a,t,g, or c
agttcaagaataaagtgactttataaaagataaattatataaataaatatatgatctgcaattaggaagaaaatgaagtattgacaccaaagtgttacattgatattcaaagatggcaggatttatcacaagatattttgctttcttttcacttacatgtatttcctaggatctttcatattgaaatggaagtttgtgagtttttttttaaatgaaataaaaaaaagaacacatgtgtaatcttaaatggtacagaggttaaattaaatgtctaaatataatcatttggttgnnnagggtgggggttcagaggcccagccaacaaggggctgttgacctctgcta

SEQ ID NO: 2198 - DNA, 402 bp, Homo sapiens
  SITE (327): n equals a,t,g, or c
  SITE (377): n equals a,t,g, or c
agggacggggctgtagctagatggcagagaaattatatgtgtaaatgacagaggaattcactggagtcctgcagatagaggtggtggtgcagctgcaggtggggatggtgagctggaagcatctactggggtgaggtggaagcttattggagagtgagtgccaatggaactccataggtgacaccataagamcaaaatctacaacaaggagatctaggaagggcagctactgcytctctgctatgcctgcagtgtctctctagtgccctctgcttgataagccttaacattgcaccagctgggcaaatgrggaaattttcatggggntcccagatyccagatccagtttaacttcccaaacaaggaaaaaggaaagnttgctttttggacttaagggaggca

SEQ ID NO: 2199 - DNA, 424 bp, Homo sapiens
  SITE (335): n equals a,t,g, or c
  SITE (354): n equals a,t,g, or c
  SITE (357): n equals a,t,g, or c
  SITE (419): n equals a,t,g, or c
ggcacgaggcgatctcggctcactttgacctctgcctcctgggttcaagcgattctcctgtcacagcctcctgagcagctgggattacaggcaggcaccaccatgctgagctaatttttgtatttttagtagagaccaggtttcgccatgttgcccaggctactctcgaactcctggcctcatgtgatccgcccacctcagcctcccaaagtgctgggattacaggcgtgagcactgcaaccagctggaacaatcttgatattagggtgaacaagtgatttcatagctttctctgaaggaggaaacactgggagcatccacccgagaatcaacantgtggatcattctggggantantagttttgagatgtgtcccaagataattgttaagctggattaccacgtggatggaaccaggnggatc

SEQ ID NO: 2200 - DNA, 1087 bp, Homo sapiens
  SITE (740): n equals a,t,g, or c
  SITE (1041): n equals a,t,g, or c
  SITE (1054): n equals a,t,g, or c
tcgtgccggtttttttttttttttttgaacaacatgccccacaaattacatagccagctgtgctcctgtgtgccagtgctggggcagagcagcctctgctttcctaccacacttcaaactgtgggatttggactcaatggctgctctctgggggctcatctctccattctcagccagcttccattttaccaacaggtatacatacacatacccaaacagacacattaatgcacatgagtagaattaagaacttgctatcaataaagtctaacctgcttcaggctcagtttcagggacctcagatgcttcaaactcctcaggtaaccatgaccctcgggtatcgtgagatgcctcaggctcttcgtgaacttccaactcatcaccttcaatctcctcttcatcctcattatcagtctcttcagcttctaaaaaaatttgaagaaataaattatcatttggttgaagtcaacaaatatttattgggtgttgataagtgctgaagccaaacaaagaatatgaaatggtccctgccctcctagagtatgtagtttaatgggggagatagaaaaattatctatttattatagctattcacatgtagtggtaaaggatgatagtcatctgctcagagttctgtatgagtaccagactaggggttcattcaaaaatgaaatgtttgtggcagttccaaacatccttacagtaaatctagaaatagcccaatgtcccaaagaaatggntacatcagcaccattcaatatagtagccactagctacatgtggctattgagtacttgaaatgaggctagtccaaattgatatatactgtaagtataaaacatacagtgaattttaaagatttaatatgaaaaactaaatataaaatatgtgacttttagaaaatttaaagttccatgtgtggcttatattatgtttctaatgggtagcaccaggttagattatatatataatgattgattttcttacagctaactaaaaataataaatcatgtagtatattaatcaatatattaaatgtanatacaaaatacgnaaattagctggtgtgttcaaacaccggccccca

SEQ ID NO: 2201 - DNA, 409 bp, Homo sapiens
ggggcacaaggaggagtcaccaaaagggccgggtgggggccccgctgcttcgggaggagtggctgaagggatcgccaacggacgcctcgtcagacaccatggtccgragcccagcagcttggacaagaggaaagagatatttagcaaagacacactgttcaaacctcttcacagcaccttgtctgtaaacagctatcacaagtcgagcctgtccctcctcaaatctcacccgaagacacctgctgacacattgccaggccgatgtgagaaactggaaccgtccctggggacctcggcggcacaagccatgcctgcttcccagcgtcagcaggagtcaggagggaaccaggaagcctcttttgactattacaacgtctctgatgatgacgactctgaggaaggggcaaac

SEQ ID NO: 2202 - DNA, 247 bp, Homo sapiens
  SITE (216): n equals a,t,g, or c
  SITE (241): n equals a,t,g, or c
ctggtaatcatgcatcaggaagaaccacagaatcggaatgaacgccgctaccagcactactgcgacgccaatcagacgccagctaaggccagaaaggaacagtacaaacagaccggaaagcgcaacgaggattgatgttcccaggtcaggctgtgcagccaccagcagcgtgggcataaatatcagcaccagcgcgatgccagttttcttcaacgnatggcggggcccggttacccaattncgccct

SEQ ID NO: 2203 - DNA, 735 bp, Homo sapiens
  SITE (616): n equals a,t,g, or c
  SITE (718): n equals a,t,g, or c
ttgaagacctggaaaacatgttaaataaaaatgctttgccacagctgacctatgtcttctggcttgtaccccacaacatcttatctaatggagccagtcttggtgctctgtgttcacctggttcatctgaggagctgcatctaccctgcccatgccatagatcctgccctgtttgcttctcctgttgctgctagtggacatgagaaggacagaataacgggctcccagattcacaagccccaccaagaggatcaccccaggaatgcttggaggctgaggagttcactgaggctactgcatcttgagactcaggatgaagacccagcttggggctgtcaaaggttttttgcatgtctgacacccatgactccacctggaccttatggctccacccagaagcaattcagcccaacaggaggacagcttcaacccattacgatttcatctctgccccaaccactcagcagcaagcacctgttacctgtccayccccaccccttcccccaaactgcctttgaaaaatccctaacctatgagctttgaataagatgagtacgaacttcatcgcccatgtggcgtggccggcctcgtgtctattaaattctttttctactanaaaaaaaaaaaaaaaaaaaaaaaaaaaaaaaaaaaaaaaaaaaaaaaaaaaaaaaaaaaaaaaaaaaaaaaaaaaaaaaaaaaaaaaaaaaaaaaaaaaaanggggggccgttttaaag

SEQ ID NO: 2204 - DNA, 609 bp, Homo sapiens
  SITE (485): n equals a,t,g, or c
  SITE (572): n equals a,t,g, or c
  SITE (604): n equals a,t,g, or c
  SITE (608): n equals a,t,g, or c
gaggaactctctttagggaaatttggcccgcctgcacgtaccggtccggaattcccgggtcgacccacgcgtccgctcctcatgacagaatgagtatgtgtaaaataatgaataagtttaacatggacctatttatactttgaagtaatccttacagattctttgctgatattctaaaatgcatgaatttctgtgcattcatgcaaagctcaagattccaaactcagcattcttctgwttgcatatgaccttgcaagtctgcattatatatgtccctgacaatattcttggtgattcctatagttattttttaaactatgttaaaaattaaggacacttagtaaagcaattgaaaatgcaaagctaaatatagcagagaacctacttcaaggtggtgagagtacatattcaaggctctgatttacacttctatttcacatggtagacctatttatcttaagtaacaactaattgcaatatattanaggtcactttatgcatcgatcttatagcctcacaatccaaatatttatattatttaaaataaagcacttttttctgtattttcctgntgaaatacatagtgccacctttatttgcgcanaaana

SEQ ID NO: 2205 - DNA, 338 bp, Homo sapiens
  SITE (252): n equals a,t,g, or c
  SITE (279): n equals a,t,g, or c
  SITE (286): n equals a,t,g, or c
ctgtccacctcatgatggaccatcctatgtgtaccttaaaaatgaaaatgaataataaattttcataaaagaaagtgctaaaatcaaagtggataaagtgattaacatggacagataaaaaattcagtcaccaagcacttgtacaaccactcacaagttgaagttgcagcaaataatttagatattgctggtcgaatgacatgattctagctgggctgaagctactctccatggagttctctgggtaccttncatgacacagtgataatgagccataantgctttncttgaagaattcttaagaatcatgaccatgctcctttagggaaatttacttg

SEQ ID NO: 2206 - DNA, 179 bp, Homo sapiens
ccaacgacctcatttagcctatttacctccccaaaggccttggtctccacatatcatcagattgtgggttaaggcttcaacatatgacatttaattcagctcgtaccagagggtgtttaagcattttcccattgaaatgtattcccatctttccaggtgtccatctctcatttgctttt

SEQ ID NO: 2207 - DNA, 446 bp, Homo sapiens
  SITE (72): n equals a,t,g, or c
  SITE (73): n equals a,t,g, or c
  SITE (394): n equals a,t,g, or c
  SITE (404): n equals a,t,g, or c
taggttttaggtgacacgccccgcaggtaccggtccggaattcccgggtcgacccacgcgtccggttcaggnnaatcttgacagtgaatgtgtctcattacattgaataacagctacaggatgttcgagagctgttctggcttttctggattctgtgcttcaccaatagaggaatcccatggagcattaattagttcttgcaattccagaaccatgactgatgggttggtgacattcagggatgtggccatcgacttctctcaggaggagtggraatgcctggaccctgctcagagggacttgtacgtggatgtaatgttggagaactatagtaacttggtgtcactggatttggagtcaaaaacatatgagaccaaaaaaatattttcagaanatgatatttntgaaataaatttttcccagtggaaggacaaaagtaaaaccct

SEQ ID NO: 2208 - DNA, 528 bp, Homo sapiens
  SITE (19): n equals a,t,g, or c
  SITE (84): n equals a,t,g, or c
gcttcgtactggaaagacncactatagggaatgctggtacgcctgcaggtaccggtccggaattcccgggtcgacccacgcgtncggatttaataatttatttaacaatacttgtttaaaatgtttgtcacctgttctagaatataaacttcgtgaagacaaggaccatgtctagcatgggagaaggcacgttgccttgtgtgtaagaggtgattagaaatatttatggatagataattgaatatgtggtatcttcaggaaggttcagagaacaccatgtttcttactttagtatcattctagacctgtagattagcaataagtaatcttactgatggaggaacatagaaacttctcactggaccatggcttaaaaactagagtcttgagtctggttttgtgattctcactacagcccttagtcctatcatgagaatattttccacttttttcttttctttcttttttagtaaaaatatgtaagaggagcttatagaaagttttgtgaacttcagcaataaaaaaaaa

SEQ ID NO: 2209 - DNA, 405 bp, Homo sapiens
cagaaatagatgaagagcacgtggaggatgacgggctgtctttggacattcaggaaagtgagtacatgtgcaatgaagagacggagatcaaagaggcgcagagctaccagaactccccagtcagctctgcgactaaccaggacgccggctacgggtcgcccttcagtgagagcagcgaccagctagcccatttcaaaggctcttcctctcgagaagagaaggaggatccgcagtgtcccgacagygtctcgtacccccaggacagcctggcacagatcaaagctgtgtatgcaaacttgttctccgagtcctgctggtcagcttagctctggatttaaagaagtcgggttccaccaccagcaccaacgatgccagccagaaggagagctccgcccccacccccac

SEQ ID NO: 2210 - DNA, 618 bp, Homo sapiens
  SITE (29): n equals a,t,g, or c
  SITE (46): n equals a,t,g, or c
  SITE (111): n equals a,t,g, or c
ggtaaaaaccttggggccgtggataccanggtgccggtgagcccanttcccttttcagttgtcacctcagcacccataacatcacgaaagaacatcattaatgcaaacctnctcactaagccttcagacccaaagtggctttcctgatggactctgcctgtctgtcctacaagtggagtcagattcaaagtagaaatgtatccatccttgggaaagaaaataggaagtcttcccccactgtaggagtatataaaaatgtctcccggttgcttaattcccaacactcaatttccttcttctaaacacatttataaggagcaagagatggtgcacttattatgaattaatattaagcaatcactaaaagaaaggaatattctcttcctttcaatcagaaaccctgatatgtaagttgtgcaattaatgctaaagcatataaagtctttaagctgataagtatctgtaatcaaataatgaaaaaaaaagcagttaaatgaacacactattcagggtcaaatatgttcagcaaaaagccgtagcgtggtctttgatcatggttagattcacagtgatatcaaacagttggttctcatgtaacagctaaatgtttgcagtttt

SEQ ID NO: 2211 - DNA, 586 bp, Homo sapiens
  SITE (565): n equals a,t,g, or c
tttctgttttttttcctgtttgatagctgtcagttatagtgattggtatttaatacaaaaaaaaccaaagatatgaaaattgttctatattttamtckgcaaattgctccattaggcagatttaattatttgtggatttacttatggtgcttccagatatcttgtacctcttaatgtgaccatcagaaaacttgactgagaaacatttgtactatacaaaatacaaaatgctttcagtatattattgcaagtgcttcttaaaaacatatagtattgttaaatgtgtactttttaatgttgtcttgtttaaattggaaaattaaccaaatgttatccatttaaacatgctttataacatattaaatgtgagtgcttaataagtacttttaatgatactggtacgggtgttggaacccagtcctagtcaagagtcyaaatcttcatctctgtttttcagacaaatgtagtaggacattcyttaggatgkacytggcattccytgaggaattctcckggtgaaaagatcmacttacygraaagaagccyccytagtattccaaatccngattacatccagcggcctaag

SEQ ID NO: 2212 - DNA, 469 bp, Homo sapiens
  SITE (19): n equals a,t,g, or c
  SITE (31): n equals a,t,g, or c
  SITE (55): n equals a,t,g, or c
cttgcccaatgagataagnctttttcccagnacttcacacttactcaaaaaaagnacattggaaaacgcctattttaaatatgttcaaagaaccaaaggtaaacaacgtctcaccaaatagagaaaatcaataatgagatagaaattacggaaggaaaagccaaaaaggaatgaacagattctcagagacctgtgggacactgtcagatgtaccaacatagggcatgatgaaagtctcatgtcaaccataattttcacccatagccatacatgcccaagagaattgaaaacatgtartacttgaatgtgaatgttcatagtggcataatagctaaaaaaaaagracccagatatccatcatctgatgatgagtgaacagtgtggtttatgcatacagtggactggattcaggcataaaaaggaatgaagtattgatacagactacaacgtgaatggatgagccttaaga

SEQ ID NO: 2213 - DNA, 443 bp, Homo sapiens
  SITE (21): n equals a,t,g, or c
gggtcgacccacgcgtccganagatgattattccatacytaaamccaattcaaaataaaataaaycctsaatactycttattcccyggggtagtaattttaattagattctattgattcattattttctcctgtgtgcctttatttgggaaatactgttagtttaccttgctatcgagtctctttccctaacaagaaaatgtcagccttacgagtcaggaaagcktktrctttcactatcacatatgaagaatgaactaaacacctaacttggaaagtaaaacttaaatgagggattcaggacatttcccaaggggtcatctgaccaatttaagagttggtatgatgtgcctaaaatagcaaattaactcttctacttataataaaggtgcmgatgtactgattagacatgctgacatgtacatataaaatatgcctaaacca

SEQ ID NO: 2214 - DNA, 318 bp, Homo sapiens
  SITE (243): n equals a,t,g, or c
  SITE (289): n equals a,t,g, or c
  SITE (306): n equals a,t,g, or c
actccgtctcaaaataaataaataaataaaaagtttgtgctgttaatttaatggggttgggagagtgaacaagttgttttcatcaaacaattctagagttttggagtggggtgcttaggaacstcatgttttctgacattgtgacttactccygttgagctgctcttcccgaagcactgaggcaggagtgctctccacccaacaaactgacctcccagttaacattccttagcaatgcgagtncaaagaagtgcttttaagtgtctctgattttttaacacatcactcnggcagtccagtgtctangctggaaatttc

SEQ ID NO: 2215 - DNA, 335 bp, Homo sapiens
  SITE (245): n equals a,t,g, or c
  SITE (312): n equals a,t,g, or c
  SITE (335): n equals a,t,g, or c
gggtcgacccacgcgtccggtaccttagagatcatcttgctcacagtagatcattaatatcaataattaaagatgaagcttaatccaccatggtcatcagtcaggtggggcttattctaaatgcttaatgtgtcttaagctcatttccttgttcatatttgggttgctacttggctaaatcctttcaccttagtaccctaagccagtttcctggcttggatactatttgataatgctctgctcangaatgattatattgggtgagaaatggagccctggggttgtgtgttttggaacagtattcaagatcanagaaagttcttagtccaggttan

SEQ ID NO: 2216 - DNA, 1034 bp, Homo sapiens
  SITE (732): n equals a,t,g, or c
gcccaactccggtgccacctgcaccacggaggggtgaccccagggtcagggtcagagcggcttctcagaattcagcttgccacctctccgcggaccctgccttcatctcgtgcctcctcagagccctctgcgggcgcatgaagggcctttttttttttttttttttttttttttggcacaggtggaccaacggggggtgtgactgtgggcaccgtgcgcggaggcggaggctcatctggttcccaccctccgtgccgctggatgccccaggattttctccaaccggggtcccggcttggagccctccttggtgcgagctttggctcagcaaatggggaaagcgggaatgggtctcgcccttgtggctgcctggtggaagcggcggttttgacacacgaatagtcgtggggagcagatccagagagggcgcatttgcaataataacgcttagttkatctctgccagaggggcgggaacaggccttcgcgctggtgtcttacatcagccaagcaaaccatgggcgcgattggagccaaccacctccagcggggttttgctccagacttaaggtgcacggaaaccggagcattcagcccttcatggatgcctcccgaaaacctcaccatgccagtgacacgactgcaaacggcgggtggcacatgccgggggcttgggatgggagggtttggaaacctcgctccaaggacgccctcagccaaggagcttcggctncttcctagaatttctagaagcacttttggagggaccgagggcttccggccgggcccagrggaatttgagcgcttgcccgggcaggcagaagcgcagcctgggagtggagaggctgctgggccacattccggcccagcttcccccgctaggccccagccctgccgcggcgccccaggaagcacctccgaaaacaaagcgctgtggtttcagcccaargttaaagtccaccgcgagcgtgttttttcccccctccagaatctaagagcgatagcgtttctccaaataaaccgccaataaatcaa

SEQ ID NO: 2217 - DNA, 329 bp, Homo sapiens
  SITE (26): n equals a,t,g, or c
  SITE (265): n equals a,t,g, or c
  SITE (319): n equals a,t,g, or c
gggtcgacccacgcgtccgcccacgntccgtgatttcttcatctttagaaaacactaagacaatttgcctgaactgaatgtttaccagtttttattgctactcctcctcctctctccaaataaacaaaacaaataaatatccaagactgcaagattacttcatcttccacaggtttgcatgtacaggcatacctcggagatagtgtgcacttggttccagaccattgcaataaagtgaatactgcaataaaatgagtcacaccantttttttggtttcccagtgcaaagttatgtttacactgtattatagtgtattanggcgtgcaaa

SEQ ID NO: 2218 - DNA, 407 bp, Homo sapiens
  SITE (407): n equals a,t,g, or c
tcgacccacgcgtccgcaagaaacatcacttggaaaagtgccacggtatgaggtcattcactgaaagaacaagctaagccctgcattcttagaagttcccgaaagcatcactgaawtacttattggttcatccaaawtccttgatatcactaagaaatggtctccttagcctccttatgctctgcttaataagacagaagagtgtgtaaagtgttttagaagtactcccatttgaaataatgtttttaagccaattgcattttgttattgaaagaggtatgtttcagataactggaaagttaatttatgtgaamaccaccctatctgcattactttatccccagcaatattatcytgckgtaagaacckkaaatttatattaaactcaggkkcgtgaaaaaaaaaan

SEQ ID NO: 2219 - DNA, 605 bp, Homo sapiens
acccacgcgtccgaaaataataagaaaataagaaagttaatcactcatgtgggaaacgcctcagtggaaaccactkttaaagcttttggtgtgtttcttaacagtttattcccaggcattgaatttttgctttgttttgcctttcacataatgaacatgtaaaatgtgaagtaggatatgatgtaaaagttatcaataggatcaatcaaaaaaatcattttttagaaattctaaagtgaccagaatctccccstckccaacacaaaatcagtcctcccsrcctcccscatgtcttacacaggaaacggtgcttttaaatgtacatccagagtacaaacattgtgtatttctgcagatgttaagggaagctaaggagaaggagaagcagagactggcacagcagctcacgatggagagaaccgcgcactacgggatgctgtttgatgaatatcaaggcttgtcacacctggaagccctggaaattctgtccaatgaaagcgaaagcaaggtacttctgcactactcgtttgaaatggcatgcttagtcatgtgttgcttaaacatgaaagaaactggaaaatctgccattaaaagatctcattttt

SEQ ID NO: 2220 - DNA, 425 bp, Homo sapiens
gggtcgacccacgcgtccgcccacgcgtccgctcttgatgcacgaataaatatctctacatctagcctttgttaaaaataaaaattaatattctacaaacacctacatatactagagaggggtgaaaactgcrgctaawtcctttataatactttcagatgattgcattaagcctttcatgttatgtggcattgttaatttttcctrgatacccatccacttaagggccagagaaatccttattcatttaactctggtgggcatttatgtaacatacccaaataaaaacgttattaaacagccacaatcgcattcagtcaacttggcactgaatgtagcttctaaaatcagttctctaccctacgaatggaatgttctaccaagaaagagaagcatcaccatgtcatcttgtgttctacaccact

SEQ ID NO: 2221 - DNA, 677 bp, Homo sapiens
  SITE (12): n equals a,t,g, or c
tttttttttttntggacacaacatgatattaggctttatttgaatttaaaatcttgattccatccagggacattttttaccgaagcgtctcagagactggctcagggtatttcttgasaagactgtacagggcttctcatcatacacaaaccctccacagcccacgcgctccaacccacagcacctcctgcagtcctggagggaaaagggacagtaacatgaagtgtctgaagatccatttcacctcttttccatgtgaatcatgacgctttcaatgcatttcttgacaggattctattttgaaagaatgatgctcaatctgtaccttttatgcttcttgtttcttctccatcaataatatgtcagtcaactgcttgtcagagacacttagctgctgacaggtcctcataacctgactcaggtaaactgccaagagatgcttgcacaggatgctgtcactctttccgtagcactgagaatgcaaatgcaggacatgaacagtaatgacaagaagccaaacatgtgtatgttttactggaacttccaaggacctacaaagaaaggatagatgggatcagacctcagatgtgctggaaaaaccacctctttccctttttatttatgtagactcagagttgctctgcaaattgcaccgagacggacgcgtgggtcgaccc

SEQ ID NO: 2222 - DNA, 409 bp, Homo sapiens
  SITE (219): n equals a,t,g, or c
  SITE (372): n equals a,t,g, or c
  SITE (384): n equals a,t,g, or c
  SITE (402): n equals a,t,g, or c
gggtcgacccacgcgtccgggctgaagtgggaggatcaccccagctggggaagactctgtctttaaaaaaataacaaataaaaaaaactcctcttcactcatgtttgtatcacctcctcccctctttgggcctcttctcttcattctggccaactgccaattttgtgtcacaggattcttcacccagtccttcccatcactggctctgttccaccctgnaagttataatgtccacatttctggaggaaagaggtamtaatgtggatgttggccccacactttctgcccamcttgtggttttgtttgtttatttatttgtcagagtcttgctctgtctcccrggtgggagtgcatgagcggagatcgtaccanggcactccggcngggtggacagatggaganttgtcct

SEQ ID NO: 2223 - DNA, 875 bp, Homo sapiens
  SITE (55): n equals a,t,g, or c
ggcacgagaacattttcaggccccactcagacctgagtcagcgctcagtgggagngaccccgcacgtcacgttgtgacagctcttcaggtgttaggccggttgtcccttcgcgtccttcatagaatctgatccaggaccacacgttgcatttaattggcgtgctctttagtttcctttcttctgtacccccattttcaaggggtgcaggcaagttatcttgagaatgttcgtcaatgtgatgtcgcagccccaccgttgggagtgtacagatggcaacatattttcacacagtgtgtttatgaatgttcagagcaagccttcataatggccaaaaacgaaataattcacagtacatgaactgctagtaaatactatagattaagagatatttagaatttaaaarggaataaatgatatctactacactgtgtatgaacattgaaamcactgtgctaagtgaacgaagcargacacmagactacgtattattatatgtaattccactcggataaactgtcctttgaaaggcacatttagagacacagagcgggtcaggggctgcacagggctggaggtggcagcgggagcttcggagaagtggagcgacccaaaaccggattgtgggggtcgctgcggaactctgtaaatttgctaaaatcattggattgtacatttaaagggataatcttatagtaagtcaagtacacctcaattaagctgttcttaaaaattgactataaactaacacagcatctcagttagtgccctcagaactggagttgggacccagtagagaggtggaaagaagtgaggcctaagtgcagtgagtttgtttcaaataggtcaatcatccacgccgagccctatgcagtct

SEQ ID NO: 2224 - DNA, 229 bp, Homo sapiens
  SITE (28): n equals a,t,g, or c
tggggctttgccagaaagggacttcacnactgtcataacattttaatctctccaggcctgggacaaggtggaaacctacaggttcccaaggagattgttttcatcattagcatttcagccaaagccttaatgctgcaaaaagaaagcataatgtggagcaagagttcctgctttggcctattctgactctagctctccagggctctgatgaagtccattgtgatctagc

SEQ ID NO: 2225 - DNA, 497 bp, Homo sapiens
ccacgcgtccggtcatatagagcaatttctcaccatacaggaaggcagtaaagaccctttctgggctggaaggaggagactgggagagagagagaaaggagacaggagagaggttctcatttgccccactcgtggggttgaaatcaaggtgtggggacaggtggggtcaaaggcggctcagatgcatttaaggatctggacacagagggtacacttgctcttccttctgtctggaaatcttggacaccagctcagagagaaagacctgcacaaacaaactataaagattgagcacacatgaagttttttgagttgtaagcaaacagcatcccacatcaaaatggcaggtgtgggacaatgtgcatatccattgttatgttgcatgatccatagatgaacaggaatctgtccacatcaatggcaatggttgtgttatttatttatttatttatttattttttacacatctcaaaaaaaaaaaaaaaaaaaaaaaaaaa

SEQ ID NO: 2226 - DNA, 459 bp, Homo sapiens
  SITE (50): n equals a,t,g, or c
  SITE (455): n equals a,t,g, or c
gaaacgatactgatacatttttatattaatactaaaatacatagtttgcnttagggttcatactttgtggtgtacattctgcgggttttgacgaaggtatggtggcatatattcattgttactgtatcatgtagaatagttttagtgccctaaaaatcccctttgcgtcacctctttcattttcccctctccctgaacaccaggcaatcactaatctttttctgtgtccacatttttgccttttccagaatgtcatgtagttagaatcatctagtgtgcggtcttttcagagtggcttctttcacttagtaatatccttttaagattcctcaagtctttccatggcttgatagctaatttctttttattactgaatgatattcctttgtatgacgtaccacaattkcatttatccattctcctgstgaagttcagattgcttctaagttttgcanagtt

SEQ ID NO: 2227 - DNA, 411 bp, Homo sapiens
  SITE (341): n equals a,t,g, or c
  SITE (395): n equals a,t,g, or c
tcgacccacgcgtccgggaagatattaaacagcgcacagggctgtgctatttagctggtccttcagggtcaacgaggtggtatctcgttgttaacccaatttggagggtctttttagaagagggtcatctgttctgatccacagctcacctttttcccatttaatagcccgtgttccttctccaagccccaggctattctgaggacacgttgtggttaggcaattgaaagttacacagtctctccttgcaacctttaggaatttcacaaaggataaatccctcatttccagggaaactggcaacggggtccaacaccttcataagtkcctcagtgcaattncccaaacaagacggaaagaaaatgggaagagaaagcggagcgcttttcacaatnaggcaaactgttttaa

SEQ ID NO: 2228 - DNA, 486 bp, Homo sapiens
  SITE (444): n equals a,t,g, or c
  SITE (461): n equals a,t,g, or c
  SITE (483): n equals a,t,g, or c
agtttgctgatccctcaccttgcctctttcttcaaaatctccagtgttgagtattctccagtttccaagagacctgctttggaccactcatttagaaagtycktacgttctaaaaaaaataaaatttggttttccgtagactgctcctgctggtacttgttcaacttgagtatgttgagtaactaaaaataaatcaaatcgctcttccacatattgggcggccctttatatcttagaacaacactatgatcatgactccaggcagaatcttgcagaatcctggtgtgataaactttcacgggccttcattgtcaccagaagggagcataacactyttgcacagcttaaattgtgggcccacctaggttttctggggcgccaagagcaataagagggaagttatagcctgcattgctaacatgcttggaagaccttggagatctnaaccccaaagggattanagacgggggcccatgtggaacntgt

SEQ ID NO: 2229 - DNA, 387 bp, Homo sapiens
  SITE (355): n equals a,t,g, or c
tcgacccacgcgtccgattaaaaacagaagaaatccgaaaaaaaaactgagatctacaatctcacaaagaaataaaagaatatgaaattgctactattcaacgattagttttaccttaaaaacggcagctttatatggctaatcttaatgaattaaaacaactttgagatattatttttatcctttcatactggcaaagattaaaaaggtttgttaacatcttgaatcagcaaaactctggagaaacaggcacattaagggcagaagacaaacttgtaccatccctatggaaaggtgattttggscaattaactgttaaatgacaaayctaaataccctttgggcctagctattnccacggctagaagtttattcccacagatatta

SEQ ID NO: 2230 - DNA, 290 bp, Homo sapiens
  SITE (88): n equals a,t,g, or c
tcgacccacgcgtccgaaattttctaaattaactaagacttgtctcaaattactggggttaacattttggtaaccacagagggactcncaatggaggaacacttgaactttgacaaatcttttactggtgtttggtatcagcataagctaactttatgaatagtttgctgaggcctgggagcactccttccagagaatccctgctctcccaaagtttggttgagatctaaagtttattttgctgtacaactccctcttatttatttttttttttttgggraktttactgg

SEQ ID NO: 2231 - DNA, 248 bp, Homo sapiens
tgaactgaggaccgagtctcctgccattccgagcaggcctggtatgggtaatggtgtgaaggaaggcccggtgcgattgcatgaggatgctgaggctgtcctgtyctcgtccgtctcatcaaagcgtgaccacaggcaagtgctcagctccctgctgtctggggccctggctggtgcccttgccaaaacagcggtmmtcccctggaccgaaccaaaatcatcttccaagtgtcttcaaaaagattttc

SEQ ID NO: 2232 - DNA, 375 bp, Homo sapiens
  SITE (35): n equals a,t,g, or c
  SITE (74): n equals a,t,g, or c
  SITE (286): n equals a,t,g, or c
ctaatataaatcctaagaactcagacacagtcgantgagaacagagcaattccctttgccctcgttttaaagantcatgtacataaaaggtttgaacactttgaactttgaataagtttgaacacttcatgccttttggccactagcatgctgttattttatgtcgcaagacgagcaacaatgaggcatccacagctcccaggcgtcaagactgaaggacactctgcctctcccttagggtttgagatctctgagtcagggaacattgagtgaaagcaaagctganaatattactggggatcttcagtcttggggaaaagagttataggtgttggattaacatctagtgaaagcaagctgaaatattactgggga

SEQ ID NO: 2233 - DNA, 549 bp, Homo sapiens
  SITE (15): n equals a,t,g, or c
  SITE (36): n equals a,t,g, or c
  SITE (52): n equals a,t,g, or c
  SITE (69): n equals a,t,g, or c
aaaaccttttaattntccctagactcccccctaagnccataaattcctcccnggaaaatatccccctanatgcttttaaaaatattcagagtaacaggttcccacttataagttatgaagtttargaatggttaagtactctctgtagtctgaaaaaaaatagcattgcgtcctaaaggaagctaactttctctagaagaacaattttaacagtgggggaatctgtccccacacttgggccaatgtttatgacaaaccatcaagctcattaaaactcccagagaagaaagcaaagaggatggtacttggtccttgattaaggttttgccattgaatccttcaacctcctaccactgcttctagctgtcagttccagaatttgaaacgcggtggaagaggctagtgggtgtacagaaaaaccttccttgtgaagcagggcagtttcctcacactctgaccacaatcaaataccattaacttacaaaagacacaggctgcaaagctgaagagaaggagaattgtattccccgagacrwcctgaaacaggca

SEQ ID NO: 2234 - DNA, 452 bp, Homo sapiens
  SITE (14): n equals a,t,g, or c
  SITE (21): n equals a,t,g, or c
acctcaaaatcccngaactcnggggaacccacccgccctcagcccccccctaaagtgccggggtttaccagcccgtgagcccacccgcgcataggcccactttagattaacctttaccttatcctactgtcattcagtatcctacctgaactccctacagccgtgtagtcactgtgctaggcagggctagcaatacagaattgatagactgctgtccttgagttgaatgccttagtttatttatttctattctgtccttgctagataaaagcatttaagctataaagtttcaactaagtagagctgaaagtatctcatttattgattcagcaaatattaattgggcatctcttctgaggccaagcattattctaggtggggatttggcagtgaacaaaataaaacaacaaaagcccttccttcatggagcttgtttacaaaaaaaaaaaaaa

SEQ ID NO: 2235 - DNA, 467 bp, Homo sapiens
acccacgcgtccgtatttatttatttttgagatggagcctcactctgttgcccaggctggaggttgcagtgagccgataacgcaccactgcactacagcctgggtggcagagcgacactccgtctcaaaaaaaagaaaagtaaccttttataaatatggggctgaaaacgttatttttaaattttggaaaaagttctactagcttggaagattacttagatttattttttcttggcttatttagatatttggcctatttttaaaactataataaataattggattttaatttgatagagaatcagaaaaacagagactttatataatttttgtacattkgattcattttaaaatatakgttgtaaaattcttccagtgcaatattttttggaaaatattgttctagtcgttgtttgtataggttgtttctaattattttaaaagaaccttcaaaaataaaaaaaaaa

SEQ ID NO: 2236 - DNA, 165 bp, Homo sapiens
tgtataggaacarttgtgtaggacartgttctatataggacaatatctgaagatacattcctccatccattcttatctagcaatgtgctgagggctgggttgtaacaaccatggaacttacagtctagacaagaatggatggaggaatgtatcttcagatattgt

SEQ ID NO: 2237 - DNA, 427 bp, Homo sapiens
  SITE (385): n equals a,t,g, or c
  SITE (394): n equals a,t,g, or c
  SITE (414): n equals a,t,g, or c
  SITE (422): n equals a,t,g, or c
tcgacccacgcgtccgttttttttttttttttaagagacagaggtcttgctttgttgccttggctggtctcaaaacacctgggttcaagtgatcctcccacctcagcctcccaaagtgctgggattacaggcgtgactgctaatgcccagcctccttgcagagttattgcaaagactaaatcagagaaccaatgctgtgatgtcaggggcccctggggtgatagggcttcatgtgtaattagtggtcagaataagacgggtccatcagtctgttcccccatcctcatgcagattacagatttaagcatagggaaccctgtgctttcataagtggaaaaagtgttgaatattggcaattttcacatggtttcagacttaacaaatnccccttttntggggtcccagggttttggnaagttgtnggtgc

SEQ ID NO: 2238 - DNA, 367 bp, Homo sapiens
  SITE (236): n equals a,t,g, or c
  SITE (336): n equals a,t,g, or c
  SITE (337): n equals a,t,g, or c
acccacgcgtccgaattatcagaaagaatctatggaggttgaaaaatgtaactaatagtgtctcattctctattagtaatgtgttattctcatttatactgttgaaaaccgtttacagaaatatttaatatgattctctgcctagrgaatgagaagcttgcatctttagatcaaagatgaagcaaacaagagtttcctattgtgtgcagttttagaatttcttgcctcatggcttncatggcaggttgcagtttttcaatccttgtttggcaaaatcttgaacccatcatagtgtacttgggaaatgaatatgccatacatcgtaattttcctgtnnataatagaattttgacgggggtagaacttt

SEQ ID NO: 2239 - DNA, 513 bp, Homo sapiens
  SITE (433): n equals a,t,g, or c
  SITE (446): n equals a,t,g, or c
  SITE (484): n equals a,t,g, or c
acccacgcgtccgcccacgcgtccggccaccctagcaagcagttgattccagagttcaggcaggcaaacacaaaataaacctgaaacatcttaaagtgccaataaataaggaaaggcacagaaaaaagacatgggcttgtcaaaaggacataggagtccgcataaatgtgttcccaatggccaaagacagaggaatttgagcagcaagataaaaaatgatagcattggattttcacccacagaataacgtaatagccagaagtccatagttatataaataaataattttaagaatacataggagagaagggacaactctttcttaagtagaattccaaagaatacatataaaaggaaagtgggaaaacagaaccaccattgggggaaataactgttatagacaagattcacagattgggtgctaaaattagtngggcaacgatttnaggagaaacggaatttgcgtagtcttcaggcatatctncactttaaaatgcttattttgctaccccg

SEQ ID NO: 2240 - DNA, 424 bp, Homo sapiens
  SITE (346): n equals a,t,g, or c
  SITE (371): n equals a,t,g, or c
  SITE (385): n equals a,t,g, or c
  SITE (424): n equals a,t,g, or c
acccacgcgtccgcagcctgatggagtcttgctctgtcgcctaagctggagttcagtggtgcggtctcggctcactgcaatctccacctcccgggctcgagcgattcttctgcctcagcctcccgagtagctgggattataggcgcctgccaccacgcccagttgatttttgtagttttagtagagacgggakttkcaccatgttagccaggctcatcttggaactcttggacctcaaatggatccgtctgcctcggccttccaaagtggctggggattgacagacgcaaacatggcagatctttgtggaagaccctgcatgggcaaaaccatcacccttggagtncgagcccatggacaccattggagangtgcaaagccaaanttcaagacaaggaggtgagcccaactggaccagcagctn

SEQ ID NO: 2241 - DNA, 408 bp, Homo sapiens
  SITE (355): n equals a,t,g, or c
  SITE (371): n equals a,t,g, or c
  SITE (383): n equals a,t,g, or c
  SITE (386): n equals a,t,g, or c
tcgacccacgcgtccgacgygccgaaactgtatcaccccccactgtgtgtaccattcctaccgtagtaggacgaaatgtcattcctagaatcacaacacctcacaaccctgcccagggacaaccgcatctgaatggaatgtcaaatataactaagactgttacacctaagagatcccattccccatccatagatgggactcctaagaggttgaaagacgtagaaaagtttattcgacttgaatcaacatttaaggacccccgcactgctgaagaaagaaaaagaaaatcagtggatgccattggaggagaatctatgcctattccaactattggatacatcacgcaaaaagagantacccagttaaagaantaccagattccnccntctccagtttccagcaaacaac

SEQ ID NO: 2242 - DNA, 686 bp, Homo sapiens
cagaatccacagaaaggaaccacaggactggccacagcagtacagggaggcaatggaagatgaggccaatagagctgatgttgggcacaggcaaatctttgttcacaacttcaggtagaggaatgcatggcagtcagaggggccttgcaaggaggggcctttgagcctcagttctcatgtattggggggtgggggtgggtacatattgtatttggtatttgtgttccagttatatttatgtcttttcatatttagttctggtgtggtgtctggaaatgtttcaactgttttaatatattgtctgattgggtaaatgtgattgaccacttgctgtctctgttgtattttggtatgagttttgatagctctataaaatgttttggaaatctttccatcttgttgcattatctagaaaagaatatagcatatagctatagatataggcttttccttgaaagcttgaaaaaaattcgccagtaaaataatctagcttaaagtgataaactaacaaacaaatataacaacaactgaaaaggcactctaaattgtggctggcttccctttctgtctgctattgtatgaagaatactgatgtttacctgtatttgctttgctgtactaaaatgtaatgaaaaataaaagattaataaatgaaacataatgctaaaaaaaaaaaaaaaaaaaaa

SEQ ID NO: 2243 - DNA, 493 bp, Homo sapiens
aggaggtttgtaaaatttctgctgttcagtctgggcttctgggaagtcagggggtgctgcatataaagggcaggaaaaggagcctgactccaattgctctttggtttcttccctgaatggaaggctcaaaatcaagtttccacccagataagatcttgaggtcctagtggaccaccagctctactcctgagctcttgaaatacctctaatcaccagctcggtggctgagagtaccttcttgtccactgcctcttcttttccttctcgtcttcacttatcccccatccaacttctgcccgataatatctcccctgtattgtaaactgaggagaaagttgcacaattgtagagatgaaaaatagctgccatgtatttagcttaaattagctcagaagaaaggctccctccctccattgagcgggcagcacttgtttatgccaacatgctatttgcatcgcgccttcttaaatttgaaagtctaatgattaaaaac

SEQ ID NO: 2244 - DNA, 591 bp, Homo sapiens
tagagatgtggcccagttcagaaatgttgtcacacaattggaagctgatttagacattaccaaaagacaactaggaacagagcgctttgaaagggagagggccgtacaagaacttcgccgccaaaattattcaagtamtgcttatcatatgagttctacaatgaagccaaatacaaaatgtcattcaccagaacgtgctcaccatcgatctcctgaccgaggcctagatcgatcattagaagagaatctttgctacagagatttctgacacctgaaatgattcttcacatccctgagaaaggtcaaagttacaaactgatttttttttttttgctacatgagtgcatttatcttttaaatgcttggcaatgttaaatgtatttattaactttgtgtctctgaatctctgttctaatgtgccatgttgcagtgatctgagatgacttataaaaacaaaaatgtatatggctctttctatccatgcagtgatagtgagtgtaaaatctgcttacttcactattgaacactattctgttcactatctggagtaaataaagaagcttattaaaacaggaaaagtgtttttacaaa

SEQ ID NO: 2245 - DNA, 359 bp, Homo sapiens
ttgtcccggcccctgaggcgcaggcctatcagcctcctgtgtcttaagcagagtggagacgggggtggatccaggcgcaccagttccacgccacaggcttctgcagttcctgcaaactgttcccatcccgccccgcgttgcacgtcgggatttggagttcgcgatgctgagagctgtttccacgtggcgattccgacttgacccgtcgtgctccggcgcccgcctagggggaccgaggagtttgtcatttcttgcctcgttagggtgcggaacgaaaaccatttgatttatcctagaaaaggaaaggctgaagccaactaagtaaaagttttccattaaatgaatgcacgttgtaaaaa

SEQ ID NO: 2246 - DNA, 555 bp, Homo sapiens
  SITE (542): n equals a,t,g, or c
  SITE (548): n equals a,t,g, or c
gttctacacgagttcatcgatgtgtacttcatcgccaccttgtcattcttgtggaaagtctccgtcatcactctggtcagctgcctccccctctatgtcctcaagtacctgcgaagacggttctctccccccagctactcaaagctcacatcataggccgtgcgttcgctggagggggccctggtcttggcgcttccctgatggacagagctcaagttccatttatattaaccgccacctgtggattttgcagtaattgctaacacatgcagttttaatgggaagyggctctgcgcctaaacggagtcctaacgctgcatcaacgggagggagggtcctgaaagagacccatctgggcctgtctgaacccctcgttcttcatgtttaggtgaatatgaatatgttaaagctggtggctcagctgggagatttatatgggtcactgtgcgagcttccttatgacttgaattttgttgtcacatgataaaagtttctgtgtagctgaaaaaaaaaaaaaaaaaaaaaaaaaaaaaaaaaaaaangggggnccctttt

SEQ ID NO: 2247 - DNA, 486 bp, Homo sapiens
gctgctttttcccttgttttttttttcttccttttaaaacaaagcagcgattcattccctctcccccagcagcgcggtcgggtgggatgggcaggcgagaaggccgttttcctagcactgacctacgggtccctccctgaaacgcggtgtcagatggttactgattaatattttggagaggccgcggcggcaggcagcgggtgagtctctaatcttctaaaaggggttcctatagaaacgcggagcggggcgcgccccccgctcggcccaggcccgggctgcggcgcttcgcacagcgcgcccctccccaaagcccctctttgcgtgggcgctcccctctccttccccccccgccaacaaaaaatcagagcagaaaaaaggattagatcggctgagcgcgaactgaatccctctcgattctgacatttcagcctattagcatttctccacggagccttctgaaacctattaaagtgtaatattaaa

SEQ ID NO: 2248 - DNA, 252 bp, Homo sapiens
gcggacgcgtgggcgagtttgaagatgacactttgaggcatcgtgtctatggttcattactacagaagcttctctggatgtgtaaagcacaggaaaccaggcagaggaggcacagggtgctctccagaacgagaagccagctcctggagttgtttgctgcaactgccattccccgttgatgaccatgctcttccttcagaagagggagagtgagaggaccaagtccaagtggttcccatttgaacatttaaa

SEQ ID NO: 2249 - DNA, 386 bp, Homo sapiens
  SITE (374): n equals a,t,g, or c
  SITE (379): n equals a,t,g, or c
ggtagcatggatatttgcagatgcatatacattcataaagatacatttcatttcatcagctttaatctctagtaaaattaatgtggtatatgtatcctactcaggatactgaaatacacacatgcgtacacatgattagtttctgttgcatacatatttacaacaatactagttcttaacgtatgttttactttcatttaataatgttcaactttggaaaatacttttgattatttgctaagaataaggaattcagcgctgcttgaatacagctcaaatttgttatttgccacacaagtttacatatatgcatttaataaaattttatagtgatttaataattcaaaaaaaaaaaaaaaaaaaaggggggggcnggttntaaaaga

SEQ ID NO: 2250 - DNA, 444 bp, Homo sapiens
ccattaaaaaagaagaatagatttgcattcagcaaaaagctaataaacgtagttgataccctttaagttatgacttgcttctgaaggttaagataacacatgagattacaggcatgagccaccacaaccgtcccactattttactttttaaaatgacattcctactgattgatttttatcttgctataagttcgatgacaccgtgaatctaataaggttcactgttgacacagtacaagttacatagctaaaatacatagcattgaagactaattttaaggattgacaagagtttattttctattgtgcaatatcttaaaggaagcaaccacctttgggaaagtgtatctgctgctcctagggccatgcttgtatacatatttaaataaacatattcatttacccgaaaaaaaaaaaaaaaaaaaaaaaaaaaaaaaagtcgac

SEQ ID NO: 2251 - DNA, 437 bp, Homo sapiens
  SITE (136): n equals a,t,g, or c
accccctcaggtcccaggagctgaagtgagcatccactcagttgaccagaaagcatctagaatgtgtcagcgaaaggcactggaattatcattccttcttgagaaggaaagaagaagaaagaagaaggaggaggcnggagcaggaggaagaggagcaggaggagcaggacaaggaggaggaagtcttcttcccttgaggaattcttagtctcctgggaaagatagctctttatactgataatatgccacattttcttatgggtcttgatggacatgcacaaagtttaaaaatatcacaaaaaggagagatgattgagagtagctgatagagggtgaaagcagactttacagggtactggatgccgtaatagagctgtgagcactaaactggaatgtgccaaacacaagagagaatcgtggtgcccttcctggtagag

SEQ ID NO: 2252 - DNA, 429 bp, Homo sapiens
tagggtcttggtttgaatccagactagaaaatcattacttattaaaagccttgaggatatgggtctaggaaagtctatgtgaagagataatagkttggaaaaagttttgcagaactaaagaaaagtttccacagttaccttttctgtcctaatgtagagcatctttgttaactaggtcttggatcaatccaagctgtgtctgagaataaccatttataatttctcactggccagcactaacaccctttagaaaaggaactcaaagcagccctagcagccagagtcatgcgatcatggtgggagtacagctcctcaccaaggtcagctcctcagtgaaatccatgccttctggaggactgcttgtaaataaatattaagcacaaccattaaaaaataatttggctgtgaccatcaaatagtgaaaaaaaa

SEQ ID NO: 2253 - DNA, 809 bp, Homo sapiens
  SITE (61): n equals a,t,g, or c
  SITE (128): n equals a,t,g, or c
  SITE (141): n equals a,t,g, or c
tgggtcaatctcaggttccagtctcagaaactgcaggttgttgtcacctttctgcacatgntcaaccccaaaatgtggaagtgttgtcaggcagggcagatctctactctcaagtatgaggggaatanaacaaagcagcantttagccagggttcaatgatagagtggaggtaaattaagacctccaggctgtgattcaccatttgagacattatacataatttgtttttgttataagccatttgaatttttaaaaaatttcatacatgcaatggaatatagatatgtatatacacatataatatatatgctaaagtataaagagtaataataatgacaataaacaaacccctgtgtgcctaccacccaccttattgcctttcctttgaggtaccgtgtgcggtttcctgaacctatctctatccctgtctgatagagggaacccctgtactgaactttgtgttgaccatagccttcttgtctttcatcactttatctccatgtatgtatccttaaagaataataaatggaattaaactgaatgtattcttctgtcacctcctttttatgttcattgccatcggagttttttcactgctaaatattattccattatgaatatatcacatgttctcttctccagctggtgcttattgaactgcatctttgtttgaaatagaaaaaggtaatgttgctctgaatattcttttatgtgacttctggtgtacatactgaagaatggatgtataccttgaataggaattgctggttwatacaataaaagcacatcatcagttttaaaaaaaaaa

SEQ ID NO: 2254 - DNA, 249 bp, Homo sapiens
cggcccagagcccagacccaaaaggagtgtcaaaaagtccaactaaaaaaatcctttcaaaaagggatgggccgggggccagttccctttggactcaaagtgtycagtgtctcaragggtaratgtgtccaaggaatgacgkgcagtttttgactatttccctcccctgacctctgcccttttacataaagcaggttggagtttttctcmtttccaaaaaaaaaaaaaaaaaaaaaaaaaaaaaaaaaa

SEQ ID NO: 2255 - DNA, 556 bp, Homo sapiens
  SITE (163): n equals a,t,g, or c
  SITE (539): n equals a,t,g, or c
ggagatggagtcttgctctgccatccaggctggaatgcagtggcgttatcttggctcactgcaacctccaccttcagggctcaagcgattctcctgcctcagcctcccgagcagctgggaccacaggtgcacactgccacgcccggctaattttttgtatttnagtagagacagggtttcaccgtgttgcccaggctggttttgaactcctgagcccaggcaatatgcctgccttggcctctcaaagtgctaggattacaggtgtgagccactgcacccagcccatcttctgtattttctaacccttcccaaggtttacctcaggattgtaattgtctgtggatctgccagatttcccaacagaccatatatttcctaacagcaaggactatgtgtcattcggttttctatccccagtgtctaatcccatgtttttcacataagaagcacccattaaaatttgttccttagttgggcatggtggctcacacctgtaatctcagcatttttggcggctgaggcaggaggatagcttgagnccaggagttcgagacca

SEQ ID NO: 2256 - DNA, 583 bp, Homo sapiens
tttatttatttatttatttttatttgagacggggtctcgctgtggtatgatcatggctcattgcagcttcaaccttccagccaagtttaatttttacaccaatgattcatttctgcttttacaggtgattactttatctcactagaaaaaaaaaatgtaaaaatctaaacaaaaagtgtccaaaacttacaataagccttaatctcgaataattaccatgacatgtgttacttgtgtgcttattgctgtacagccttctttggctttctgacaagagcaactgctgagcagaagcacttcagcctcgtctggcatttgatgaatttgattaatgtgtgctatggtaagtctattcccctgtataattttatgggagaggccatgtgcaagtctgaatttaaaaaaaaagaaaagaaaaagccttgtgcagaattattacctactcaatacattatatatatgccagagatggctaaagcagctatatgtcaaggtctgcaaaaacatgaagaagctggcatggaaattaacacgttggtggtctgcaatgtgttcaaagttggtgtttttaatgacacttaaa

SEQ ID NO: 2257 - DNA, 338 bp, Homo sapiens
tcgaaaaaaaaaaaggcaaacaaatttatctgtatcaatttggaattaaaagatttgtgtgtatagattttttgttaaaaatagaagaaatagggggagggtccttttctgaaatctgagaatgatagggatgatgactatcaaaacccaggcctgtgactggcttgtttaaaaacaaaacaaggccggcccggtggctcacgcctgtaaatcccagcgctttgggaggctgaggcgggcggttcacaaggtcaagagatggagaccatcctggccaatatggtgaaatacagtctctactaaaaatacaaaatttagctgggcgtggtggcgcgcgt

SEQ ID NO: 2258 - DNA, 1119 bp, Homo sapiens
  SITE (418): n equals a,t,g, or c
gagatggagtctcactgtgttgcccaggctggagtgcagtggcgcgatctcggctcactgcaagctccacctcccgggtccacactactctcctgcctcaacccctcaagtagctgggaccacaggcgcccgccaccacgcccggctaatttttttttttttttgkatttttrgtagagatggggtttcaccgcattagccaggatggtctcgatctcctgacctcgtaatccgcccacstcagcttctcaragtgctgagactacaggcataagccatggcacctggscaaccacaatacttktrrraggraacatatgagaaaatcttcatgacctktgcttagrcrragggctcttaggtgtgactctgwaggcacaatccatrcgagrargaratgacaagttgaatgtaaatntrraaaraaaragtcctgattgggcacagtgrctcacgcctgtaatcccagcactttgggaggccgaggcaggcggatcacttgaggtcragagtttgagaccagcctggccaacatggtgaaaccccatytctactaaaaatacaaaaaaatcagccgggtgtggtggtgcgcgcctacaatcccagctaccagggaggctaaggcaggagaactgcttgwacccaggaggcggaggttscagtgagccgagattgcctcactgcmctccagctcgggcgacagagcaagacgctgtcycataaaaaaaaaataagaaaaaaaaagagaaaaggcaaagctattgaagacggagaaagatccagcggttgccaagtgttgggatagaggtggggtttgacttcaaaggtgaaggaactaactgttctttacccttatagtggtgacagttacaggaatctatgtatgtgttaaaactgatacaagtatacattttaaaaaggtcaaacttactatatataatatttgaagataatgaaaaagggaaaaatgtaactaatgctcttttaataactccactgctatttctatttttattgaaaattaccactaaagcaaagacagtttctaaaaacaataaatgtattacaattacagaaacataatcctagcactctgggaggctgaggtgggctcgtgcc

SEQ ID NO: 2259 - DNA, 559 bp, Homo sapiens
  SITE (492): n equals a,t,g, or c
  SITE (502): n equals a,t,g, or c
agttctccccaagacggcgattactctccagacaactcagcccagccgggggacagggtcatttgcttacaggtacttggagcttctgaaattgaggccagaggtggggaaaactgggaagaatgtgtgggttgggagggctgaaagcacatggcagacattcatgatgaaactgagatgaccttttggaaaaagattctgggattgttttaaaaactaacaggagattcatgaggtttagtcttcaggcaactggctttagcctggggcttccacttctgttttccttgcatggcttatgaattaacttggggtttgggctggcaaacctgctccttcttagagcacagatgtcattatctctctggaagtatggccttcttggaaactttgtggttcccatacatataacaagacaagcgtgaaaaaaaaaaagactttaagtgtggttttacttcgtttcttgtttactttattaatctttcctttttnatggcttttntttttgagaccgagtctcactctgtcactcaggctggagtgcatggcgaaatctcag

SEQ ID NO: 2260 - DNA, 304 bp, Homo sapiens
  SITE (242): n equals a,t,g, or c
ggcacgagtcatatgctggagtttcatttttaaagcagttgaatcaacaaggtatgccttcattaattatatttattaggtgtttttaataatctgaggaatcttgtaaattgaatgctgtattacagtaaagtgaacttttttwatttagacaaatgatctaacccagttaagcatgcgtagaagaaagcctgggaagaaaaaaaacactaaaattttatagtagcatggttgtagttttnatctaccttgttttcaacagtgaggaatgtattccttctgtaatcaactgatttagcttttc

SEQ ID NO: 2261 - DNA, 1055 bp, Homo sapiens
  SITE (419): n equals a,t,g, or c
  SITE (712): n equals a,t,g, or c
  SITE (751): n equals a,t,g, or c
  SITE (952): n equals a,t,g, or c
  SITE (957): n equals a,t,g, or c
  SITE (993): n equals a,t,g, or c
ttttacagtatatcacggttttatcacacaaccccggacagtaaaacacacagtggtgagaaatatacagatcaccgatcctttcaaattcggttgcagagacttgaaaggtctgtatgaggacattagaaaggaactgctcatatcaacawcagaacttmaggaaatgtctgagtactactttgatggraaaggraaagcctttcgaccaattattgkggygctaatggcccgagcatgyaatatycatcataacaactcccgatccgatgtccarttttcacaagctgattgctgagaaggttctaggcggcgtctgttaaaaagcattgctttctgttaattagacatgtgcaagccagccagcgcgccatagccttaattgcagaaatgatccacactgctagtctggttcacgnatgacgttattgacggtgcaagtcctcggaagagggaaaacacacagtttaataagatctgggggtgaaaagaaggctgttcttgctggagrtttaattctttctgcagcatctatagctctggcacgaattggaaatacaactgttatatctattttaacccaagttattgaagatttggtgcgtggtgaatttcttcagctcgggtcaaaagaaaatgaagaatgaaagatttgcacactaccttgagaagacattcaagaagaccgccagcctgatagccaacagttgtnaaagcagtctctgttctaggatgtcccgacccagtggtngcatgagatcgcctatcagtacggaaaaaatgtaggaatagcttttcagctaatagatgatgtattggacttcacctcgtgttctgaccagatgggcaaaccaacatcagctgatctgaagctcgggttagccactggtcctgtcctgtttgcctgtcagcagttcccagaaatgaatgctatgatcatgcgacggttcantttgnctggagatgtagacagagctcgacagtatgtactanagagtgatggtgtgcacaaacaacctacctcgcccagcagtactgcctgaagcaataagagg

SEQ ID NO: 2262 - DNA, 609 bp, Homo sapiens
  SITE (506): n equals a,t,g, or c
  SITE (527): n equals a,t,g, or c
  SITE (581): n equals a,t,g, or c
ttcccgaaggtacccctgcaggtaccggtccggaattcccgggtcgacccacgcgtccggcttttttttcttttgcgcctaccatgagatgtcaattaaggatttgagattattaaaattcaactatatctcaaccccacctgcctaatagattataagacactcttaattgtaagatggatccagatttcagagaggttaaattgtgaaaaatgagcattttagagttgatgaaatagggtcttggaaataagaacccagagggaactcaatatccagtagagaaagacataaataattaaaatatggtattttgagtgcttcccatgtgctaagcactgtgctaataaatgataatgatacagacatgagcaaaacagacacagcccttccttcatggagctgcattctaacagggaaaacmgrcwttaagtaaaaaactattaaattggaagttgtaattaagaccaagaggcaggattagargggaactgkgcttgkgggancataaccttaggggaatttcntcctagctatgaracctytgcaatggcttcctgaracggaaggaaaacaggtgntagctaggcaaagggaggtgctggagga

SEQ ID NO: 2263 - DNA, 416 bp, Homo sapiens
  SITE (21): n equals a,t,g, or c
  SITE (28): n equals a,t,g, or c
  SITE (386): n equals a,t,g, or c
  SITE (405): n equals a,t,g, or c
cccctagtagatctcccttgnctatagnaggtacgcctgcaggtaccggtccggaattcccgggtcgacccacgcgtccgattttttcctggttcttttatctttctaatgattccttattggttttcttcataggaatcttttctgtgagactccctttaaatactggggttgcttgcaggtttgttatttcttctaagttacatctttatttttggagatttcatctattcttggggggcggttaattttaattttttaaaaaaaatttataaagtgacggggtctcactgtgtttcccagactagtctctcaaacttctgggctgaagtgatcatcctgcctcagcctcccaaagtgttagatgtgagccactgcacctgggncttattatttaataatgantataataattt

SEQ ID NO: 2264 - DNA, 794 bp, Homo sapiens
  SITE (17): n equals a,t,g, or c
  SITE (548): n equals a,t,g, or c
  SITE (590): n equals a,t,g, or c
  SITE (689): n equals a,t,g, or c
  SITE (718): n equals a,t,g, or c
  SITE (727): n equals a,t,g, or c
  SITE (777): n equals a,t,g, or c
aggtacgcctgcaggtnccggtccggaattcccgggtcgacccacgcgtycgatttaatgagcattcaggyccagactgtgaagactctggaaatgagaattttgtttcctatctcctgtgctgtaacaaaagcagcttaaaaattgcagtgtatagacctcaccttttatcatttttttttcagatttttaaatattaatattaagggtctttatctcagatgtttgttgtttaccaggtcatcagtatctggacgctggcagggtccttagcaatggagggagggagagggggtccagcctgcatgattggatcagtgttgaacctgtcccacctgtggggaagaggcagcatgcggagcagacaggtgcctgctgcaggtcakgagagctggccccaagtcctgacttggagggaaatggtacatattaatatcctttagtgccaggtactggcgtagctagtttatatgcatcacttgagcccccttgcatcactggcatcacttcaagatagacaacaaggggaatgcacatcatatccctgntcactggcgttcactggtagggaaactgaggcttaataatgngcccaggtacacacagctgataagtaaccctgcaccctcgatctcacagcatgacattggaatccacctcattagacagagctcaactgcctattctgncaaaaatggtgagttggatcaactgcagnggctggagnattcctagacatttctggggattctcaaaaggaatcttttgaaagggggnccatttaagttaatttc

SEQ ID NO: 2265 - DNA, 765 bp, Homo sapiens
  SITE (627): n equals a,t,g, or c
  SITE (733): n equals a,t,g, or c
  SITE (760): n equals a,t,g, or c
tcgacccacgcgtccggttcagcatacagatgagattgtttctcatatacactccccaccaactgttagaattgtcaccctcacacatggacagagcccactggtgaggccctgaatctcacacacacacacagtctacagttaaaattgtgactgtcatatgtgaacatctggctagagttgaaataatgacttatttctaaatccagttcataggtgagaattctacctgtctaagcctaggtaggatagtcaacatgtccctaattggctgggggacatgttgactctcctacctgggcttagggccaaacagttcaggaagggatgaaggctctcagctctcatgcacagatccagttggtgagattgtcactagcatacttagacccaacatactctgatacctagaactgggacatgtgcaggatttttaattactggaccttcctgyaggtktgattgtgacatatgtytttkttacacacctgagtggtttgatgttcctgccttggttcaacccaaagtgaagattgtgatgtgtcactggacccagcatctcagtgatgtgactcttctttttggacaccacaaattttgggtattgtcaaatattgctgggwtccngtacccatgttatgtgactctccaacctatgtcctgcatgttgtgccatatttgcagcacaatgtgtcacattaggacatcattacatattgctgggggtcaacancccagtgatgtaacattttccgggggncttga

SEQ ID NO: 2266 - DNA, 606 bp, Homo sapiens
  SITE (363): n equals a,t,g, or c
  SITE (436): n equals a,t,g, or c
  SITE (606): n equals a,t,g, or c
gggtcgacccacgcgtccggtccattaggccccaggctccctggcagtaaattcatagtctctctgtccaaagatgtcctgagccccataccagcacaccatctacttccaccctgtagtgctgtggttaggactaaattcccccagtcaccaaaaagtgttcatgactttcccaagcaaaacaaaaccccaaacaaaagataactctgttatatttcatggcttttaaccttttttagtatatgggttgctgtcatttctactttatgrattcatcaggagcatattataaagttcaaaaagttaggctgggattacaggcgtgacacctggcacctgggcctacgtattaggctttatgtnaagatgtacatagtactccatgactccttttcctttttcctcctattgaaaactgtttcctatgaaactttanaaaattaattcaggagaaggaggagaggggtgaggaaacataagttattccaagcttgcaccacattcaggcttaattcattgggtcactttggttgctgacccttcctcatagttgtttgggtattgcttcggattatgtggggtctggttacaggttttggtcccctn

SEQ ID NO: 2267 - DNA, 701 bp, Homo sapiens
  SITE (65): n equals a,t,g, or c
  SITE (93): n equals a,t,g, or c
  SITE (98): n equals a,t,g, or c
  SITE (116): n equals a,t,g, or c
  SITE (662): n equals a,t,g, or c
  SITE (665): n equals a,t,g, or c
  SITE (675): n equals a,t,g, or c
gagatttaccggtggaggttatgccccgcattcaccggcaacttcccagcctgggccaaccagantggagacccttacctcccaaatttcccngccancaaaaaggggaatccaanttctgatacatgctgcggacacaggtggaccttgaaggcattgttaagttcaataagcccagtcacaaaaagacaaatgctatatgattccaattatatgaggtatcgaaagtcatcaaattcatagaaacagaaaatatagtggtggttaccaggagctgtgaggaaggggaaaaagaggttgttgcttagtaagtgtagagtttcagatttgcaagatgagaatgttcagtagatctcttttgcaacaatgtgcgtaatgtttaataccactgaactgtgcacttaaaagcggcaaagatggtaaactaaaggtttttttatcacagtttttttaattaaaaaaattcataggataagtcttcaataaagatttggcaaatgattaaaccaatcaatcaatgaatgaatgaacaaatgagctaattggaaatgttaacaacttggcctctcttcctgccgggatgcctacctctcatctggagtggtgttttttccatactgtcctcttgaaccaaattccctgacacctggtgtcccccccancgncaattatgtnctcctggtttccatccccaacaggga

SEQ ID NO: 2268 - DNA, 608 bp, Homo sapiens
gatttcattttgttgcattcatcctgctcacgagacacaggacagcctttcctgcctcagggaagaagagagagacagactacagtgatggagacccactagatgtgcacaagaggctgccatccagtrctggagaggaccgagccgtgatgctggggtttgccatgatgggcttctcagtcctaatgttcttcttgctcggaacaaccattctaaagccttttatgctcagcattcagagagaagaatcgacctgcactgccatccacacagatatcatggacgactggctggactgtgccttcacctgtggtgtgcactgccacggtcaggggaagtacccatgtcttcaggtgtttgtgaacctcagccatccaggtcagaaagctctcctacattataatgaagaggctgtccagataaatcccaagtgcttttacacacctaagtgccaccaagatagaaatgatttgctcaacagtgctctggacataaaagaattcttcgatcacaaaaatggaactcccttttcatgcttctacagtccagccagccaatctgaagatgtcattcttataaaaaagtatgaccaaaaaaaaaaaaaaaaa

SEQ ID NO: 2269 - DNA, 677 bp, Homo sapiens
  SITE (40): n equals a,t,g, or c
  SITE (666): n equals a,t,g, or c
gcggacgcgtgggctgattgcaagtggcagtaaatgtcantgggacatttgcctttctcccttaatgttgggagaggtggagattgaccagcataggtaccttagacatgcagctgttgaaagtcttcatgttcaccagccaaattacaattttatttctgaattttatgtaatgaatagactgttatcaaaactaatgtactaacattcctgtttgtttaattaatactttaaaagttaactatgaataatagaaaaatatattaatagaaaaaattttttaagttatatgtgttatttgtaggagagaagtatggctacctttcacttccaaagccaatggtaagtakaakaattatgtacattgcagaatgtttttattcagaattcaaattatgctcttgttgcctgttgctgctcccctctaccacaaataattgacatgacagaaaaaagttaggatattaatgttgacttcagagttgttattctgggtagcaatctagttgtggcttacactctgaatatttgttttaggtttgggggtttgagagaataggtaacataatttgtgattaataaaaagccatatcccagtaataagcatcataaaaataaataaataagccatatctgaagtcagaagttgttttgttcctccaatcntggatctactg

SEQ ID NO: 2270 - DNA, 545 bp, Homo sapiens
  SITE (359): n equals a,t,g, or c
  SITE (493): n equals a,t,g, or c
  SITE (544): n equals a,t,g, or c
acgcctgcaccgtaccggtccggaattcccgggtcgacccacgcstcmggtcggttattggaaaacgatcaaggcccaaagatggtttacgtggcgttgtggatgttatcaccgttgtttggtgaccgagcctggagcttgagccctgggacgtcttgccagccgcatgtggtcccgtgcccacttctcgcggtggcgcgttaatccacctagactgtgcattggtccagtctgggttgaccccgacccgaagtggccctttccttcgcgtcctgaacttcgcttctccgtcggtgtctggtctcttcccgccggcgggctctgcggtggcgggaggagctgtactactcgtgccttancgcacccttactttcccaggccagaaacgcgaaatgctgtcggccttccagaggctgttccgagtcttatttgtgattgaaacagtctcagaatacggagtcctgatcttcatttatggatggccctttctcanacccttgcgatgctcctgatcgggacagtgtctttccacctttggatccgna

SEQ ID NO: 2271 - DNA, 479 bp, Homo sapiens
  SITE (377): n equals a,t,g, or c
  SITE (391): n equals a,t,g, or c
  SITE (393): n equals a,t,g, or c
  SITE (419): n equals a,t,g, or c
gggtcgacccacgcgtccgcccacgcgtccgcccacgcgtccgaattggcacactttttttagaatgggccagatggtaaatatttatgcttcacggtccatacagtctctgtcacaactattcagttctgctagtatagcgtgaaagcagctatacacaatacagaaatgaatgagtgtggttatgttctaataaaacttatttataaaaacaaggggaggctgggtttagcctgtgggccatagtttgtcaaccactggtgtaaaaccttagttatatatgatctgcattttcttgaactgatcattgaaaactttatgaaacctaaacagaaaagccacataatatttagtgtccattatggcaataattcacnttgcctttgtgttnantagtccaaatacttaccttgggagantacttaccttgggaggatggtataaaatttcccaggcagagttccgggtatagggaaaag

SEQ ID NO: 2272 - DNA, 444 bp, Homo sapiens
  SITE (444): n equals a,t,g, or c
gtagagctctgtagttagactgctttagaatcccagctctaacacttacgaactctgaccttgaacaaatgacttacctaagagctttcttcatctttaagttggtgataataatagtacctatctcacacggctattgaggttaaatgatgtaatgcatgaaaaacatagcttggtacaaactaggtacttactcagtaaacagctgttaataattattttctccctgcctccaggattttgattttctaagcttgatgtttttggaagtcttcttgattagaaagatgttactatatttgaaaagggaatagagtcaactagagtcatattgcaaattttatgtgtctgcagagtgtaatgagaatttgcagcatatgtaaacaagtagatttatttttcygaggtaggtccakggatggttaacagtggtttagggaaggn

SEQ ID NO: 2273 - DNA, 561 bp, Homo sapiens
  SITE (355): n equals a,t,g, or c
agaaaatttaaattagcatgctccaccaaaaagccccagcacatttagcccatgatttgacctgcccaatgggagtcttccaaatcatttaagaacaagtaagtactattaattaaatgaacttgggagaaacatatcaggatgtgcttccaaatctgaaggkatttgtgctgaaagaatcatctgttgtgttccatgagttttatgggggactctgtctggtttggctcaaaagcatttgtcaggtttatactcctgagggtggggtatacacagtgtgaactgggcaggcagtgaataagggaatttctggagaacagacccttaaggaaaagaaagcctccgctttggggtntagaatggccagtgtatgttgrgggcaagtcttttcagggccttctgtggtttttgtcctgggtgagcttactkctttctgatgtaatagccaaagctkgaaatcttkcagtaatktkcagagagggatttttktccctttgggattagccttcttaaggatataaatatataggcaaaagaccccgggggctactttaatttgat

SEQ ID NO: 2274 - DNA, 408 bp, Homo sapiens
gaaatttttttttttttttttttgcttttttaaagaaaaatcaagtttattgtggcatcaaaatattgacagagctgttatcagtcaagagcagtcttcttgttgctaaaacgaagaggcagcctgagcctggctccatccaaccacctcttctaatgctctttaactggcagtgcttcctataaatgacaccaagcaatagagatgattattgtttccactgaatagagtaagttccttgattggtttaacatatatagactgcctgagagawtaaaaacatcaccatacaataggttaacggtaaatcaaggtcttcgtagttgtgatgggagaaaagggttggctgctggaaacagtatggtgccctggaggctgcgtacgtacacacccggacgcgtgggtcga

SEQ ID NO: 2275 - DNA, 295 bp, Homo sapiens
tcgacccacgcgtccggaacaaggagctagggatcccttctcaggttctctggatgtgatatccctcagtgaaaactggaatcatgttaatctcaacgcccgatgtagaatttcatgtcaagtctcaatagtkgattttctaaaccacacaccatctataggataatatccccattcattcattcattcattcattcattcattcatctgctatgggctagcactgcccatgcctaaacaaagacataatcttacagagcttagagtctagcaacaccattaccaccaccatccc

SEQ ID NO: 2276 - DNA, 974 bp, Homo sapiens
  SITE (338): n equals a,t,g, or c
  SITE (808): n equals a,t,g, or c
  SITE (875): n equals a,t,g, or c
  SITE (893): n equals a,t,g, or c
  SITE (966): n equals a,t,g, or c
aagccttttgacatagttcagcccttacagatcatcagtgaattcatactggagwaawaccctatgaatgcaaggcatgtgggaaggcctttagacatagttcatcctttaccaaacatcagcgcattcatactgatgataaaccctatgaatgtaaggagtgtgggaattcctttagtgtgttgggcatcttacttgccaaccgaaaatttacactggtgagaaatcatttgactgaataaatgtataaagtggttttttttttttttttttcacaggaaaatactgtggatggatttaataggtaatcaaggcaattcagtatctccctctcttanagtctgtttttagacttcatggtcattctgtatgtagacgtagaattgcttagtcatagctgatatatacttatagctttgttagatgttgccaaatatttctcctttttatgttaaaaagtttttttcatgagtttctcatcctggcatgttttgtttacaatagcttttgatgtttgtattattgctcttttgactattcagttttttaattgtaatattacttcaatatcttttctgcattgtaattctttgcttgtgatatctatacttacttattttcctccacagagttagcactcctagtcagatacaatgtatttttacagtcttacagctcatcattttgtgtaatgttsttgttttgttttgttttaaatgatagaagtgtgatctcctttccattttcatccaattgttgacttctctttaaatttctactttattttgatacaacatattccccccanaaaaacacatacataggaactggttatattccaccataacacacacacacacacacacacactatanacatatagtgtatatacncatatggtgtatatagtgtatgtggtgatgtatactaagcatatcacatatacgaaatgggggtataaagggngtgatgta

SEQ ID NO: 2277 - DNA, 426 bp, Homo sapiens
  SITE (352): n equals a,t,g, or c
  SITE (397): n equals a,t,g, or c
  SITE (409): n equals a,t,g, or c
cacgcgtccgcggacgctgggcgagtgattctcctgcctcagtctcctgagtagctgggaccacagacgtgcactaccacacttggctaattttattttttcagagatcacatgtggtttgagggaggatagagaggacagggtgtcaagaacagcatttttaccaagttgatataaaaatgaaacaggatccaggcatgggtctttacactgatagttacagtaagttttaaaatctgagcagcaatttgaatcacttgttgaaaaacacacaaaatatattttttgtagaggtgggggtcttgctctgttgcccaggctggtcttgaactcgagattctcctgctttggnctcccacaagtgctggggatacaggcgtgactaactgcacccggnctgctttctttntagtgaaaaggatctgt

SEQ ID NO: 2278 - DNA, 511 bp, Homo sapiens
  SITE (462): n equals a,t,g, or c
  SITE (503): n equals a,t,g, or c
tccgattgaaacgttcatgtccaactgtttttcaccttttctaatgaaagtattctccaaagaacaaattggaatgcttccaattatagttgttcccccttatcctagggggacacattgcaagactccccaatgaatccctgaaactgaagtctgtatacactgccgaagcctaagtataccatgttttttagatctaataaccaagatgggctgatagcgtatacagcatggatacactggacaaagggatgattcacgtcctaggcaggagggggcaaactttcattttgctactcagaacatgctcttgccccatttaaaacttaggaattggccaaagtgctggggattacagggcgtgacacgcggcacccggccatgktttttgatattctgaataaaaaggrtatwgcagttgggataggsttgggtcttgttcctttatgttcttgttccttncctcatgataattcaaatcttattaggaaataagggtgctnaggattac

SEQ ID NO: 2279 - DNA, 369 bp, Homo sapiens
caccatgcactggctaccaacttgtctgagtccggtgggacagaacactcatattcacaagttacatgaagcagatttattacttacagataggagcaaaggacaacagaagcctggtcccccaagcctcaggaatgctgcccaaggtggataatgccttgactgtgtatgcctcacttgcactgcagcagtgggaccctggaagtagcttggcttgggttttatgacccagggcaatgtgatcactgggctaaagcacttgaaggacatcctgttccggggcgggcttttggggggatttggaacagagcccaaggaagttcttggctaagtcccttcctatgtcaagatattacattccagcacatt

SEQ ID NO: 2280 - DNA, 635 bp, Homo sapiens
gaaatactctcatgtgattctaggagataaggttaccaagaattcttcaggcatcatctcagaaaatcaggcgaataactttgttgtgccaactttggatgaaaatatatttccaaagcagattagtttgcggcaggcacagcagcagcagcaacagcaacagggaagtcgccctccaggcttgtctaaatctcaggtgaagctaatggacctggaagactgtgcactttgggaaggaaaaccaaggacatacatcacagaagagcgagcagatgtatccttaacaactctacttacagctcaagcatccctcaaaactaaacctatccacacaatcataaggaaacgagcccctccctgcaacaatgacttctgtcgactgggttgtgtatgttccagtctagctttggagaagcgccaacctgctcactgccgccgaccagactgcatgtttggttgtacttgtttgaaaagaaaagttgtacttgttaaaggaggatccaaaactaagcattttcagaggaaggctgctcatcgagatccagtattttatgatactctgggagaggaggcaagggaggaggaagaaggaatcagggaggaggaggaacaattgaaagagaaaaaaaaaaaaa

SEQ ID NO: 2281 - DNA, 577 bp, Homo sapiens
  SITE (510): n equals a,t,g, or c
  SITE (515): n equals a,t,g, or c
  SITE (551): n equals a,t,g, or c
ggagtactttggcaaaaaaactggggactgtcttaattgtaaaaacatatagctacattttactgtttttctcacttctcttgacagtttgaaacttgtaactgctcccttcttgaaacttgcttggctcttgtgatgccacagcctcctactgcttgctctgcctttctggccatttctcagcaggttggttttccctcactgccggttgaatgttttcagtcttgaagggactgttggagttctcttttcactcttccattccccctggacatctcacggacttaactagtttgagcacctatgcagtgtcggttcccaggtgtgtaccttagctctggttccacctgcttgctgggcaacaccttccttggctgtcccatgggccccttggattccgcatgcccacagcagtccttgtttcttccccwckcccgagcccccttgttcttctgttgctcaagtcggaaaactcaaagtcctccagaagtctgcttgcataacccatgntcagncaatcaacgggtctttctaaaaatgggggtctggcnttctaagaagcatctccggaaatcaa

SEQ ID NO: 2282 - DNA, 708 bp, Homo sapiens
  SITE (548): n equals a,t,g, or c
tttttttttttttttttttttttttttttttcattagtagctgtttattgatcaatggtttgatataaagttatttcagatcttcagacttttgcccagatggaatcacaagcattacaaagttttttcttaaaaataaaaaaaggataggggcaagttgggaggggaccaacctagcagtagtggcatttgagaataaattaacaaaaaaatttagtattaccatttattgatgacaaacacttaagttttacttacattccatggggagaaaaattccagcgtaaacaatgaatggaagcagtacttaactcgcagggctaccaggctttccatacggaccacacgcagagcctcagtgcacacacttctgtgtacagtaacacaacatcaaaagcaacacagctgtatacagaaacgtaggtcattcttttcagccctaatggagatgtaattaacagtatcgagcactctggaaaatcactctgcaggtttatatggactacatggagatcatatcctgtagtgtagtgaaagctaagtcctcnagagccatatgtatagatacacaatgttttttaataatctttaaaacagagatcaaagttcatttaagtcctgtttgcattaacaaaaataaaaatgaaataaaaatggaaccaaatgatcatctaaagtttcggacgcgtgggcggacgcgtgggtcga

SEQ ID NO: 2283 - DNA, 513 bp, Homo sapiens
  SITE (415): n equals a,t,g, or c
  SITE (449): n equals a,t,g, or c
  SITE (490): n equals a,t,g, or c
  SITE (499): n equals a,t,g, or c
  SITE (513): n equals a,t,g, or c
tcgacccacgcgtccgcctagctgcatctgatgcgcaccaggtgactgttcgttggctgggggcccttcggtggcgagcagctctcccagttcccttggtccgcaccctttcacctcggcccggcttggggaaggcccctctgtgcagtcatgccaaagaggaaagtgaccttccaaggcgtcggagatgaggaggatgacgaggacatcagtgtccccaagaagaagctggcggatcctgtgactggggcagggggtcctgggagccgcttcaaagacaagcactccttggacaktgatgargaggaggatgacgacgaggggcccagcaagtrttgacatcctggcttcagaggatgtggaagttcaggaagcagccacattccccattgaaggaagtgtgcggatcaaaccnttcaaactggcaggaagagatggaggaagggcanttcgatgccgaagggaattatttcttgaaccggatgttcanattcgaganattggttggaaaan

SEQ ID NO: 2284 - DNA, 672 bp, Homo sapiens
  SITE (413): n equals a,t,g, or c
gtcgacccacgcgtccgcccattctcaattcagtctggctagaaactgagacttaagtcttttctggatgtatatacgttcttcctttttgctccctccaatcttaagattggattttgctttatcattaaatccatgggatagatggggcctggactcccattctgacagggtcactgagttaactatagccatataaaatgcagataccagttattattctcattctttaccttcctcaggtaacagtcatgtgtatcagccttttttttttttttttttttgattggctcaggccagtatcttaagtgcaagactgaattaaataagaagacatattaaacatagccataggagactgaggagcacagatggccttagagaggctaagaaagcatcatkactgggttttnctcccttttgtctccagtctggtgccaggtagtggagttgaaaaggagacagtttatttttttattctatgtgcacacataccatatacatgtatatttatatcacaatttaagaaaccaaaaagttgagtttccaatggaatccttgttttttaataattgactgtttttaaatgtgatcaggactatgatattgtacagttattatagggcttttggggaaggagaggggagggagaagatgctctgggggttttgt

SEQ ID NO: 2285 - DNA, 156 bp, Homo sapiens
  SITE (154): n equals a,t,g, or c
gggtcgacccacgcgtccgggcartttgtagaaggggtctacagcacggttaagtcaggaggtagagatctacaagtgaataacgtctgccctggcataactaggggaggttctctaacttggaagtgggggtaactgcattgggtgatatggngg

SEQ ID NO: 2286 - DNA, 431 bp, Homo sapiens
  SITE (406): n equals a,t,g, or c
  SITE (426): n equals a,t,g, or c
tcgacccacgcgtccggtgggtggacgtggtcgtggacgacaggctgcccaccaagaacggggagctgctcttcgtgcactcggcagaggcagtgaattctggagcgcgctgctggagaaggcctacgccaaggtcaacggctgttatgaagcactgtcggggggcgccaccactgagggcttcgaggacttcactgggggcatcgcgagtggtacgagctcaggaaggcccctcccaacctgttcaggatcatccagaaggccctgcagaagggctwccctcctcggctgmttccatcgatatycaccagcmtggccggtactkcagaagccakccacgttwccagaaagctggtgaaagggggcatgcgttactccagttcaccgggggccgaaggaagttcgnaaaattgcaaggaagcctgncagaa

SEQ ID NO: 2287 - DNA, 118 bp, Homo sapiens
aatagttctttactccttgcctgtcttgtggtggaactgtcataaggagccaccagaaatgggaactattaaaatttttcaggccagaaaacactacagttcctttaagaccatcagt

SEQ ID NO: 2288 - DNA, 411 bp, Homo sapiens
  SITE (393): n equals a,t,g, or c
  SITE (397): n equals a,t,g, or c
  SITE (399): n equals a,t,g, or c
  SITE (404): n equals a,t,g, or c
tcgacccacgcgtccgggccacggtttggcggttagaggcggggccggctcctcggagcggttcgggacaggagtcaggtgcggaggaggaggctggctgaggccgaattatttggattcagcgcgttggttccagccatgggtttgtctgcatctacccctgctgttgccgttcagacctcaaatgcttcagatcatcagacagcatccccgccttccggatgtcccatgcatgaagggaaaatgaaaggctgtccagtgagcccagagccatctaaaccagcttgtgagaacaaaccgaacgccgtgcctgcccaccaggatcgtgcgtacgagtatgtggaatgtcctgttaacggggcgctgtggctaagaattaaggagaacctaagntccntnccaanctggaag

SEQ ID NO: 2289 - DNA, 479 bp, Homo sapiens
  SITE (384): n equals a,t,g, or c
  SITE (468): n equals a,t,g, or c
  SITE (477): n equals a,t,g, or c
tgatggaggtgacatttcaaggagaatatccttctactttggtttcacagggtgctgaaataattccctcaggaactgagcatcctgtgtttcccaaggcttaygagctggaraaacggactagtcctcaagttctgggtagcattctaaaatctgggactactagtgagagtggagccttatccttggaacccagtcatataggtgacctgcaraaagcagacaccagtagtcaaggtgctttagtgtttctctcaaaggactacgagatagaaartcaaaatcctctggcstctcctacgaacactttgttaggctcygcaaagaacagagataccagagaggcctagaaagraatgatagctggggttcttttgacctganggctgctattgtatatcacactaaagaatggaactrtttggaattkcagaagaagatccaaaaggatacacttcaatgaagccngggttagtncc

SEQ ID NO: 2290 - DNA, 380 bp, Homo sapiens
  SITE (368): n equals a,t,g, or c
  SITE (370): n equals a,t,g, or c
gggtcgacccacgcgtccgggcgcagaccaactgcgatgatgctgaagatgcaggctcctcttctgatggccttgggctgcttctcgccggccctgcggcccacgcacacgtccccgcccacgccccggtgaacccgccaccccaggtaattagctttttctgggagaactgccatgaaaggaaggaccctgtgctgctcaaaagcatgactctggaacctgaccccattgcctatcctgggaatgtggactatcagcgccgagctccaggtccgtgtccccctcagcagtcctcagaaggtggaattaattatagagaagaaatggccatttctggatcaaattcctgtatgagccmtgttcgttgncnctttgaagac

SEQ ID NO: 2291 - DNA, 367 bp, Homo sapiens
  SITE (341): n equals a,t,g, or c
  SITE (342): n equals a,t,g, or c
  SITE (345): n equals a,t,g, or c
ggggtcgacccacgcgtccgcccacgctccggagaagagcgagcaggggagagcgagacaagtttgaaggggagggcaggcagagttagcagcccccgaggctctcctctcccaccgcccatccctttcctctcttctcccccagcctctctctctctctgccccataacttttctctcgaaaagtccctatttagccaaaggaaggaggtaaggggaacctctcccctcccccctccgcaaaaccccccaacttttccagtccggagaaagcaggggagcgagcgggcgcccggctggccatggagctgctgtgctgcagggtagacccggtccgcaggnntgnccaggacgccaacctgggtgat

SEQ ID NO: 2292 - DNA, 317 bp, Homo sapiens
  SITE (2): n equals a,t,g, or c
  SITE (231): n equals a,t,g, or c
angagtgggagggagaacctggacagagggcagcaggcggtgtgggtggggactgacacttggacagggactggttggkkaagggctgcccccaggcctgttgggaaggagaaactgaggctggcctctgttgagacctaacccagggggatgggggtggggatgggaattgggtctggaggaatgagggccccctccctctgggctggacatggagcccgggccctgctncacttttcctcctattaggtccatagtccctcctgttcttcactggggcccatgtgggcccaacaccttcaatgtttcccgcccca

SEQ ID NO: 2293 - DNA, 346 bp, Homo sapiens
  SITE (345): n equals a,t,g, or c
gggtcgacccacgcgtccgcccacgctccgcccacgctccggaatttctaaacacagactttagtttactgtgtgcttgcatatttattttcaaccttgtctttaaaattgcttgaggaaaaatggttgtatttctgccacagaaaagccttctggtacattttagctctgaactataactttattcaggagaggcttttgcaaggatggcagagaagtgtacaaaggaacgtttgttacagaggttcttgttgcagtgaactggccatcagatgacacatgcagtcgtacatttgagtcttctccagggtattgcgtaaactggccatttgaacctgtggaacnt

SEQ ID NO: 2294 - DNA, 367 bp, Homo sapiens
  SITE (77): n equals a,t,g, or c
  SITE (78): n equals a,t,g, or c
  SITE (331): n equals a,t,g, or c
gggtcgacccacgcgtccgcttcaattgtgtagaaactggggcgtcacagagacatagcgttgcagattggataggnngggaggaggacttctagaggcttctcagaggaattcgggtcccttatctgggaccagtgggaatgaaggccaaagaacaagggcatgctcacttagaaacttctcaaggaattctaagagcaaacccaggtgggaaacatgttttatgatcatctctctccagaacagtggttcttaactttagctgcatgttagaatcacctgggcaaattgaaaaatacagatacctgatatctaggcctccctctttganggagcctgaatttggttaatctgaggatcaggattt

SEQ ID NO: 2295 - DNA, 351 bp, Homo sapiens
  SITE (348): n equals a,t,g, or c
gggtcgacccacgcgtccgcattgctaggttataaccaaactgagggccaggagtgttccttatttgtgtttttcatccagctgaggcctagcacatggaatatgtgaaataaatgttgaatgcctgaataaaaaggcattgctggttgaaatgttataagccarttttgrtrttatcataaaaacacagactttgccagtttagccatccaggagtataatggcatacttaaaaatatggagcatagagctttccatgatgtgtggaattcaagcagagcccatgatagcaaccgatcttccataatagttttgttattaactaatgggctgagctggagacaaaantac

SEQ ID NO: 2296 - DNA, 410 bp, Homo sapiens
  SITE (363): n equals a,t,g, or c
  SITE (367): n equals a,t,g, or c
ggtcgacccacgcgtccggggatctgtgccgcagccactaacgcacgccagggccataggctggcctaagatctgttttgtatgaagtctcaaacccccttgattgctgggcattgacgtctgtcagttrgtgagactgagggtgaaggcattactgcacactaatcctggtggttgaccttccagactaccccatctaaagttggaggctgcccgggatctgtagggctagaggcaggatgctgtctagtgccagtcatgaaacgagggttctttgagccaagttcaaagcttgttttctttttggaaatcagaatgttcaacaactgtgttacatcttgcagggcttttgctgttttcttntgtnctgggttgcaggatacctggtggggagagggccaaggaggggg

SEQ ID NO: 2297 - DNA, 304 bp, Homo sapiens
  SITE (116): n equals a,t,g, or c
  SITE (268): n equals a,t,g, or c
  SITE (276): n equals a,t,g, or c
gtccgagtttattgttacatttttgcaataatagatgaggcacgactatctcctgcttctccaacaactcaataaaaaagacaataatcaggggataacagtgaagttaaaataanaaaaaaatacaaaagccgaagttttggagacaaaaacaactacagtctatgtgtgggaaagctgtgaatggttttagccgagccttgcaaatagtttccttccccaattccaacgaaccccagaacttcgagctggggccttccgagactgnccccgcgngcaccagggacccagggtcgcaggccca

SEQ ID NO: 2298 - DNA, 360 bp, Homo sapiens
  SITE (169): n equals a,t,g, or c
  SITE (171): n equals a,t,g, or c
gggtcgacccacgcgtccggaaggtcagaactgacttcttcataacggggttggttggtcagtagcttggagcagaystaaaaacagaagaaaccccacacctctggaagatacctccacatccacccctggccttgctgtttctgtccgtgctcctctcctcgcgagntncagccatcctgaaagcaatggtacttctgacacgtgcctgagtaagacaatgctggtgccgtaatctcgtgtgtgtgtccgtgcttctgtccgttaccccttgcgagacttctttagttaagggcatcacaaagatgtggacgcctcccgcagaaaatgtgggggcatggaaatttccacaaggcttgt

SEQ ID NO: 2299 - DNA, 347 bp, Homo sapiens
  SITE (307): n equals a,t,g, or c
  SITE (331): n equals a,t,g, or c
gggtcgacccacgcgtccgtctaggtattgggaagaatgtggtttgtgagaaggcagcaacctcagtggatgccttccggatggtgaccgcctcacgctactacccacagctgatgagcctggtggggaacgtgctgcgcttcctgcccgcctttgtgcgcatgaagcagctgatcgcggacactgacgtgggttgcagtaatgatctgcgatgcccgcatctactcaggcagcctgctcagccccaactatggctggatctgtgacgagctcatgggcggcgggggcctgcacaccatgggcactnacattgtggacctgctgacccacnggaccggccggagagc

SEQ ID NO: 2300 - DNA, 378 bp, Homo sapiens
  SITE (371): n equals a,t,g, or c
  SITE (372): n equals a,t,g, or c
  SITE (378): n equals a,t,g, or c
gggtcgacccacgcgtccgaaaacatctgatggtttttccttcagttcagaatcagagatttctttctcaacccagtcggacactctagctcctgctaaatataagtatggggcccctctgcagacttcagattcattcttgagatttccctctccccttacgtcatctctgtgcactgataataaccctggcagcatttctggtgaaccaagctgttaagtggcaccagaagaataaatttggaacagtgtgaagaaattgaagccctgggcatggcttattacagcagtcctaaaattctggagggttcctggtttaagaacagaggcagagatccctgttcactgttccatgccatcctcgtggcatnntcggan

SEQ ID NO: 2301 - DNA, 319 bp, Homo sapiens
  SITE (139): n equals a,t,g, or c
  SITE (270): n equals a,t,g, or c
gggccgtgcgcgagrgatgaaacgccatagaacactcagcagcagtgacagctcagacgaaagccttccacttcctttacttctggctcaatgtataggagcaaatccagaattccaaatgaacacaagaagcctgcgnaggtattccgaaagacctcatcagtgccatgaaacttccagattctcatcacattaatccagacagctattacctctttgcggatacatggaaggaagaatgggaaaagggagtccaggtaccagccagtnccagacactgttccacagcctttcccttcaggttgtagccgagaaggta

SEQ ID NO: 2302 - DNA, 203 bp, Homo sapiens
  SITE (72): n equals a,t,g, or c
gggtcgacccacgcgtccgcagagaggaaagtgacagaagctgtgcagagggagacgcatagagagcagagngcgggcagccacccagtctcgggggagcgcttagcaacgcgcccggctgccaccctgtccggggggctcctcaagcctcagtcccaatcccaggctccccatggaagccagctgtgccccgggaggagccg

SEQ ID NO: 2303 - DNA, 367 bp, Homo sapiens
  SITE (258): n equals a,t,g, or c
tcgacccacgcgtccgcccacgcgtccgggacagaggcgagagcgaagaggaagcagctgcttctcttcacatcggtcatcctgggctccctggcgctgagcaggggtgcggtgcactcgtcggaacctaaagtctctgttgctgagaacagccccgccaagctgctctgctcctactccggcttctcctctccccgcgtggagtggaagtttgcccagggtgacatcaccagcctcgtctgctataacaacaagatnacagcttcctatgaggaccgagttaccttctcgcatagtggcatcatttccattctgtgacccggaaagactcgggcatgtacacgtgtatggtctccgacgaaagcgg

SEQ ID NO: 2304 - DNA, 425 bp, Homo sapiens
  SITE (339): n equals a,t,g, or c
  SITE (380): n equals a,t,g, or c
  SITE (399): n equals a,t,g, or c
  SITE (416): n equals a,t,g, or c
tcgacccacgcgtccggaattaaaaaatgaaaattgaaacacattttacctgtcatgttagcaaagatgtggattgttaaatatccaaagaaatagcattttatgccttgtaaattaatccaaccttttagagtttaagtagcaatatcaattaaaattcaaaatattctgcgtttgggcccagagcttccacttctagagaataaagagatggacccaagaatatttgttgcaccacctttttaaaacttggaaatagcccaaatgacaagaaagaagtaactaaccagtatggctacaaaatttaatattgtctgtagcagttaaaagccatgaggnactgaccggaaaatgcccaagactactaaattaaaggagcnccatggggtataggtaccnaaaattttttaataagngggaagtag

SEQ ID NO: 2305 - DNA, 321 bp, Homo sapiens
  SITE (146): n equals a,t,g, or c
  SITE (280): n equals a,t,g, or c
  SITE (319): n equals a,t,g, or c
tcgacccacgcgtccgcccccctccctttttttttttttttttttttttttttttttccagtgaatgtctggcacattgcaatcctcaaacatgtggttatctttgttgtattggcatattcagtgacttgtacattcagcggtanctgtggagcaagttgtatcagcaagcaatattttcagttaataaggtttcaaaaaatcacataagaatggatttaaacttgctgaatgtaaagattgaacttcaagtcactgtagctttagtaaattgcttacngtattagtttagatgctagcactgcatgtgctgtgcatntt

SEQ ID NO: 2306 - DNA, 68 bp, Homo sapiens
tcgacccacgcgtccgctgagacccagagagatgaagagacttactcagggtcccgcagcatgtgaat

SEQ ID NO: 2307 - DNA, 433 bp, Homo sapiens
  SITE (372): n equals a,t,g, or c
  SITE (381): n equals a,t,g, or c
  SITE (412): n equals a,t,g, or c
gtcgacccacgcgtccgcacagtgtgaactgcctgctagcttggagttcttcctgcctgggaagagtgtcccctaacccaccctcaaaaggcaatccccagagcctcccactctcccatcagcacacagcttcatgtcccccataagggattgtgcagaggcatgggcaaacacaggcacagctgagcccagcactcccatggggcctacgccacttttctgactgtacttgtaagcaggcagcctcatgtccccaaatacagtcctgcagagtggccatacaatcacttgccctcatcccccactgggtcacctggacacactttccctactgatgtaaattgtttcacctrtgtaccattttggcagagnttcagcatncatttccagctgttctgtcaacaagcctttnctgggggctggaacctggggt

SEQ ID NO: 2308 - DNA, 156 bp, Homo sapiens
  SITE (125): n equals a,t,g, or c
acccacgcgtccgctcgaacaccatgatcttcatgattctgggggcgtcgatcgtgatggtgagcggaggggcttcccgtgcgcccgcgcccgcctcccgcgcccgggccgcctcccccacctcncgcgccttgtttaccggcccgcgcggcctgc

SEQ ID NO: 2309 - DNA, 1359 bp, Homo sapiens
  SITE (20): n equals a,t,g, or c
  SITE (41): n equals a,t,g, or c
  SITE (60): n equals a,t,g, or c
  SITE (108): n equals a,t,g, or c
  SITE (110): n equals a,t,g, or c
  SITE (1325): n equals a,t,g, or c
ccgtcagtcgcctggaaacnccattccacgctgttttgacntccatagaagcccccgggnccgatccascctccgrctctagctagccgcggacggataccaatttcncncaggaaccagctatgccactaggcttttgcaaaaagctatttaggtgacactatagaaggtacgcctgcaggtaccggtccggaattcccgggtcgacccacgcgtccgatcttcatctgatccatctgaggatttcagttttaaagtgatctaggcatgtttggtagagaagtttctgtgggagtttttttcttttacaaaagcattatgcaaagagggtcactttttaagggcattttaaaacttttaaataaagccattctttggctctttttgacaactatttgtggatactttgtttacattgtgataattaaaacacacatcctcttgacagccgctcctccctttctccaggcacgcagccctggctgtcctatgagtcctctcacagagcaaggcctccgtggtcagccctgactcacaggggacttgggggggatggacccggagctgacttccatctgtgtcctgcactccccttcaacactctgtgtggaattagccctttcctcagtcagtgatggtgtgtcttacagtgatggttgtaacggtgaatggctagtgtcctttttgtctcagtttgttttgctttttgatggtagatgaaattttagctctttcagcaccagtccaacttgacggtatcttggactttgttttccctcccagacttaaaagatcaaggcatgtattaggcataaatatatttgctgcctcaactcatctgatacccagattaggaaacagcctgtcaccaaagcagaaagctgcacactcctaacccctgtcccaggcctctggggtccctcgatgccatggagagctaatgcaaggtgcttgtgtactttcccagtccaaacttttatgctcacattttattaaataaagcaggtgctccctggaatctctgggacctttttgaggcatttgaagcagaatataaagagtggtctcatctccttccttaatcttcctggtggttgggatgttccacttgtatcatagattttttttattactgatgtgctctgctgtttttaaatgtgaacttgtgcgcaaatgtgcagattcaatgttcttgktacagattaaataaatttttattttgaagatgaaaaaaaaaaaaaaaaagggcggccgctctagaggatccctcgaggggcccaaagcttacgcgtgcatgccgacgtcataagctctcttcctatagngagtcgaattataagctaggcactggccgccgtt

SEQ ID NO: 2310 - DNA, 1037 bp, Homo sapiens
  SITE (969): n equals a,t,g, or c
  SITE (976): n equals a,t,g, or c
gcggccgcccttttttttttttttttaaagtgtaaagcagtttattaattatgatgtggtaaagatctcaagagttacgatgtctgtgaatattacccaacagtgtatacatgcctacaaaaaaaacaaaaacaaaaaaacacagtgaactgcagctgttaacactgcaacagtcccacacgggggtcaaaggaagggagacaccccttctgacagcaaagtttccagtagccccattaaatgatcatcttggtctgctccctccgggtcttcttacagcactcatctggaaccataacagagcgacacaatagaactttcaaagtcaggatttggcctccaacaattttttttacacagggacatacaacattccctcttgaagcaccagtgcctagtttgggagctgcagagaaccaagacatcctctaagaagcctgcggtarcagsccacaycggaaacacaaagcattttataaattcacatttggtaacagaattaagagctcaatgtgcaaaacttacaaggtaatgtaaccacaagtaaagccttcagtagccaaagaaaaattctgaaaggcttttcagcccgtctgaagctttcagaatcagatttcctttctagacaaggctggtcttcagacagtgtgctctgtatccagaccagcaaaaaaataaaaagagagggaatagcacctgagaagatattttaaaagataaaacaaaataaaacaaaaaaacctttatcttcttyccatccttaaagaaggcaggtatccaaacactgctttttgctcctttgkgggaaggagagaaagaaagaaagaaagggaagaaagaaaaagaagaatgaaagaaagagagagagagaaaggaaggaaggatggatggatggatagagaggggagaggggaaggaaggggagaggagggaacaaaagctgtaaggctgtaagccagactcaggatnagagatnagcaagggcagccagccctatgacttgatgtgacccttttaacgccatgggagccacctga

SEQ ID NO: 2311 - DNA, 240 bp, Homo sapiens
tcgacccacgcgtccgggctgggagaggaaagccatggctgacaagatcctgaaggacagacggaggctktwtgtcagctcagtgagccccgggaccctcagcagcttgctggcatgagctcttagacaaaaaagtgctaaaccaggaggagatggagagagtgagatgcgaaaacgctaccacgatggacaaggcccgggctctgatcgactccatcattcggaaagggccacaggctg

SEQ ID NO: 2312 - DNA, 306 bp, Homo sapiens
  SITE (244): n equals a,t,g, or c
  SITE (285): n equals a,t,g, or c
tcgacccacgcgtccgctctgagcaaccgctccggaatctcctccttttcacttctgaagaactgacggaaagatgttttataattgaaaacacaaacactatcacggcagtagaagagactaaccaaacagatggagagcacaaaaaatacagttcccaaaccagtcaggattcggggaactattctaatgaagatgaaagcactgggaagcaaattcagtgtaagagttcctgcatgcaggnaaaccgagtgaccagaaagaagttctagaatggcttgggcntttctgggggtagccgtgcgc

SEQ ID NO: 2313 - DNA, 374 bp, Homo sapiens
  SITE (343): n equals a,t,g, or c
  SITE (346): n equals a,t,g, or c
  SITE (370): n equals a,t,g, or c
tcgacccacgcgtccggccaaatgctactaaatccagttataatcctggggacgtggtatactttgtttgtcggccaggatacaagcctgttgtaccttctcttcccatgttttccgtttgtcaggataataacatgtggacacctcttcaggaggcttgtacagcaaaacaatgtcagcatccaagagaacccataaatggccagatagtcgctgtaaatggatctttttcctatggttcacagattcactattcttgtaatgagggttatcggcttgttggaaaaagaattctatactgtgaactttctactaatgacgaaaaaaaatggactggagtggnggntcccccaccagtataaggattaangtgt

SEQ ID NO: 2314 - DNA, 461 bp, Homo sapiens
  SITE (4): n equals a,t,g, or c
  SITE (6): n equals a,t,g, or c
  SITE (13): n equals a,t,g, or c
  SITE (27): n equals a,t,g, or c
  SITE (447): n equals a,t,g, or c
  SITE (450): n equals a,t,g, or c
  SITE (458): n equals a,t,g, or c
tctntnatagaanccacgcctgcaggnaccggtccggaattcccgggtcgacccacgcgtccgcccacgcgtccgcccatggggaaggagttcaaagcctagaccaaggcactgaggagcaactcagtcaggaccctggagctgggacacaagccttccaggagcaggctctgccagttcttcagactggtcctggcctcccttccgtgaacaccagagaccaagagatggcagcggggttccttacaactggaccccaggggttggggacatttaaagatatggccttggctttccctgaggaggaatggaggcatgtgaccccagcccagatagactgctttggggaatatgtggaccccgagactgtggggtctcagctccaggcattgggarcwaggaaaaggaggctaaaacccagcattcagacctcaagggggcggttgntcnggtggacntca

SEQ ID NO: 2315 - DNA, 559 bp, Homo sapiens
  SITE (525): n equals a,t,g, or c
  SITE (556): n equals a,t,g, or c
  SITE (557): n equals a,t,g, or c
  SITE (558): n equals a,t,g, or c
gggtcgacccacgcgtccggatccccacccctgcccacccctgccctacgctggaccaaggacttcgtccccctggggaatggccccaccctctccctgagctccctcaccttcgactctgcgggcacctacgtctgtgaggcctccatgcccacggtccccctcctcagccgtacccagagcttcaagctgctggtccaagggccacctcaattaagtgcagaagagactcagccccagacagagggcggctggagggaaggagatgaagttaggctggtgtgctctgcccgcggttacccggagcccaaactyagctggagccaattgggtggcagcccagcagaaccggcctcactgggcagggctgggtgagcagytccctgaccytgaagktgaccagcgccytgagcagagaaggcgtctyctgcgaggyttccaacacccasgggaagaagcagcatgtyttccatttggstctgtgggcccccagayttcccaggccggcgtggctgtcatggccgnggccgtcagcgtgggcctcttgcttctcgcnnng

SEQ ID NO: 2316 - DNA, 426 bp, Homo sapiens
ggccgccctttttttttttttttttttgaaagagaacacatttatttacatcactatttccttttacaactcctatgcatttaaataataaaattttccaggaaatccggtaacctttaaataaagatattttaacagaagaaaattatcataatatgatttttatttacatgaatttccaacagttttaaatagttctttttgaaatagcacaacatcactgaaagctctcatttcgaacttgcatcttttcccaaaacttttagtttaaggaattaagcttacagtcacctccttgtagcgtggattcttagagacgaaaacctgttaacacacttatgaacacaaacckgcttcataaatgrtccatgttttggstggcgagckgaacckcttycacagtttgacagatgcagagttttttgg

SEQ ID NO: 2317 - DNA, 169 bp, Homo sapiens
  SITE (159): n equals a,t,g, or c
cactagagaaaaaccctataaatgtgaagcatctgataaatcctgtgacgcatctgataagtcctgtagtcagagctctgacataactccgcataagaggattcacactagagccaagtcttataaatgtagtaattgtgaaagagtttccagtcgtantgtacatctt

SEQ ID NO: 2318 - DNA, 397 bp, Homo sapiens
  SITE (346): n equals a,t,g, or c
  SITE (376): n equals a,t,g, or c
  SITE (389): n equals a,t,g, or c
tcgacccacgtgtccggaacaatttaggagctgctgttttgagaattcctgttctgtatggagaagttgaaaagcttgaagaaagtgctgtaactgttatgtttgataaagtgcagttcagtaacaagtcagctaacatggaccactggcagcagaggttccctacacatgtcaaagatgtagctactgtatgtcgccagttagcagaaaagagaatgctggatccatcaattaagggraccttkcactggtctggcaatgaacagatgactaagtatgaaatggcatgtgcaattgcagatgccttcaaccttcccagcagtcacttacgacctataactgacantcctgtcttaggagcacaacgtccaagaantgctcagcttgantgcaccaa

SEQ ID NO: 2319 - DNA, 459 bp, Homo sapiens
  SITE (343): n equals a,t,g, or c
  SITE (347): n equals a,t,g, or c
  SITE (391): n equals a,t,g, or c
  SITE (450): n equals a,t,g, or c
tcgacccacgcgtccgggcagaaagaaccgagggggatcgggggaggcttcagctgtggccacaggcactcctgtccccaacctgggaatcatgtgggagctggaagagaccccagccaagcacctggacaagttcattgaaaaccgtctcctgccagacacgaatttccgcaggcagatcaaggatcccgtccacatcatctccaccttcctgaaggaggagtgtttccaaggagccccccaccctgtgcgggtgaccaaagtcatcaagggtggctyttcaggcaaaggcacgtmcctcagaggccgatcagatgctgaccttgtggtttttcttagcaancttnggagttttcaggagcagcttgaccaaaagagcagagttcatctnggaaattaagaaggcagttggaagcctgtcaaagaaaagaatctttgaagtgcggtttnaagttggga

SEQ ID NO: 2320 - DNA, 995 bp, Homo sapiens
  SITE (292): n equals a,t,g, or c
  SITE (971): n equals a,t,g, or c
  SITE (980): n equals a,t,g, or c
  SITE (994): n equals a,t,g, or c
ggctgactgcgaactacagatcctcggccggctgcgttggtggaggccgcgggggaaggggagccggcggcggcgctgccgaaagagagcagcctgcggcacggagggaatgatctgtgccgcggcgacgcacggcycgtcttcttggggaggcggtataagcgggcgccgcgcctccggctcgccctccgttccgcgctccggccatgcgtccggccttcgcggtgggcctggtgttcgcaagctgctgcagtaacgtgatcttcctaaagctcctggcccggaacaccangatgcgggaacattgtgacatttgcacagtttttatttattgctgtggaaggctttctctttgaagcggatttgggaaggaagcggccggctatcccaataaggtactatgctgtgatggtgaccatgttcttcacggtcagcgtggtgaacaactatgccttgaatctcaacatcgccatgcccctgcatatgatatttagatctggttctctcattgccaacatgatcctaggaattatcattttgaagaaaagatacagcattttcaaatatacctccattgccytggtgtctgtggggatatttatytgcactttyatgtcagcaaagcaggtgacttcccagwccagctcgagtgagaatgatggattccaggcatttttaaggtggctgctagggattggggcactgacgtttgcacttctgatgtcagcgcggatgggtattttccaggagaccttatacaaacaatttgggaaacattccaaggaggctttgttttataatcatgcccttccgcttcctggcttcattttcctggcttccgacatttatgaccatgcagttctgttcaataagtcagaactgtatcaagttccggtcattggtgtgacagtgcccatcatgtggttctacctcctcatgaatgtcatcactcaggaccagtgcatccggtngtcaacganctcaccacggaatnc

SEQ ID NO: 2321 - DNA, 703 bp, Homo sapiens
  SITE (663): n equals a,t,g, or c
cgccagctctaatacgactcactatagggaaagctggtacgcctgcaggtaccggtccggaattcccgggtcgacccacgcgtccggccgtgctctggctctggtccagccacaacaaggtcaacaatcgcctcgccggggccgccagcgaggacccccacttccccaaggtgcagtggccgccccgtgagctctgtgctgcctgccacaacgaactccggggtacggctgtgtgggacctgaacaatactctgcgatttctcaagacccacttctcgcccagcaatgtggtcctggacacgcattcctctcggccgggcccccgggtggctgcccagaggatggcagccagaaatgtcactctgagtcctgcgaaggcggcgatggtggtgggcctggggacagagtccccsggaaccgctgttcctgatattgtcgtagagagactcggggcgagtcagccccaggatgtgctcattggcttcggggctaccacggcaagccagagcaggggtcccccgagcacgtagcggagcttcagagggatgaggcggagcagcccgaggggcggcagcacgtgagcaggcgagacaccggagccacgcttgctggaggagttcctggccgagaggagccaacccagagcccttcggagctaccggngcgtgggccgaacttcaacagctggccaagcatcccgagg

SEQ ID NO: 2322 - DNA, 676 bp, Homo sapiens
  SITE (188): n equals a,t,g, or c
gatttctgttgtgcatgatgtaccttttacatcatgcagggcattgtagcagatataggagttatgctttatttggtccccagcttcaggtgactaacagtccaatcagaatccatgcacacagagatcagcatgacacaacatgagaaaagaaatgttatgtggggaagtgtagcaaatggaacggncaggtgagaggccagagagatctaagaatgtcctgaaggaggtgagatttgcccttgaccttgatggagtggtcagacttgggaaagaagatgaataaagcctatataaactgagagttaagagtgaagactggagacagatggctttggcttaaatcgcagttctgctgcttgctatctgtgtgaccttgggtaagttacttaacctcagtttcccagttatgacatgggaatgataacaatggtgtcggtctcttgggttgctttgaggttatttgaaataatacctgtaaagcacacagctaaaaaggaggaatgatggtggtgatgcagggagaccaaagagtgaaacagtctagagtgaagcgaatgtgttaaaatccagaggcgatcaagtgaagccagcctttggaggcccgtagaagtcatttggaggaatttggacttcgtgcagtaggaaagagggaaaactgtttttagaaaaaaaa

SEQ ID NO: 2323 - DNA, 485 bp, Homo sapiens
aagggaacaaaagctggagctccaccgcggtggcggccgctctagaactagtggatcccccgggctgcaggaattcggcacgagctttgaattaaatacagttgtcttgagggtatgataagtccacaaaaaattggaaagcatcttacccattttcttcacatcccaaatttttatttgttccatgtcatagtgatgggaagcagttacagagcagcgtcttctgtgtttccttcatgtgttagatattggcaacaaagccagaggtgtaatgttggttatatgaagttcatctcaaaatggagaccatgaccagagtttccagatgatacacgttcttttcagcttcattaaataggcaactatgtttctaaatagtaaagtttcaaaatattctctcaatttaaaatttcatcctcttgaaaatctttgtyctttacaaaattatcttaataagttctatatggtcagcttmatcttccttt

SEQ ID NO: 2324 - DNA, 328 bp, Homo sapiens
gctcgactgatttgcagctagagaaaatacagtaaaccctacattgcaatgaacagctttgtaagtaggaaaacagcaggccaaataaagctttccctctggtttttggcagaagtctacactttaatttcccctttctaaccaaaccattaatgaactcaacattataggaagctgtagaatggtgagattatctcaagaccctactctctttgacttcttatccaggtgttcaacaacgctcayttccatcttattcttgttacacatcttattcttgcttgtgagtggagcaatgaagtctataaaaaaaaaaaaaaaagtcgac

SEQ ID NO: 2325 - DNA, 535 bp, Homo sapiens
  SITE (451): n equals a,t,g, or c
  SITE (498): n equals a,t,g, or c
  SITE (509): n equals a,t,g, or c
  SITE (520): n equals a,t,g, or c
gggcattagtgataagtttaaaaataggaaagcagagctcatttctgtgttgaaagttataaacttaataagtctcaggtttgttattctggagtagtggtttttagttctgaatcactaaaataattgtaataaactacagaaataatcttgccataatcacttacctatacacagttgaaaaagatactgtttgtgaaagaagtcacagtcaatgtgtttctgtagtgtcctatttatttacttttaaaatttctgtcttcttgagtttcttgkgctagtttcagtcattttgkttgkttgkttggtttwaatcaatagcccagagttagagttttagtatattgggaattcgtgccaaacatttgatgggagcgacacaagaggcatgaggaaggctgggtattaaaggaggcacttaactgtgggaggcaagttccagtctgggccnccagcttaacttttgttaacccctaaaccaaattcaccaggatgtcnggatattagcnctggggggttnggggtttttcctgga

SEQ ID NO: 2326 - DNA, 718 bp, Homo sapiens
  SITE (115): n equals a,t,g, or c
gggaggaaaaaaatctttccttagaattcataaccaaaatacagcctttattgcagattatagctggaattcacaatatttcgaaggcaaaaaaaaagttaagctgaggatttangtataattagtgcatgaactatagtgctctgttgtctattagaagcaaatattttgtagggagttgtccatctcacacctcaacatgttttgcacagccaaagttccaaggaaaatgaagggctacctcatagtaaagaaaaacattacatacacaggggaacaaggtatcagcagaaacagcaatcagacacagaatataaaatgtttaatgtttcaataaaggagaggcttgaaaatgaatgaagatgttgagtggaaaaagtcacagaaaaacacctacagtcgattcatttatataaagatatctatcaaacagataaaaccaaacaatatactttgtgggagagcaatacacaaacgcttaaaacaaaactgtaaagaaaggagtgataatagaattcaggatagtggtccctttttgggggargagagggttgtgatcagaaaggggcatattggaggtgtggtaatatttkgtttcttaacctgggtgtaggaacatgagcatttactttgtttttaaatggtatattttcacatgttcttgaacatatgctaaatttctaacaaaaaggaactatgtaataaacatgtaatatat

SEQ ID NO: 2327 - DNA, 669 bp, Homo sapiens
gtgtgtgtccattgctgcaagaataaaagaagcagtaacagaatcatgcagcgcagtatttcatggtgacagttttatgtggttgtgtgatgttgcagagtcttgtaggtgatatctacccttttcttttgaatcaaaacacggggttttactggaggagggaagtttcagaaacaacctagtctaacacaaaattaagctcctaaatagttatcccattctgtctactacaaaactaattgcttacaggaagtagaagtacacatatctaatatttatatcctgtttgagtagtggtttctaattttagatttctaacccctttttacattatctttttgcattgaaattatactgaaacattcatattattatgaatgcaagctgaattaaatagaccaagattctcggtttctcccttcatgttgtcatctactagagaatgaacagcttaaaataagtgcatcagttcctcatccaaagggaagctgaatattccaattcaagatcactttgcgtgcttactggaaataccatttttgaacgtacttggcacttaaagtgcccaattaaaagctctgktgaaagaggaagtctgkggatgtgcaattagtccttargattcagagcatttcctttatgtgtggaggccatatatgaatcactggt

SEQ ID NO: 2328 - DNA, 480 bp, Homo sapiens
  SITE (361): n equals a,t,g, or c
  SITE (372): n equals a,t,g, or c
  SITE (439): n equals a,t,g, or c
  SITE (471): n equals a,t,g, or c
aaactggccagaggcagaaagaagcagagatcaggagggggaggtcgagggctggaacttaagagatttgaaatccctttacgtatgacagtggcttgtgggatgaagggcactacaaactgatcagtgatagccagactctggggmaatgtttccccacaattcaatgaaaaatcttgaacgaacccaattagattagtattttcagtatttgagagcaaaagaraaccacttaagtgctatcgtatgtgagctgmgtaatggtattaacttacatctttatacaaatgctccaatctcaaactgaaattttgaagaaaataycgacaaaaatgtatttgtgtaccctgggacttaaatnggcccattaanttaaaaatttatcccggtaggccattcctttttaggctccacctttaaccagacggatcttgggtcnaggggactgacggaactttttccggtaaaagnaaggggcca

SEQ ID NO: 2329 - DNA, 475 bp, Homo sapiens
aattcggcacasgggaagggagacctagtatgagactcaggtctccaccctgacttgactaggakgctgatttgcactcaggacatgcagcccttcaaggcatctcaaattacagacatgaaacaacagatgcctggatgaattttacaagcagggcaacagtgmggaagaaggctgtgtagcaaaatatacacttagactccagacctatggctttatcttgtcaatatcattaatattcacgggacccaagctaaggctgaagttagtgagccagctctgggtctggcaatgtactctagtgagaagatcaccggccttgaagtcaggcttgtgtctgaatcacagctctgcattttaactagctgtgtgacctcaggtgatcaccatacttctgagcctcaattkccctatctgttaatttaaataagggtgttggtatgtcaccaaaatcccttctagctctaagatttta

SEQ ID NO: 2330 - DNA, 747 bp, Homo sapiens
ttttttggctgcaagggtgtctggtgtttaatctcaggttgctgccgcccgaagagcggtggccaggaaggggaagggttccagtccagctcgctcccgtttctagatgctcctgccgccgccgcagcctcatccaccaagattctccactctctgcccacagatttgctgggctgccggcctcagggttcacagtgagggctgtaggggcaactagggcgggtctcgggaggcaaggtaggcagccagggtcaccagggcagccgcatacgtgcacacgcccagcccgacggcgaggacccccagcaggaaggcacggcggraggcggcccctgccccctgratgtcccccttggcccaagccttgttggtctgtagaggcagtgggcagcagtgacccaggcatcccctcagtcccagacccttcccctggtccctcccccacccaacatacccattcattcattcatgcatgtattccaaaagcagatacgtagcacctactataggtcaggcactggggatgctgagtggttaataaaaacattaaaatggtaaaaaaaaataaaaataataaattttaaaaaataaataaaaacattaaaatggtatatgccactattctaactcatttgattctcacattgacccagaggtagcaattattcccactttacagatgaggaaagtgaggcacagggaagttaagtgacttgcccaaaatcttgcagagagctgggcaccgtc

SEQ ID NO: 2331 - DNA, 334 bp, Homo sapiens
  SITE (321): n equals a,t,g, or c
agactggatttggtcatttcattaaattgcaagcttgcttcatgctgccgtctaagcccaagaattggttcaagtctcaaaatggacaaattaaaatcatttcaggtttatttcactttaagcaaatctacatacatgctatgatgatggtatgtgtgagcttggttttataactaaatttgaaagttgttcactttctgaggtaaatcaatgtggatttctttaaataatgctctttcccaggtgtctaatgttcgtgtctattaccaaaacttgttctatgtatggtttaataacaattgatgtgtacagtattttggntttaaacaaaaat

SEQ ID NO: 2332 - DNA, 493 bp, Homo sapiens
aagcgattggggcaktggaaaccagccactgcactgcttgcaaaacctgagaagaaagaagagacttggttgaacaattcacactgtttttcaaaaacagctttctgaaagggcttgatcccccaaggttgcccacagcasgtaataccagagtactgggctctcaactgtggtaggaaggggaacagaagtgtcctatgcagttgagtttagccttctagggctctggagacatgtccagtaggggcactaaagagagcccccagatcccacctggcctgaggaggagtgtgacctgcatggttgccccatggaaagcccaggccctcaggaaaccagccctgaacatccccttcaccatgcacagaaatggagtcttctcctttttggaaggactaacagcttcactatgtgccaaggtgccttcacaccctatggttatcttacttcctatagttattttaattcctggccaaccctgtctcaaaaaaaa

SEQ ID NO: 2333 - DNA, 812 bp, Homo sapiens
  SITE (705): n equals a,t,g, or c
  SITE (754): n equals a,t,g, or c
  SITE (756): n equals a,t,g, or c
  SITE (793): n equals a,t,g, or c
  SITE (809): n equals a,t,g, or c
ggcacggggatcctttcaccaggaagccactgttcatcattgtggattcgtctaatagtgttgcgtataagaatttcacaaacttgtttggacagccactagtctgcttgctttctcctacagcatatccaaaagctttacaagatcaatctcagcgaggtagcctcttcactctctttttgaacaatcctctaatggccttcctatttgtctctggattgtcaagcatgcgcagaggcctatgggaaaagtgtcaagaatatcttcgaaaaatcaaccgtgatattgcccagctactgactcattcacgttcaatagatcaggcatttctccagttttttggagatgaatttcttcgcttgctcctcacaagatttatcttttgttcagccaccatgaggatgcacaagatttttcgggaaacacgaaattatccagaatcatatccacaactgccaagggatgaaacagtggagaatcctcatctccagaagcacattttggaattagcatccattctggatgttcgaaacgtgttctttgagaataccattgatgactattaaaacaaaaaccctgttgtcgaaacaagttttcattttccacaaattttaaatggtgcagttttctaacgtgataagacacatagtggtgttacttagtttttattttttaatttaagggcaccattttaaaaacaaacanaaaaatggtcacacttttagggtaactggtttaaaatgcaacctttcangncttttaaaatcttaaccttggaattttaatttttgantttgagggatggatantta

SEQ ID NO: 2334 - DNA, 556 bp, Homo sapiens
  SITE (413): n equals a,t,g, or c
  SITE (452): n equals a,t,g, or c
  SITE (485): n equals a,t,g, or c
  SITE (498): n equals a,t,g, or c
gaaactagaggtcagcaaattctttcttaaagaagtgtcatataataaatatttttgacttgtgagccatataggttctgttttgactgttgtagttagaaagcagctatagatactatgtaaatgaatggcttggctttgtctcaatggaaaactgtgtttactagaagaggcagccagcccacaggctgaagtttcccagtcgctgatagaaacaattgaatatgccatttaggctaataaatggatttaacctttggcatctcatgaacaatgtcttctgacttacagaacagaaagaataaaaataccaatgcaaggttaacagtgctttgatctttgttccttagttacctattcagttttcatgagtaaatgattataaacaagagttctcttatttggaatatcgnatttcagagctctccacctcactagatggcaattcccgnggtataatttctctcgggcaaatacactagagnctttatttatggntcttttcttcctcagagcctgtaaacaatatgctagtaaattcttttcatcctggctt

SEQ ID NO: 2335 - DNA, 503 bp, Homo sapiens
  SITE (419): n equals a,t,g, or c
  SITE (456): n equals a,t,g, or c
ggcaacagaaccagacagaactctttgaatataattatatatcttggaaactgactcatcaaagctattagattacatrgcatcatttaagcatcaytgggctctgtacttttcattatctgtacttttcattatggagtataataggctttatttggyacagaaattgggtctaagatggaaaccaacttgtgatttttgaataaacttttggggattagttactttgatgttgtcaagatagcagcatagtaagtcctctgcctttccttttgatttatttataatttagaatcagtttatgatttaaaaaatgtgacagacacagtggcatgcaccagtaagtaccagccacatggggaaactgaggcagaggggatcactttgatcccagaaagatagagaccacccctggggcnaccataggtgaagaagccccatctccaaaaaaaaaanaatccaattcccaataccattccagaacacttttaatataccagatg

SEQ ID NO: 2336 - DNA, 464 bp, Homo sapiens
  SITE (310): n equals a,t,g, or c
  SITE (429): n equals a,t,g, or c
  SITE (443): n equals a,t,g, or c
  SITE (449): n equals a,t,g, or c
ggtttttagaattttcattgaagatcaagaaacattttattcactcaacagtcatgttttaaccaccagctgcatgtccaccactgtactagatgctaagaagtatcttctattttgtaaataaagtcctaaattgattataattaaaagttggaggcaagggttatatgagaagtctctgtaagttgtgctcaatttttctgtgaatctaaaactgttctaaaaaataaatccttaaaaaggaaaaaaaagttggagaaaaaataaaacatatacagaaacaattgaagaccaattgcaaaccagtaanattttgtgccagaaatgttttaaaaatctacatatgaatactgaagagctatggagtataggaatgatcaacaacagaagaattaatctgattaagcttcttttaggagttgatggccnaaaattgaaaggcnattatnagggccttccacata

SEQ ID NO: 2337 - DNA, 490 bp, Homo sapiens
gctcctacaggtaagacatttgttgatcagtcccaacagcctagaattccctaaatgaatgtacatattaggtacttatccaaactctttccatctgaataaaayaaaacgtggtgtctgaggttcattttttgttttatatctctccttgttgatttatatgtttagaaactagatatgtatatttgtctgtatgaatagctgtatatgctctatattgtattatactaaacatgtgtctccattaagtctaagctttcttttcctcatcacttcgttctcagaactcccgttctgacttatatttagcctggcaataggctgacgcatgtctcagatgcgagtacttacaccttttaacatagttagaattgggaatcccactcatcattcctgtttttatttgctctctcagaatggtcattgtgtatttccttgttgcatatgtggttactggccttgaactctggatgtagtggttatcaagaac

SEQ ID NO: 2338 - DNA, 537 bp, Homo sapiens
  SITE (501): n equals a,t,g, or c
gcggcacgagaaaaacccaactacattgggttttatgataggagttaaataacagaggtttttttctcacatcgtagtaagtcctgaagtacaggttgctgatgttgtttcagtggctcaatgatgtcaaggtgagcatctttgtgcttctcttgtctcctcatgctcacaatgtaagtgctgaaattgtagctcttacttttgcttttgaggcaggaagaagaaacttggaagtgcttaccagytgcaggtgtmcctttttatcaaagaggcaagcttcccctgaattccctccagtgaatctctgcttacatctgggctggggggtaaaaggaagctaagagagtatatatctgactctatagcccctgtggttggaggcatcatgatagaggagggttggaaatagctttgagtagcccaagcaacagtgtcatttaacaatagggagccacaggatacccaaggggagacagtagttctcaaggagaagaaaagcantgaaccacttgggaagggcgatggcaagccatgacc

SEQ ID NO: 2339 - DNA, 620 bp, Homo sapiens
  SITE (442): n equals a,t,g, or c
  SITE (477): n equals a,t,g, or c
  SITE (483): n equals a,t,g, or c
  SITE (556): n equals a,t,g, or c
  SITE (570): n equals a,t,g, or c
  SITE (578): n equals a,t,g, or c
gaaaatattaaaacttttattgtttcaatctaacaaatgaaatttaccttaattaacatttaatcaatggatcaacactgacatcctcacttggtctgggtgtcagactgttgggtatcagytatagtgcatgaggaaagcatgcaggggttgacagaggccccttgcttgytattttcaacatactgggatgaattataagtctgcatatatctagttaggtggatttatggatttaacaaaatcaaagttcacaaaacagataaatggcaagaaagattcctgcaaagaaactaaattgtgtgcaatactaataatgagagtggaagtgagccacacacatgtataggtcaagagcggatgcttctcctatgagacattaatggtgaagtaaaaatcaacaacaatctaatctcaacttgagaagatgtccagaaaaagngaaattataagcaagacaatttgataagatggaantggatncactattggtaacaaagaaacactttctgaaatttattccttggaatactgggctaacaattggtagggaagncattataattaaanggacatgnggggaccaggaaggttaactggccaaaaggtttttcatggca

SEQ ID NO: 2340 - DNA, 558 bp, Homo sapiens
  SITE (383): n equals a,t,g, or c
  SITE (497): n equals a,t,g, or c
  SITE (530): n equals a,t,g, or c
  SITE (540): n equals a,t,g, or c
cagtcacactttttacttatgtatttacaagtaaaagaatatgtaaagacaattgagtattgtgcaacattgatgtgtatttataaaatagctttattttataataaagtaatatgtgtagatagtgtcatgaaggaaatattctccccataatatagtttcccttcttcatttcagcacatgaaattaaacaaacagaggaaacttcatctcaaacccatctaacctagtcagtaccatagtaagctgctttaaatcatatttaaaacaaggtagagtacaaataaatacatgcatgtaagacccaaattaaagcccctcaaaaatctattacttttaatttcataaataaattttttattgggcttaatttactccccgtntaaaataataatatggtttaagactaaatttttttggttcctgtcaaaggaaaatttttgatggtggtgaaaattaaccactgggaacatcattaaaaaatataggcctactgngtgcttaataccataaaatattaaaatgacagnaatattaagnctagaatttggccaaaaa

SEQ ID NO: 2341 - DNA, 1857 bp, Homo sapiens
taaccctcactaaagggaacaaaagctggagctccaccgcggtggcggccgctctagaactagtggatcccccgggctgcaggaattyggcacgagctggatggcccccgaagtgatcaagtcttccttgttttctaagggaagcgacatctggagctatggagtgctgctgtgggaactgctcaccggagaagtcccctatcggggcattgatggcctcgccgtggcttatggggtagcagtcaataaactcactttgcccattccatccacctgccctgagccgtttgccaagctcatgaaagaatgctggcaacaagaccctcatattcgtccatcgtttgccttaattctcgaacagttgactgctattgaaggggcagtgatgactgagatgcctcaagaatcttttcattccatgcaagatgactggaaactagaaattcaacaaatgtttgatgagttgagaacaaaggaaaaggatcataaaactaacagaggagactggcgtttgtgcagaggcctgggctgtcatctaagtgaataatccgctgaaaaggtttcggcttggattgtcctgactgcaaagaccttcgtcccatgaggacctgagtgaccagggcttgagcagaggaagagggaatttcagcttctccttgtgcacaggaggagcccgtggccgaggggtcgccagtgtagtgtaatagacggaattcccttcttcctgctgggaatgattccggtgggtgtgaatctgtgtcgcaggagctgcgatcccgggaagaggagctgactcgggcggctctgcagcagaagtctcaggaggagctgctaaagcggcgtgagcagcagctggcagagcgcgagatcgacgtgctggagcgggaacttaacattctgatattccagctaaaccaggagaagcccaaggtaaagaagaggaagggcaagtttaagagaagtcgtttaaagctcaaagatggacatcgaatcagtttaccttcaggtatgatcttgtttttatgtttttgaaagatttttgtgtgtcctccttttaatcagttttctttgttcatcagaaccaggaaagagatagggaagtaactttgtaaaacagtgaatgaatgagtatcttcagctgtaggcttagattcatggttctaatgtaatggcctaatgagattccatgtaggaaacagcattaggagcacgtggtagtcacagcacacgaggatctaaccctcagcgtactttcatattgatggattaactgattgactccttttgaaattgaagcagaaccattttttagctgagcgtactgagccaatgtcatgtggcattgtgaagatgcaaaacaacgaaactgttaatatttcatcattacgttcattgcttccacaaggatctaggatgtcatctggtatctgggacactgatattgktgtcagcactttcaataaaatatatcaagtaccctgaggtactttcccatgaaggtttaaaatccttcagacacaaaaatcacccagtaaatctagggaagcttttttaaacattgkgatamcaacatacmaggattactaaatcattttagtaatgtgttaggagaaactaaagggaatagaaaatatatcaatcaatcaatacatatagatattattgactgataatcaaaatatatcgatcaatatagcagacatagcttgattcactaaattaagttctttaatattatatattctacttgttgtaaggaaaaaacaaatacctccatggtattttgtgattctttctagtaccagagcaggatgatgacagagcaatgcagacttcacttttatagaatctgtatga

SEQ ID NO: 2342 - DNA, 443 bp, Homo sapiens
  SITE (373): n equals a,t,g, or c
  SITE (390): n equals a,t,g, or c
  SITE (409): n equals a,t,g, or c
  SITE (429): n equals a,t,g, or c
actcatctaaactaagggagctgggagtaggtggccataccttggccctatgtgagtgattgtgatggaaatatcagtaggtaaccaagcttatgggtctgtgcatcagtgatccacacacaacacacatcttggctgtcggctgcagcagccatgtgtcccctgaatggggaagggcaaaaggagctatggctatgtgcctggggaggtggtcttcccaacgggatggatgatgctatgtttcctgtctgagccttctagatgctaagtaaatgtgctcttagattaaagcctgttggcatcttcaggtgactgccagtttcaaacccactttttgctgcttcaaccaatggcatgcgccgggcaaacggtnggtgctgctggatattnggaagcagggcagtggganccccagtttcaaccaggggngggctttccagatt

SEQ ID NO: 2343 - DNA, 617 bp, Homo sapiens
gggctgaaagcacgttaccagacaatgagcatcttgcccatggagctatawaaagagtttgcagagtatgtcaccaaccattatcggatgctgtgtgcagtcttggagcccgccctgaatgtcaaaggcaaggaggaggttgccagtgcactagttcacatcctgcagagtacaggcaaggccaaggacttcctttcagacatggccatgtctgaggtagaccggttcatggaacgggagcacctcatattccgcgagaacacgcttgccactaaagccatagaagagtatatgagactgattggtcagaaatacctcaaggatgccattgragaattcatccgtgctctgtatgaatctgaggaaaactgcgaggtagaccctatcaagtgcacagcatccagtttggcagagcaccaggccaacctgcgaatgtgctgtgagttggccctgtgcaaggtggtcaactcccactgcctcccatcttgctcctgcggtccctccttccctgtctctctcacccctgtttccacaccctcacctcctaccacccccctcagcatgttccctggaagctgagggtctctggggctcagtcccggtctctctctttctcc

SEQ ID NO: 2344 - DNA, 429 bp, Homo sapiens
cagcatggagtgtaagaagaaatgatgaaatggtgctccctgaaacatctcttctttaaatttaattagaccaaattatacgcaaactagtagatgccctgggaaggcaatcaacattagggctaataaaaagcttgagtagtataaaaaggctgggggaggtgctgtggagcctttctaacgcctatgagaggcaaattaaaaccaattgcgaaacatggaaactggatgaatttcaatattgatttagaaattaattttattatgttgttctaaatataaaaataaaggctatacttattaatcttccagaatttggcatgttaacacctatgcacaaagcattttatggatctttatatgctgggagacacattatgggctgacttggaagttttggcagacctggggttcaaattctagcaactt

SEQ ID NO: 2345 - DNA, 530 bp, Homo sapiens
  SITE (394): n equals a,t,g, or c
  SITE (448): n equals a,t,g, or c
  SITE (502): n equals a,t,g, or c
  SITE (518): n equals a,t,g, or c
ggaaaatggtccttaatacctatatagggttttttaaaaaactgtaccctataatgcagccacagaagatctaaataataaacaattgcgcatactattaatatatatttagagcttttgttaagtacatgaaaagacagtattgcatagtggttaaatgcatggactctgaagccatcctgtttgggatcatcctggctacattgcttactagctgtgtgacaatggatataggtgcttaatgtctctgtgcctcagtttttgtgtctatgctacatgtggtaccactggggaagttgaaggtattcaggaccacagaattggtaactggaaaccaggtctgtctttttcaactatgtccattagattgcatctgatattcaaaatttcaagnaagattctatcaaagaataaaatatgtaaggaaagaagcatatgaaggacatgnctggtatatttctggcattattgggaactcttaagtaataatgattatctatgngcttaatagatggcantgggtgtgtgtg

SEQ ID NO: 2346 - DNA, 522 bp, Homo sapiens
  SITE (510): n equals a,t,g, or c
  SITE (517): n equals a,t,g, or c
gtgctggaaaggagcttccttacttattakgaacctcaggtggacctctcatggttgcagatggcttctcacttacaaaggagattgtgaccagctgttgagaactgtttggctttacttccttcagagaccagacttggttgtatgtcagagtagtcccccccttatcctcaggggatatgagcccagaccccccaatggatgcctgaaatcacagatagtaccaaaccctatatatgctatgtttttttcctatacatgcatacttgcgataaagtttaatttataaattaggcacaggaagagattaacaacaactatwaataaaacagaacagttatwaaaaatacagtgtaataaaagttatgtggaagrtgrtctctctttctccaaagtatgttattcgtatgtaattwttttcaggttgccgttggtatgggktagctttaaaccccggaaggggattcgcaattagggggggtttaccctatattcctcggttagggtccnctgactnttttc

SEQ ID NO: 2347 - DNA, 424 bp, Homo sapiens
  SITE (45): n equals a,t,g, or c
  SITE (47): n equals a,t,g, or c
  SITE (48): n equals a,t,g, or c
  SITE (49): n equals a,t,g, or c
ttcggcacagtaaatatagctgtttttaacacttatattcaactnannngctctgcttgtatacgccaggctttatatacattggcggttttatttatgtctgtttaacttaggactgtgtacctaagtacagtccatcctcattattcttggattctgtatttgtgaactgcgtacttgctttatttgtaatcccccaaacagtactctcagagccttttggtcatttctggacatgctcagggtggtgaaaaatttgacttgcctgacgagcatgtttctagttraggttgaacaaggtgttgctctgccttttttttttttaagctctcrcactgcaaacaagtgtccttttcatggtctattcagtgccacatgttttccatttttgtggcttttttctgggtgactttggctgtttaaa

SEQ ID NO: 2348 - DNA, 200 bp, Homo sapiens
tcctcgttggagagaggatggaagagaagacgctaagatagggctcaactataaggaatgaattgtagaattaagccacctgcctataatcagtagggctttccttttttatctcttttgctcattattatcacaccatatccctgarggtgaagaacaactttgaagargcaatgcctgataaatctggaataggggag

SEQ ID NO: 2349 - DNA, 138 bp, Homo sapiens
tttctgtagctctctacttgagtcacttggagcagggattctgaacgctasasacctgaatacccagtttgtgaataagtttcctgtctctctcttasctgcttcacttcatattcttagtatctttgttaaagggaa

SEQ ID NO: 2350 - DNA, 687 bp, Homo sapiens
  SITE (11): n equals a,t,g, or c
  SITE (13): n equals a,t,g, or c
  SITE (452): n equals a,t,g, or c
  SITE (555): n equals a,t,g, or c
  SITE (645): n equals a,t,g, or c
  SITE (665): n equals a,t,g, or c
  SITE (678): n equals a,t,g, or c
tgaaagactcnantttctgagtagcatgacatttctgcaggcaaaggaagtgagtatagactcccaattctcttcttttccaggatgtacactagaatctgaagcatcctcttcaccctcgctccccttcaagtttccgaagccactaagttggcaatgaaattattttgtttatgcaaggagcaaaatcacatgtcaagctgataaataatgtatgaaatatcatttagttaatttcaaaggcgccaagactatgacaccattgcatccattcagatgaaaccttggttctccctgtgttaggggagagatctaaatgaagtatgtcctttatatttagatgactagatctgtggccctcctggcttgtttttcagggcccttaatackgatcagaagaaattgctatcacaaaatagctttcaaaacagaacagagctttttcttattgntttcattccaaattacctgaacctcagctttgtctgatcttttcaggagcaagaggttcacacattgcattcacagtatgcctacaaagagctactgagttgnttttaatgcattttatgctacagccaccagtggccaaattataagccagaaatcttgtaagtagcatggcaaaaatcttcattgcaatgnaatttggttatgagtagatnataccattaaaanctggaagag

SEQ ID NO: 2351 - DNA, 678 bp, Homo sapiens
ttattgtgcttctgctggaagggtctcttgtatgggcgccccgtgaggacccagtccttctccagggcattcgagtctccattgcacaatggccagccctgacttttactccccttgtagataaactgggtttgggttctgtggttccagtggaatatcttctggatcgagagcttcggttcctgtcagatgccaatgggttgcatctgtttcagatgggaacagatagccaaaaccagattcttttggaacatgctgcactgagagaaacagttaatgctttgatcagtgaccaaaagctmcamgagatattcagccgaggtccctacagtgttcaaggtcacagggtcaaaatatatcagccagagggggaagaagggtggctctatggtgttgtgagccatcaggactccatcactcgtcttatggaggtgtctgtaactgagagtggtgaratcaagtyggtagatcccagactaatcyatgtgatgctgatggataattcaacgcctcaaagcgaggtacagtaatggactgcattcctgagcagactcatgagcttgcattatcttgctrtgtgtagrtcccttatatatgtgtttwccatggatgccttttgagttgttcagctttagccactgtacatttttttgctctctccacagtctgtctaattaa

SEQ ID NO: 2352 - DNA, 474 bp, Homo sapiens
  SITE (143): n equals a,t,g, or c
  SITE (244): n equals a,t,g, or c
ggcacgagaaatggtggtctctgtaatagccactcagcactgctgttttaggacaaaagctgtaggctgtagataatatgtaaagaagtggcctggactgggcaccgttggtggctcatgcctataatcctcccaaggtgctnggattacaggcgtgaaccaccgcgccaggccgagaaatttttttatgaagtaaagtttgtgtgtgatgaaatgcacagatctgaagtgtatagtttaatangctttaacaagtgtatatactcaggtaacctcagtcaagatctagaacattttcatcactctagaaagttccctcctgtcccttctagtggactccatcccacagrtaaccgttgtttaaaargtatattgarcaaacatttttgcttatgaatataattattacaactctttttaatttataggggataaaaacattcagatggcagatcacaaaaaaaaaaaaaaaaa

SEQ ID NO: 2353 - DNA, 490 bp, Homo sapiens
  SITE (1): n equals a,t,g, or c
  SITE (12): n equals a,t,g, or c
  SITE (21): n equals a,t,g, or c
  SITE (57): n equals a,t,g, or c
ngatgaattttnaattgtccngcaaccaatctaaattagtcctgaccagagccttgntctttctttcagcctatttgcttttgcccttcagggttagtagctggcaactaaatatccactagaactgaatcacccgaattatcatagggctgagctaatatcctgctgtagatgctatcataggcagaaagaaaattgaaaggcaagttctaccatggcctgctgtagcagccactgttaggtccagactccatgctttaaagttagcctcaagattcctggaatttttacttaggctaaactagggaccccccaaaggtgtcccgagttatttttagtatccctttgttgcaagrtagtataggatatggggcaaaactagatctcatgctttcagtagttaataaccttaacagttgtcatttatttaaggcctgtgctgaatgctttatatagtttttctcatttattccccaaaacaattattgta

SEQ ID NO: 2354 - DNA, 235 bp, Homo sapiens
ctgcatccacacactaccttgtttggctacacttggagtttctcctgcatctgcsaactctactgccaccctgaagtcgtaatccctatgttgttcaagggtcgattgtattttcctttcacagtctatttgtgtagctagtaggcaatcttccaaaaacttcaatttaggtcgttccggagtgcttttcgagttttcagttttcttctatgccagtgaaggagagggatggagg

SEQ ID NO: 2355 - DNA, 550 bp, Homo sapiens
  SITE (2): n equals a,t,g, or c
  SITE (349): n equals a,t,g, or c
tnattcctccatcacagaaggttccttgaggtcctgtattctgaaaatagatgcatttcttccaaaatactggatagcttttagatttttcaaagttcttggcaagtctacttttggaaaccttgactgacttgcgaatatgatttctccttttttcttagctccgggttgagctcccttytcaagagctcttatgttataaagcttgtgttcatgagcagagaaggactgatagtgggtgttattaatcattgaaagatgtggctgtgactgctattatttcctgtgttaagcttcccaccagcaaacctggccaagtgctttggcgctgtggaaacagccttcgtgnacacacttcttgacccttcactcccttcatgcccttcttcccatcaagacttaatgattggctgggcatggtagctcatgcttataatcccagcgctttgggaggtcaaagtggaaggatcacttgaatccaggagtttgagaccagcctggaccacataatgagaccccatctctccaaaaaaaaaaaaaaaaaactcga

SEQ ID NO: 2356 - DNA, 433 bp, Homo sapiens
  SITE (430): n equals a,t,g, or c
  SITE (432): n equals a,t,g, or c
gggattacaggcgtgcccggcctgacataatttatattaaccaactcttgagatacaattttgagagccaaacctgggagatgctaaaaagtcctctggatattatagggattcctaagtttattaccacatcattacaaggtacgtgggagcgacctttggttattagctatcacaacagcagactcaacctatgtaggtaggtttcttttactttgtctttgtgggcagatgatttatgttagctgcactcttgtagaacttgagtaataatgacactaaactcttgtgtsttttaatgttgaaaatatcttcatacaccaaatatttcaagtattttttgtgtgtgtttgttttgagaaagagyctgggctctgttcacccaggctggagtgcagtggcacaatacatgagtgcactgcagcctcantnt

SEQ ID NO: 2357 - DNA, 405 bp, Homo sapiens
  SITE (53): n equals a,t,g, or c
  SITE (331): n equals a,t,g, or c
  SITE (393): n equals a,t,g, or c
  SITE (402): n equals a,t,g, or c
gctccaccgcggtggcggccgctctagaactagtggatcccccgggctgcagnaattcggcacgaggtgaactagagtcttctcttggaagactttgccaagcctccctgagtttgttagcatactgagcatagtaggaactagccctttcctttgggctgcttccatttctccatctacacagcaaataagagaaggggaggagaaataggagaggagcttggaggctttctgcccacctctccataagttagctgcatatcccagggagacagagttccaatttaaccaagtgtgggacatatccctgrgccatctgrgcacctgatgnataagaagagattgctcgaaaggactatcgggggtcttcctgggaatccgggctttccaaanggcccaaanatt

SEQ ID NO: 2358 - DNA, 424 bp, Homo sapiens
  SITE (45): n equals a,t,g, or c
aacatttctgttactttgcatgcaaactagtttactgtgttcacngagtggccagtcatgggaccataagcaacacctgctctttgagtgtctttcataccgttaccatcagcaccagaaactccaggtgccccaagcttaaagtaaaaatcctaaagtacgttggctcctcccatgcatgtgctgggtccaaaccatgctgttaaatatcagaagtttctatggttatgattaaaaaattaaatgacaataatagccccaaaactatatattttkgatactatttamccargattatcacaaagacacagtatttgmcacattgttattcttctatgttttataaatattttaatgtgacaggtagaatctgtactttttctgtagaacggtaatattttgaagtatatatatagttaaatta

SEQ ID NO: 2359 - DNA, 461 bp, Homo sapiens
  SITE (458): n equals a,t,g, or c
ggccacgaggtactgctttgattggacaagagactgatttcagtagttttctcttgataagagaccactggccgtgggcgggttctggacagtttacagaagctatgcacttgattgcctttgtgtccctgcttcaccttttgaagcatagggcctaattataatgtatttaaatgttgtctccaccccaaagtgaacatgggttgcatgtaacaggcatgtttactcagcatgcatgcagcaggatcccttcacaaatattcagagctccccctattccctgttgaatatgtatatgtggccagccagatcaacgtaaatcactattcgccctcccctccctggaaacctacttttcgggtttcagcaggaagctatgcctcccagtctgtcagaatggccacttgcaggctgtaaccctttataaaaaaataaartctcctttctaaatttatacnttt

SEQ ID NO: 2360 - DNA, 528 bp, Homo sapiens
  SITE (444): n equals a,t,g, or c
gaattcggcacgagtatgaatccaagtttccttttttaagaaaaaaactaagtaaactgctttttaaaaatcaggaattctacttgatgtttttaatatgaaagatagttcatttttgttgctgcccwggttcaatattttactcgaagaaaattaagtagaactgtttttactggttttaggagatataacacctaaataaaggttctaagtgactttttgcactggagatagagacagtgtcttaatgtggcatgagaataaaccaggartgccaagcctttttttttcaagctctagtttcactacttactggagatgttactttggcaaagcctttgagaatgtaaaatagggaagacacttcatagagtggctgcaaggtggctggacatggagtgcatgcttaacatatttcttttctctccttccctgttttaaganatgaaatacgcatgctgtctctctcccagagtagctgtgaaataagaaagtgataagtgctaacaaatatatggtactcttgtt

SEQ ID NO: 2361 - DNA, 208 bp, Homo sapiens
  SITE (208): n equals a,t,g, or c
ggcacagcatgcccagccctgcaaagagtatttttctagcgcctgggctggacagttgtttctaaaactaaactattttggtacctgcttctgggccagtccccagcctgtcatgagtgtgtgtgtgcgggcatrgatgtgactgggagctctgctgggcacccacatctggggcctagtcargtgtgtgtgtccggcgggggggggn

SEQ ID NO: 2362 - DNA, 774 bp, Homo sapiens
  SITE (654): n equals a,t,g, or c
  SITE (706): n equals a,t,g, or c
gaccctgttagccctggacatcaagcctggagtgagagatggcccgaaaacccctgggacctgatacaagcaagggctttgggatcaaccaggctctcactaacaggcatcactcaaaaagaaaagcatttatttaatagagmgtttcagaaaatgttccccttattattttyctttgatttttgaattggaaggcgcttagagatcctgtcctttaacccttgcgttgtgcagatgasagatgtgaggtcagggaagtttagtgggctcagggacgcacacggagttcacagggtagcccgatgcagtgggagggtcgatgggcttctgcctcagagttcttttcaccctaacatttcctgtgcatttgtttacgtgtgccagggatcgctctaagtgctttgtacacattaaacttatctaatctttaccctaactgtgagargtggctgccatcatttttatttaatttcactttgcattaaatgatgttggcacagtgatgtttaagtctgttgcccacagtctcctgcctggaagtgacagtcaggattcaagccaggcagtgggagcctcctggagccagccctcccaaacctcctacccccatatggctcacatagcctcctaaaaaggttttgtgactgatctganatccctaaccattatctatgacttccatattccctgaaccaaggggcaactngggaaagcatttccaagaatactcccaggaacaaagcacccatccaacataaatgggttgcaaactcc

SEQ ID NO: 2363 - DNA, 622 bp, Homo sapiens
  SITE (7): n equals a,t,g, or c
  SITE (14): n equals a,t,g, or c
  SITE (612): n equals a,t,g, or c
gggcacnaggaggncaagttaaatatagctttctgagcgctttgtgttatcactcggtgtatatagttcatacttttgtaatctgtcaaaatactaccttcatttattcttctatacacatgtgtagtgtgtcaagaccctaagaacatgtatttgaaggaaggtctaaccagggggttttcaggggcattgtctgaccacattctttttgtatccaaatagtgctgctagaaactgcactgaagtggctgaggataggttccagtgatagagttataattttgctcctttgcaaacaaatggtatctaattaataactagtctgacatcagaaaataaaattgaggctgatttttaaaaatttctagtagatttttggcctttctttcctgtttttaaaaatcagtttcattttcatatttcatagatcagctattggtaagctttttgatttccccaaactatttaatttcttagcagaaacattagtattttaggtttctataaacactataagtgatagtttcccccatcctttcattggacattatttgccaatggctgccagtcattctggcatgaaaggtgtgtgtgtgtgtgtgtgtgtgtgtntgtgtgtgtg

SEQ ID NO: 2364 - DNA, 694 bp, Homo sapiens
  SITE (631): n equals a,t,g, or c
  SITE (689): n equals a,t,g, or c
ggcagagctacaccgccgtgcttataattatgtatgcgtgagtctgtttcttccttagcgtctgatttctctttctcaggcagttttaatctgttgatctatttgttactacctgcaccagggccacacttttttttccttttagaaaaaagggtcttgctatgttgcccaatttggtctcgtactcctgacctcaaattgtcctcctgtcttggtcttgggattacaggcatgaaccactgcttggcccacattctctttacagtagtttttgacagctggcaaagcaagtccttatgtaaccccttaccaatacctgtaatwattttycagaagcaycttctaattgttttttagcyattkgaattatcacataagaatccacctgtcaggtttcacaaaaaaacakgataggctattgggattatgagaaattgataaaaaaaatcactttggggagaatattattatgcttcttaatttttttcctttaagtcagatgggtagcgtggtagcatcctaacaaagtttgaaggaggcacatcgtacacatatgcctgaaaacctgatcatcatgcttatgaaccacaaaaggatcttatgctttctttaccgactcgttaagtataantattcccattgagaatttgcaaggcttctcttaaaggttttctagggacttgataggntatga

SEQ ID NO: 2365 - DNA, 786 bp, Homo sapiens
  SITE (491): n equals a,t,g, or c
aaataagtttaatatattaaaaaaagacaacagagtaaacaagaagcactgaggcatgagacaacatgacatgcaaaagacagtaaagttgaactagtaacataatttctaatgtctccaaatgacgaaagtagcatacagctcttaaaactgacatgagaaagtgcatttagagacttcagtctttggtggaagttcctagtgtatgaaatggaacagatgagaaaaggccttggttcccatgctgtgggaatagggaactggtgaagggctaagtatcaraggacgtgtaattcagataaatcactccgttggttacctggagggtgaatttgaggagaatgagactggaggcaggagcaaggcagtaccagtgcaggtgaagaaagaacataggtagaacttggccaccaattagaaaaggtgagaggaggagccaaggagagsgaaacatgtgggatcwcggccaggtttcaggctggaacaggacnaatggcagaagcatccaatattgaaaatagagtcagaggagccttcttgagtggagagggataacagggcattctaggacaggatgggtttgagatttcttgacatatccgagtggaaaagtcttggaagcatgaggccacaccagagctcagtgagggcaagaagatagggagtgtggagtcatcagcttgcaggtgacagctgaagccattctcccacttcaggagagaagcacatgagcaaagagctgagattcctggagaacaccaacattcccaagtgagctgaaagaga

SEQ ID NO: 2366 - DNA, 370 bp, Homo sapiens
  SITE (239): n equals a,t,g, or c
ttcggcacagcaagacttagagaaatgaagtaacttgcctgaagtcacacatgggagctaggggctagcatttcaagccagatttgcctggttccaggattcatgctttgtggcaagagccttgttggaagcccgggtccttctgaattcacggtccattgtgctctgtcttcagtcaggccagattttaaacaggaatgaaagaattagcaataatgtttccttatgcaagtcaatgnaacttcttcactttagtttcctcatttgtaaaagggggacgaaaataaatacttgtgcaatgttggggaggttttgaatatggttatatggcacaagaggtactcccaatacgtggaccatatctctgtgc

SEQ ID NO: 2367 - DNA, 384 bp, Homo sapiens
  SITE (324): n equals a,t,g, or c
aacttgggccactagtttaaaaatctcagggtgaagtkattgttcgtatttwacaatagtatgataatttaagcttaaggaagataagagctttacaatcacctattagatcatttttgtttagatttcctttaaattgttatctacttagaaaaattattctaaagattatagttatagttcacaacataataaaagatacttttgccttccttataaaatgttattttcagggttaggraattacctaaaaaaataagctttaatcatgatttatgttctgagactttggaagagggtctatattaatataaatatttagangaaaaaaatgtatcatcttgaaaggccctgaatattttcatggtggtgtttcttttttac

SEQ ID NO: 2368 - DNA, 631 bp, Homo sapiens
  SITE (520): n equals a,t,g, or c
  SITE (537): n equals a,t,g, or c
  SITE (557): n equals a,t,g, or c
  SITE (594): n equals a,t,g, or c
  SITE (621): n equals a,t,g, or c
ctgtagccttaattgaaatcccctgatgcatgcacttgagcagctgtgcttgtctttccatgttggcttcaatcaaacatagatgtgcatcttaatgggagaagggatagtggattatgccacagtccmcttccaggtttacagaatcttagctagtgactccagcaaacacagcaaggttcattttattcttaagacagatccctgttacagtttgctttgtgagccaaggaagacaaatactgattaaccatcccaaagaactaatgagagtggagttggagcgattatccaactgctccaaaaatgtggggattttcttccamaagaaaaagatttttaaatgttgacacatttccacaatgcatatcaaatgtgcatttatattaatttgtgtctgtgtttatctgcatttctaatattcaggcactcaaatagtatctgctactggccaggctttgttttaggtcctactgataagagcagtaaacaaaagataaagtctcttcccaggggagcncacatgttaagatgggncgttgttttgagtggaaggncccaaagaaagtatgaagtgctaaacccatggtatgnttgaggaaaaaaggccttccagaagangttttaaggg

SEQ ID NO: 2369 - DNA, 350 bp, Homo sapiens
atcactcatctagatatctcagactctgaaataatataattgactaatttggaatttataagttaaatttataaggtttttaacaaatatatttgtaatggaattatttgacttttccaaataaattgcataaagatgtaaggattgcaacagtttatattaaaatttttttctggtttgcaatacttgggtggcctgatgaaaagaaattcttcaactttagtctctttcctgcattgtgttcataccactcatattttaaaagttgaccagtactttttgttcacttcttaaatgatgaaaaagaagccatcatgtaatttttttaaatcgtaagtattgtgcaaaaa

SEQ ID NO: 2370 - DNA, 628 bp, Homo sapiens
  SITE (3): n equals a,t,g, or c
  SITE (37): n equals a,t,g, or c
  SITE (70): n equals a,t,g, or c
  SITE (85): n equals a,t,g, or c
acnaaaagcttggagcttccaccccggttgccggccncctctagaacttagtgggatccccccggggctncaggaattcggcacnaggtaaattgtccctggctgaatgctggagtggttttagctggggtgttctgagaaggcttctctgaggaggtgatgtccaaactgagataggaaagaacttcctttgcaaagataaggaagcagaggatgcagtaggtatggagacccagaggcaggaaggggcagtgttgacgaggggagttatgsgaagggcggtgaggtggagaggtcagcaaggctgggtcacagcagacctgtaggctactggaaggagtttgaattttgtttttgtgtttttgagacagggtcttgctgtcgcccaggccagagtgcagtggcacgatcttggctcacagcaacctccacctcccagattcaagctattctcatgtcctagctacttgggaggctgaagtgagaggatcacttgtgcccaggagtttgaggctgcactgtgccagggtcgtgccactgcacccctggcatgggcgacaaagtgagaccctgtctaaaaaaaaaaaaaaaaactcgagggggggcccgtaccaattcgcctaaaatg

SEQ ID NO: 2371 - DNA, 254 bp, Homo sapiens
  SITE (45): n equals a,t,g, or c
agcatccaaggtctccctcaaatggaaatatatccactgaatctnatgcgacttatgcttttgtccctggattgtactgtagtattagttatgccttatctgtataatggtaaaagcaatagcatttacaggtcttacgaatttgtccagtctcaactgtagtaggagctatttgaaagctatcaagaaggaattctgaaaaagacacaaagaccttgtcattctacagagcttcatcggggatcttccatttt

SEQ ID NO: 2372 - DNA, 339 bp, Homo sapiens
  SITE (36): n equals a,t,g, or c
  SITE (326): n equals a,t,g, or c
  SITE (329): n equals a,t,g, or c
ggcagaggcaaataccatcgtagattcaggcttctnagtccaaagctaacaattctcatctccaattcccatcttcaaatattaaaataaactttttttttaagaggcggagtctcactgtgttgctcaggctagagtgctgtggcatcttagctcacagcagcctcgacctaccaggctcgagcgaatccttctgcctcagtctcctgagtgggtaggactataggcatgcaccaccatgcccagctatttttaaaaatttcctgtagagatggggtctccagtggcattggccagactgacctgaactcctggttacagtggantcncttggcctgg

SEQ ID NO: 2373 - DNA, 193 bp, Homo sapiens
cctccgccgcccgactcacacacaccctcccccgggaacggcaagtytcctcgggttccaaggacagggtcaaaagacagggtcaaaagacaagaggcccgaggcgtcccgccgtgatttgcagccagataccgttgggagcgcagcccagagagcgttgggagcgtgtgtacctccagcccaacgatttgtc

SEQ ID NO: 2374 - DNA, 352 bp, Homo sapiens
  SITE (179): n equals a,t,g, or c
  SITE (199): n equals a,t,g, or c
  SITE (290): n equals a,t,g, or c
ggcagagataatatcttggctgcgtaacttgtatcttaccaataaaacttagtgcgttctgttttcctagaatttaagagttacaaatattgatgcttttagtgtggaatttatatttacaaaagtaattacttccagaaagttttctggctaagtcacctcttaaggagatccctgtnaaaattcaccctttgaaaangaaaaagccaaaacactttgggaatcctgagtctgaatgttaaccattcttccccacaaaaagtagtgtctgcttttagtaaactactttncaagtattttaaattggggggattttcttttgggaagctgttgatgtaaaagatcttaagtg

SEQ ID NO: 2375 - DNA, 524 bp, Homo sapiens
tgtccacctcttgttccacacttttatacttccccaaaggcgtaagtgaaccttatctaaattcaagccatttactgttattttccatcattttacctttgtcttaawttgctaaatacagttaacacttgaacaacacgggtttgaactgtgcggatcgatcaatgcaacctggtacatgggattctaracaccgtattgagagggccgacttttcttatactcacattccacaggacggacaggcagacttgagtatgcttggattggggtatatgtggtgggtcctggaaccaatcccacgtatatagtatatgggggatgactgtattgcattaactgaaagagctatgattagcaaactaaaaagcggtgtgtaaacactgcttctttataatttatggaaatgttaaataagatcagtccccaatgtttacacttattactaacctttattacttgactttgcttctatttcctagccacaatttaaaaaacaaaattaaaatggtatcaacaacaaa

SEQ ID NO: 2376 - DNA, 517 bp, Homo sapiens
  SITE (16): n equals a,t,g, or c
  SITE (466): n equals a,t,g, or c
  SITE (474): n equals a,t,g, or c
  SITE (483): n equals a,t,g, or c
  SITE (508): n equals a,t,g, or c
aaaggtttggtgagtnaagcagtggctgtaggatgctttaatggagatggcactctgcataggccttggtaccctgaactttgttttggaaagaagcaggtgactaagcacaggwtgttcccccacccccatgcccagtgacagggctcatgccaacacagctggttgtggcatgggttttgtgacacaaccatttgtctgtgtctctgatagcattgagaaaagtgaaagggcagttttgaaggtaaggaaaatagtgkyattgcttggatccactggctcatgccactgtctgggttggttagaagcactggaaaagtcaaaccrtaactttgagrattaggtgwtcagggawtcagaaggaaagatgcaaactttggctcttttagggcgaatccatgtgcctgcagatggaggtcatttaattatcttttacacagtcctattaaaatttataatgttattnacatcttntttctaccnttaggaatggttaaaaatatttctncggtaggcc

SEQ ID NO: 2377 - DNA, 574 bp, Homo sapiens
  SITE (94): n equals a,t,g, or c
agtttctctggaagaagagttgtaagaaccaagcctggtttaaggattcaggtggtggtatctcagaggtaatctagtccaactttcatacttnggagctgagaaaccaatgttmcagaaagctaagacaatgattctaagttccctttttaaaatgtattgaaatgtgttgtctaaaaattaaaaaataaaaatatctgtggtattttgtgaagacagaggccttggtttggagtagatactgtcacatgacttctcacctcgactcttttattgtaaaagaggaagataataataccttccagggaacattcttcccccttctccattgtggtaggaattaatcactgcccaagactcctggttgaggggctgagtgaagtgcaggcagtctccagccaggagctacaccgtttgttgggctaccctgtttgtagggaggaatgcctttctatgtttctaacttgcccaaagtctgcatccttgtaaagtagtgttctgaatgtgagcgatcatattcatgaagtgcctggcacatagtaagcactcaataaagagggatgtaatttttaaa

SEQ ID NO: 2378 - DNA, 676 bp, Homo sapiens
  SITE (18): n equals a,t,g, or c
ccgggaagttactgtagnttttccgggcattacgtaagggtaactttccctacctctctctaggtkgggaargrgaacaaaacaatgagaaaagttcactgccacaatatcagacagctgtcttttctgttttggtttgtgtggtttcctgcagtactgaggacacaaatttctcaagtactctgcttcagggcatttkgcataatgacattttatcacaagrgaaaggaacaaaatctcttgaaatgaaatttccataaatggctatttgaacagtttctaaaaagaatcatttgcattccaaccccacaccccatttctcttctcctcactcacttcttgcatatgctacaatctcacctttccttcctgtatcttttgtttaatctttttcctctgatttccttataagcaagtcttcacaaatcctaatttagtcaagatccaaagagcctccacttcttcaatatgggcttctctaatgtctaatctacttttgaaaaatctgcrcttctctatgtaatttgcaatacaattatgctacaacttttctatagaaaagtrataatcaggagaatgaggacttagccctaaggatttgctgcaactccagaatttttgaaatgttctttaaaatcatgtcaattttgcattcaattccactgtttgaagataa

SEQ ID NO: 2379 - DNA, 620 bp, Homo sapiens
  SITE (620): n equals a,t,g, or c
ggagctccaccgcggtggcggccgctctagaactagtggatcccccgggctgcaggaattcggcacgagcacaaaaacacacaccagaatgttcatagcagccttatttataatagccaaaatctggaaacaacacaaatacccatcaactggtgagcagataaacaaaagaaacaacataaatacccatcagctggtgagtagataaagaaaacagggtgtatccataccatggaatattgttcagcaataaaaggggaagaaatactgatgtttgctacatcacgaatgaacttcraaaacatatgctgaaagccaaatgaaaaacaacatattgtatgattttcatttatatgaaatggccatttatatgaactggaaaggcaaacttatagraacmtaaagccgtggttgcccagggctgaggatttgaacaggrattgrctgcaaatagaacttgagggaattctgttgggcaatcaaaatgctctaaaactagatagttgtgatgattgcacaaatctataaatttactaaaatcattgaattgtaaccaagaaagaaaaaaaaatcctttcatatctttattcccagaatatctgtgacctgcagctaatccn

SEQ ID NO: 2380 - DNA, 398 bp, Homo sapiens
  SITE (112): n equals a,t,g, or c
  SITE (123): n equals a,t,g, or c
  SITE (190): n equals a,t,g, or c
gcccccgccccctagggcccccccccaagggccggggattacccaggccgtgagccccactgcacccggccccccagccatagaaattccccaaagggggatataaattaanccatatccaancccaaattaccagtttaagttaacattttttaaccctgtccctcagttattacactgtatttttagncccaaaaaaagatgaaaggatttatcaggatgttttgaggggatagatttttaaataggtcattttgaagatacttttgagtagacatagtcattacatagtcattaaaaaaccagagctttacatatttttataaaataatttttaaattctaaaagtaataaatgaccttagggaagatttggaaaatacaaacaagtatgaagag

SEQ ID NO: 2381 - DNA, 637 bp, Homo sapiens
  SITE (609): n equals a,t,g, or c
  SITE (622): n equals a,t,g, or c
ggcacgagcaaacttgcatgtgtacccctgaacctaaaataaaagttaaagggaaaaaaaagtaaacatgttgtagaagtcacaatctatgacagtcttgttctttgccttctccattgcttcttagtaatctgtaaagctattgtttctgatatgagtcagtttctttgtccttcccttttacatttcctctttttttcttaccttttttgagggatcctaagagagcgttttagaatggggaattcttaaagaaacctgcaaaatatattttctccattatgttaaactccatagcaataaacttggtttaatgcggtcagttttatcacagwtcaggcctccctaaggcgaaggagctaagccagtaatttgggaaggctttgaagccacatgtgcatgtatacattaacctctaagactaaccataatttcaattaacataaaataatctaaggacatgctgattagacaccgtgtggctttaacaaagcattctgggcagggggttggggaatagrgaagctttaactatycctagcaccagcaagsagggctttctttacycatttatwacawattttctcaaccttcttttcttgcgatgtncttagagactaanaacaacaaaattcca

SEQ ID NO: 2382 - DNA, 406 bp, Homo sapiens
  SITE (374): n equals a,t,g, or c
  SITE (405): n equals a,t,g, or c
tgcatcatgagtttcctgctagtgtttgaccactgggtactcctgaagatgtttttwagtactagggatgcttttcagtattagggatgcttttttcagtactagggatgtactagggagtactgagtactcctgaagatgtttttcagtactagggatgcttttttcagtgttagggatgcttttcagtactagggatgcttttttcagtgctagggatgcttttcagtactagggatgctttccaaaatatcacctctttaacgtttactttttctagtgtgtgtctgggatccaaaggacatgaataagccactcataattaattttgaggaagttttatycaaatgtttatgtttcctaactgcaaaccnttaattttgggaaagggcacaatgtttaacnc

SEQ ID NO: 2383 - DNA, 425 bp, Homo sapiens
  SITE (16): n equals a,t,g, or c
  SITE (18): n equals a,t,g, or c
  SITE (148): n equals a,t,g, or c
  SITE (406): n equals a,t,g, or c
attcggcacagcccgntntgccatcctcaaggctaacctgcgcaagtccccagttgccaaggatgtggacttggagttcctggctaaaatgactaatggcttctctggagctgacctgacagagatttgccagcgtgcttgcaagctnscawtccgtgaatccatcctgtgagccaccatgcccagcccaggtcatcttttgagggcatggagagaagactttgagcatcccacttttgagattgtgtaccagtcgcaagcccctatgacacactttttccccaaagtagagggctctgactatgttgatcccaagagagatgggaaagagcattgaatgaggattccaaagtgattggggccttagttcgtttcctcatgttggtgttgtgaagaattctgggtnaggataacagcatgtgtgc

SEQ ID NO: 2384 - DNA, 467 bp, Homo sapiens
cagctcaatgtgtaagcattttggtgcctgtccactaagtttcagggagcctcattcttccttcactcagggcagcatttgctctgagagaggcggcagattcacaagagtaagtagacagtctattgaggtttaggtttaaagtcttcctccagatactccagattgaatgtactaattaaaatagcaactacagtggtggagcattgagaatgctaatgaatgttttaaccctttggaaacctgatgcattcccataggttcatatggtcattctccaaaacactgggcattggttagaatggagtagacagtagatgcttagcttgaggtgggagtgaagctggstcctcaccattttttatatctcaagtcactgtggaaattactgggtgctttgtaaagtcttcctaacactggagctctaggactttgttgcttcctttcttccactcagccatgtttac

SEQ ID NO: 2385 - DNA, 136 bp, Homo sapiens
  SITE (115): n equals a,t,g, or c
tttttatcctattaccccttcccttggctaccaccccctaccctccacccacakccacagtgctttaagataaaggagattaatttcgcctgtaggaatccatgggaaacttggnccttgcagacttcaggtcaag

SEQ ID NO: 2386 - DNA, 177 bp, Homo sapiens
  SITE (142): n equals a,t,g, or c
ggcacagctgacttgggcacacaactggccatgtgcttttrtsctccctcacctcctctaaccttcctcctctgcagcgttctcacactttcccgtctgggtagtttgccagttcattaactgcttttcttttctccctggncatgtctcattagctactggtagagatggctgttt

SEQ ID NO: 2387 - DNA, 130 bp, Homo sapiens
  SITE (65): n equals a,t,g, or c
agtagaatgcacatttctaagacattcagggaagatttagtagaacacttaaaatgaagcatggnagggttatcactgggagaatagttagctgtatggtataaagccakcttcccaaggagcttaaata

SEQ ID NO: 2388 - DNA, 320 bp, Homo sapiens
  SITE (197): n equals a,t,g, or c
  SITE (198): n equals a,t,g, or c
actgatagtttcctgccattttgtgtcatcagtggtacttgggtcccagaaatggactggttcttactaagcagtgggaatgcagcaatragcagtgagtatcactaaagagcggacccttacaccaattcctctcattgttgatttcaacaggttgttgcaactgaagaagatctcgtcccacccagtctgcgggnncatcccccagagcagacgggctagaccacagaatcgcagctcacattgtgtcccttctgccctcactctgtctttcagagagggagaaaaagaatcttgcatgacatatttttatctgaaga

SEQ ID NO: 2389 - DNA, 253 bp, Homo sapiens
ctgattgcagagccattctcccttagtgaaagggacagatgatggtgaccactacagagaacaggtaagaaggtagcctgagtcccaaccaacccagggaagccacagcccctgcacactcaggaggcaggacggatgttgctttcttcttccttcacaagggagragaataccttcagaatcagrttcaaatcttgractcttcctcattgttagctctgtgaccttgggcaagttaactttaggcctgttt

SEQ ID NO: 2390 - DNA, 187 bp, Homo sapiens
  SITE (161): n equals a,t,g, or c
ctatccaatcaattrawatttwagtragggaaggtgggcaagggggagaragggaaggtaataaaggattacaagtggtaggaaaaggcctacaaacaatgccaagagtaagcatgctttggaaatcaccaggggcatgttttccaggaaaagctttgttnagggaatgagaactaaaaccagtgag

SEQ ID NO: 2391 - DNA, 298 bp, Homo sapiens
  SITE (136): n equals a,t,g, or c
  SITE (151): n equals a,t,g, or c
cagaaaaggagaacatgtgctttcttttcacatagtatttctraatgcccatgaatataaaaragagaaaacaaaaccaaaaaagtctaagatacatgatattcccaaacaacaaaaaagacaggaagctttcggnaatcagaaatctggnccctttcttaagggcaattccctgttggtttggagaccatgctggttgttagaaaatttagataaggaacaattttatttctttgccagcacagttcaaccattattttctgagtaccattgtgtgcaaggtcctgtgtccagattc

SEQ ID NO: 2392 - DNA, 348 bp, Homo sapiens
  SITE (229): n equals a,t,g, or c
  SITE (316): n equals a,t,g, or c
aagacaacatgttaatagggatgagcttccattagcgcataacttratggaaggtcctggaccctgaaatcacggggaatatcccaaaaraaggactggagtctcagtgtagatacgcttcttgtggttggcagtgtttatacaatgcctggctgagctagtactgtataaaaggtatccagcagatatcatcattattattgtagatgttgttattatagcccaggtnaaggggatctagtgggaaagtggctgaggaaaaaaggatttcttcgaggtatttaatttgaattgttttagcccttataggtgagangcacagaggagaagtgtgagtctttgttcccc

SEQ ID NO: 2393 - DNA, 251 bp, Homo sapiens
agggataaaagctaacccttgtgggtgttggtaaatcaataattaattggagatcttccatgatatttcctcataagaatcattgctaaaattgttgtaatgaactacacagactcccaagattgcaatagtcaaacaacacaaactgttgkaagtcatgaagggatatgyaacatggctccttggttaaccttttggtagggatccagtttccaccatcatggagtcctgttttcaatattaaatttaca

SEQ ID NO: 2394 - DNA, 314 bp, Homo sapiens
  SITE (295): n equals a,t,g, or c
  SITE (296): n equals a,t,g, or c
  SITE (297): n equals a,t,g, or c
aagtctttagtaacttgcttcatttaggttattcttgttatttctagctgcaaaatgtttatctycaagtsatttgtctttggtttagctaaaatgtgacttttttttccctaaacattgagaaagaacttagcatttttttaatttacactgacaaaaatatttggtttaagatagctttttttttgagtttctattttataaagttactatacaaaaggggaaaacatactaaaatcagtgcttttttttgagacagtttcgctccagcctgagcaacaaagtgagactttgnnnaaaaattttttttttag

SEQ ID NO: 2395 - DNA, 516 bp, Homo sapiens
  SITE (396): n equals a,t,g, or c
  SITE (448): n equals a,t,g, or c
  SITE (454): n equals a,t,g, or c
  SITE (494): n equals a,t,g, or c
aaaaaacataaactcttaaagttctcttaaagttaaacggttctctaaagttctttccataagcctcaaatgttgaattcagcagaactttataggaatgcaagctccatggatgcaggaacttttgcatcttttgttcacctagtacaatgcctggtacatagtaagcacttaatacggaattgtcaaactgatgattgaacatcaacaatgtaattattgatgcttatttcaaacgctctttctaaattcataattatcttgttctaacaaattctttttctataagagatgtctatcactgtaagaaaactaaaatagaaaatttaaatttgaagagtgatcatttatattagaaaaggattcaattttaaaattttctaatccttccaaaancactttctggtgcctttaagtgggttgcttacaatccttactatcccatccngaccancaggttaggaaccaggatccatgggtgggttccttagggnccaccttttttggataggttgg

SEQ ID NO: 2396 - DNA, 133 bp, Homo sapiens
  SITE (120): n equals a,t,g, or c
aggaaaaataattaatgagtactaggcttaatatctgggtgacaaagtaatctgaacaacaaacccacataacacgagtttagctatataacaaacctgcacatgtactcctgaactggnaaataaaaagtta

SEQ ID NO: 2397 - DNA, 120 bp, Homo sapiens
tgtaagggtttggtctgtaagggaatttaatccatgagtggttttgtcctgtaggagttcagtwctggactggggtcagtggtaatgtgaacatcttggtggggagttaatggtctggtg

SEQ ID NO: 2398 - DNA, 305 bp, Homo sapiens
  SITE (170): n equals a,t,g, or c
cagcaccagtctccagaacaatatgcaattgaagcctgttttcattttgagtgttaggaattgattagatgtagccctaacattttaaaaaattgtcagagcatttttttaaatgggaaagaagcctgggtagcaagaaatttggtgctgccacatttggcttgctactntctcttttcaggacacccatattgcacaaccccagggggcacttattcacatcgtattctatgtgaaagggtacctccagggggcattaaaagggaaaacatattgggcataggaaaggtggagaaatttggagg

SEQ ID NO: 2399 - DNA, 767 bp, Homo sapiens
  SITE (742): n equals a,t,g, or c
ggaggttgccaagtggtgtgggaaactgcttcatgcttaagttcacttccatatcatgatactaaaaggtatctaacagctgattttcattgctttcatttgtgatctgctaggaccacttgatccttatactgcttattggcacactcctcatccaagagttgatcgcagaggcagagttccttgccaccagtccagtggaagtacaagccaactttgctctccaaatggcagcagkagctgagcaggccgccctgcattctctcctcataaacatgctgttctcaagtttgtcagaatccagagctctctactcattacccccttttccaaacaagcaagcaaagcatgctcttcctttgtttcccttaattgcctaaaacatctccatgctcatagctgttgactctctttgcctcctagttcctgttcctctggtgtaggatttctcagccctagcactgtaaacatgttgggctggataatcatctcttgtatgggctgtttgtgcattgtaggatgttgagcagcatccctggcttctacacactaagtgccagtgacactcttctcccctccccagctgtaaaacccaaatgtctgcggacattgccaaatgtctcctagggggcaaaatcacccctggttgagagtcactgctctatcatttattcactaaatactgctggtcagctgggtccactggcgaacctcacatcaataaacctggtaatagaagcanaaaaaaaaaaaaaaaaaaaaaatgt

SEQ ID NO: 2400 - DNA, 482 bp, Homo sapiens
gaggagggcaggcaggccttactgtgaaggtggtatttgagatgaagtagttggtcagagtccctgtttgacacatggagaccaccttgacagcaaaggccctaagggggagcggtgcaaagcaaggtgggctggtgagtgagaggagagggatggcatagagctgggtgggggcacaggagcccgtggggaaggtgttcgcctctgaatgaagtggggttgtatcagataccacgggtgaagcatcgggaagaggatcctgcctgtaaaccctgctcaaggactgcaccatcatcatgcccagtgtgtgcgtgtattaggtttgtatgaatataatgttgccaattgtatctgtttttatgaaatgtttgctatgtgccaatgattattcgatccatggggagaccatagaagaatgatccaaggagttgggaggggaatcaaataataaatcagcgattctgcaatataaaaaaaaaaaa

SEQ ID NO: 2401 - DNA, 834 bp, Homo sapiens
cttcatgctgtcagaataatttcttgacttagaatcagagaatcctagacttttctcccctctaaaattaactacatgtctgaatttttctccctctcttctgaatcctcagaaagcaagccctcttctctacactccccagttagaagatgcatctctttctctttagtgaccataaaactagacacacagtcagccttctgcatctgtggattcaaccaaccatggattcaaaatatttgaggaaaaaaaaagtacctctttactgaatatgtatatactgttttccttgtcatgatttcctaaacaatacagtataatggtgatttatataatatttacataatattaggtgtcataagtaatttagagatgatttaacttatatgggagcgtatgtgtaggttgtatgcaaatactacacgatattttatcagggacttgagtgtctgtggattttggcatcctcggggggtgcttggaaccagtccccctggatacctgaggagtgactgtactgtgtgatagcagcagtatgggatggaaagatgagatcctagtggtgcaggtacatcagttggacatttggtgtaactcaccaaaagtgaaaaaaacagagaaacaatatttgtggtgaattaagagattgagaagcaccgaattgaattgagaggtggttttgacttcctgaaatctccccacaccattttataactcctcagtttttccatttagctttacattcttctgtgacagagattcattcattgtctttccttactatgctttaagcaactcttacacttctgtatagaaaaggtgtttcattccctc

SEQ ID NO: 2402 - DNA, 571 bp, Homo sapiens
  SITE (519): n equals a,t,g, or c
  SITE (555): n equals a,t,g, or c
  SITE (568): n equals a,t,g, or c
  SITE (570): n equals a,t,g, or c
actgcagcctcaaccccccgggctcaaacacccccaatttcatatcagactcacttgcttataacagcacacttcaaatccttctcagaccattttccaaccactaagaatcagtatatttcatgccagcttctgtcctagatactatggctataacacagttttcaaggaactcacaatttggagagagagagagaaatactaagtatgtaactagctgtcatagttctttaaaaaaaaaaaaagaaaaaaaagtaaggccaggcgcggtggcttatgcctgtaatcctagcactttgggaggccgaggcgggtagatcacctgaggtcaagagtttgagatcagcctgaccaatatgatgaaaacccgtctctactgaaaatacaaaaattagccgggcatggtggcatatgccatcatcccagctactcaggaggctgagacaggagaatcacttgaatccgggaggcagaggttgtgtagagccaagatctcgccattggactccagcctgggcnacaagagcaaaactcttgctcaaaaaaaaaattaanataagtaaataantna

SEQ ID NO: 2403 - DNA, 828 bp, Homo sapiens
gggaaatgagttaagaggggtcccgaaatctgtagagtgctggtttgggggctcgccatcccaaatctgttccagcctgtcctgaggaaaatggagtgtaattaagggtgagcacccttaattcttgagctgtctttccagatacacctcgctgcttggagattcagtgaacctaagaaaaggtgcaaaaactatttaggtcaacttggagagcaggggaaggaagaaataagaaataaagaggtaccgaaagctggaacatacttcggagaaacacctaggccagccctctcactggaaacacagcacagcacagaacaaaacagacacagctcctgtccccgggctgacagccaagtaggagagatgaatgttcaacaatcttgcacataagcagtaagtgccatggtgttasccagcgttctccagagaaacagaaccaataggatggatatacagagatatagaaaaagatttattatgaggcattagctcccatgattatggacgctgagaagtacccaggatytgccctccgcaagctggagtagttccagtccgcgtctgaaggtgcaagaatcagagcatggatgtctgaagcagggaaaatatggtgtcccmcctcaaagaagagcaaatttgcccttcctctgcctttttattctattcaggtccttaacagattaaattatgcctgcccatagcggtgagggcggtcttctttactcagtctactgattcaaatactaatctcttccagaaacagcctcacaaatacacctagaaataacattttaccagctatttgagcatcccttagcccagtca

SEQ ID NO: 2404 - DNA, 526 bp, Homo sapiens
  SITE (469): n equals a,t,g, or c
  SITE (515): n equals a,t,g, or c
  SITE (526): n equals a,t,g, or c
ggcaagaccggcgcgctgcattcgcgcctcgatctctgagagcccaccgcatgccggtgcagacggatgcgaggatgcagggacgcgcgacgccggccccggtcgcagccgacgacgccgccgccagcctgacctcacaccctctggcccgcctctggagccagcgcccagggtccctctgtgctttttcgctttcctaagctcctgtcgctcctctttgtcccctcagtttatgtcctcctgtgctcacctccctgacctctgtgaccttgcactcccctggcctgaagctgcctctctgcgcgctttctactgggctyggctctttccggagccccagcgtctcctgcccaaattaccgcggaaagggcccggggcggaagtgcgacccgggcgtcggcaggcraracctcttkggccttctctcamaggtcggtgcgctsgtctycgcgtttcccggccgaattgncgtgcaatccatggctagaacccgcccggaaaaggaactgatggcnggaaccggctn

SEQ ID NO: 2405 - DNA, 458 bp, Homo sapiens
ttttttttttttttttttcctcmtaggaagttgttgtttaggatcctaattctagtttagaggtacattctaaaggatcttctccactgccattttctaaagccaaggagaaccccccgccttttgggtaccctatttggtttccactttggaggtgtattctaaagtgycttctccattacgttttctccccaaattaatctcagttggcttgtctgtgcatttttgtgagaaacttaaactgtcatttttagagataaatgagagacttacctcctcagctctgaagagaaaggacattttgttactgcaagctgcaagctgccccttgggtgactggggactgagtgggaatgtctgggtggttaaccccttttgacatgcagtggccctacagggaaccctcaacaaaattagttttaaaagactcattcaagaaatgcatatagagctgttca

SEQ ID NO: 2406 - DNA, 1771 bp, Homo sapiens
  SITE (1720): n equals a,t,g, or c
  SITE (1752): n equals a,t,g, or c
  SITE (1771): n equals a,t,g, or c
tttttttttagataagacatctttattacttaatctttaaaacagtcacttgcctattcaattctgaaactgtttgttttctttccctcccccgcactcccgctctgatacacaaacttgttgtaaaaataatgcagaaacatatacgtcaatgagaatgaggcttttctgtagcatgtaaaccaaaccggacccttggcagttcgtcgtccctcagttctccagatgctattttttgcaggttctaccaagtgcttgttgattaccctagttgtaattatctagggaagagatgaatgtaagtgagagtgcagagcactggggagggtgacagtgaaatgcaattagaggcagcaagagagtcctagtctgttctcacataaccggacttgaacgctccagtgcgagcagagtgctgggggtggattccactgccgaaccacggcagctttgctttactcttcagcatgggggtggtaactagctgcacagcaagttatgaaatggaaagcaagcttaacagctgtaatctcatcggataccctggagcaaatgccttgggattgcctgaagtgaagtgtttagcatccaccaaatagttgagtttctaagatgggccatgcgggatccctgccacacgggtgtgggggcagcgcgctcctccctgcctcggctgctgtgtgtcttagtcttcatgtttccccttggcgtctcctctggtccctgtccatcttgtgcaccatgtgtccctgarggcgagtcacacctgkgtcttgagtctgctgtaaggtgttcagtctacctcaaggggtcatcatggtaagctctatcccacggcatcctccgtccatcaccacacacactggaatgtatcccccccgccctgccccttcgataacctcctgaccttgtctttcctataatcaccacaaactcctagtgcaaattggatgctgctttaaatgtgaaaacaattgttcaaaagctataaaacctgaatgaaagctgaagctgaatttataagccttgttgcatatgagccaaaagtgcaaaaagctctatataatgaactaacctgccactcgtataaatataaatatatataaatatattaaaatcagactgttctacaaaattgtgtatttgtatttttgtgtacgtacaattttctgctaagcagaaggaggatgtagtataggatgctgtgagaagagatttggtttaatcctatttctttgttacttatttttgttaacatcagatgcctgtctttgtcttatatgtgtatgacactgtttgggaaagctgcagtatctctcttcctgaggtccagaggccattaaagaataaacatggggcttagaggtgtcttggccaccaaacacaggtaagccaacagagttcggctcccgtacgtggtgtggtgggacctggggcctggagccacttgtactcctggggtgggactgagggagggaaagggctcccccacttcaggctggtcactgtatgttgacttccctctgggargcaaaattccacttgtaaaaatcagcttccaagacaaaagatgatccgatgtcacttctgggtcaccaggaagggacacaggatctctctgaactttggaacagaccctcatattctggggccagaagtttgcccagaaagcarcargtggctctgcctggctgtagagcccagctcattggctgtccancggcatggtcaaggtaagggcgaattctgcanatatccatcacacttgcgn

SEQ ID NO: 2407 - DNA, 759 bp, Homo sapiens
  SITE (32): n equals a,t,g, or c
  SITE (58): n equals a,t,g, or c
  SITE (119): n equals a,t,g, or c
  SITE (758): n equals a,t,g, or c
gcgtccggattaacatggatttctgacctttnccttgaatcatgaatttgaatcctgnggatgaccatatattgaagcctctgatcccagaaaggtaataagctgaaagttgaactganagaccagataatagaggttaatacccttgggataggaaagaaaacttaaagggtaactgatggggttatccttagcaaaattctatccctatgagatgaccctaagtggagccatctctatgaggattaatccagagattgttgcacacctggcagtgtcaggtctgggaaaacagttgctgatgttttcatggagtgtgaaatactgaaagctgcgggcatcccttggggaccactgacccacactttgaagaaccctcaatgagtctgaaagaggttcagtatctcttgggaaggatgtgttccaggctccaggcctagtcttacatggccagtggggttgaaagactgtgcccctgcaatggtcttttcctaagacagttgaacaaagttccaagtctgtctgtcctattttaaccatctttaagaagcacaaaggggatatgagaaaaacagatgctgaaatgaaaattttaactgatatcttacttatctcacaagtcgtgtaaagaaagaaatgatatggtcgaatattagattagatggtttaatgatgttttgagtgttatatatgagctatgatgagacctagaaaataaagtaaaaataaaaaatawawaagccawraaaaaaaaaatnc

SEQ ID NO: 2408 - DNA, 360 bp, Homo sapiens
cttgctcygtcgcccaggctggagtgcagtggcatcatctctgctcactgywagctycgctcccgggttcaccccacacgccattctcctgcctcagcctcctgagtagctgggagtacagctgccggccaccacgcccggctaattttttctatttttagtagagacggggtttcaccgtgttagccaagatggtctcgatctcctgacctcgtgatccgcccgcctcagcctcccaaagatctgggattacaggcgtgagccactgcacccggccagaagctttttcatttattcgtccagcagcatcttgactagtcctgactggwtagtatagaaacagcactcctcttctaaaca

SEQ ID NO: 2409 - DNA, 633 bp, Homo sapiens
  SITE (626): n equals a,t,g, or c
ttcccgtcccacactccaaaccttaacctcttcctgtggattcaggtttcaacagtagtctcaaagttaatcactttttcctcttcccagtgtgaattgtttctgtacaagattgccaggttaatctcgctaaggttttacttcagtgcctgccattcttctcagaagctcacagaggtgcccttctgcttatgcaattaaatacagttttaccagtctggatttcacagatttggccccagtatattcatggatgaacaattacctactgttctgttctacttgctgggaagcacagttctaggcatttctattatcctgtagccactctggactacttggttttcctactgttccttatgtagggcccttggagtctgaaaggagagcagataggaaacacataattagacaaaagtaatttttgattaccaattctggtaagtgtcttaagggacaagtacagttatgagagccagatttagatagggagagggagtcaggaagcctcatcagagaggttgctcttcgctgggtgwggtggwtcatgcctgtaatcctagcactttgagaggccaacatgggagttcaagacaatcctggggcaacataagcaaggaccccgntttctac

SEQ ID NO: 2410 - DNA, 213 bp, Homo sapiens
  SITE (5): n equals a,t,g, or c
  SITE (163): n equals a,t,g, or c
ggggnggtttgggttttcccagtcacgacgttgtaaaacgacggccagtgaattgaatttaggtgacactatagaagagctatgacgtacctgcaggcgtaccagctttccctatagtgagtcrtattagagcttggcgtaatcatggtcatagctgtttccngtgtgaaattgttatccgctcacaattccacacaacatacgagccggaag

SEQ ID NO: 2411 - DNA, 550 bp, Homo sapiens
cgaaattkccggcaagcggccgctgytcacracgcgcgagcgcgtcgatcckttgcactcgctkaagcagacgctggccgagcactacaagaagaagcaggcgttctatgccttcaatccaccgaagacctatgaccgcgatctctcgaagctgttctccgccgatccacggcatcgacggcagccgccggccgcggtcttcatcaggcggcaccgcgcccagatcaggcagctggtcgcgcgctggaccggcgagaaccagttgacgctcgatgccgtgctcgacgacatgatctcgcgtgccgcgagctcaacctgcgcgccsycggtcccgarcagaagctcgtgaccaacttcaccatcctgctcaccgccragaccatgcacgcgctgttcggcccctcccgccgcaaatggattgcgctatgaaacgtcttcgcattctcgtgctcatgcacccggacttcgtgccgcctgagaccaccgacggatattccgcgcgcgagatcaacgcgtggaagaccgaatacgacgtcgtcagcaccttgcg

SEQ ID NO: 2412 - DNA, 388 bp, Homo sapiens
tttttttttttttttttttttttttttttttttttttggggggggtctaggcacttcatatccacgttcttaagtctgccaccttcccattacatttaacaagttacttcttcggsggcaggacgttttcttcgaagaagccctcattgacaacattccccgctgggaagtatctggccaccacaaaggaggacccgtcacttgcggacgccttccccacgcccatcttcttggkgttcttccataccatggccgtgaagtgtccagtccccgaggkgaagccaggctgctggaagttatagttcttgatttcactgkaccatctatcagccacctcctttcctgtctgatcataggatgcccatgcaaggttctccccacactggcc

SEQ ID NO: 2413 - DNA, 286 bp, Homo sapiens
  SITE (152): n equals a,t,g, or c
aacatattagtatgttggtatatacatatttctgactaattaatttcgccatgttgcccaggctggtctcgaactcctaagctcaagtgatgtgcccgcctcaacttcccaagtgctgagattacaggcgtgagccaccatgtccggcctgntttttcctatgcatgcataattacgatcaagtttaatttgtaattaggcacattaagagattaacaatagctaacaaaatggaacaattacaacaatatattgtaataaaagttatgcaaatgtgaaaaaaaaa

SEQ ID NO: 2414 - DNA, 398 bp, Homo sapiens
  SITE (84): n equals a,t,g, or c
gcttctgcctctcccgctatctagatggctcggggaggcacaccacacaccaggtcaccttcctctctgaacccccagcacctnatactgtttctgtgcagagataaggctgggtgaaagcttgtgtgaatgatctgaagtcttctactctaggccagtctccaggagcattatgatctttargagggtgggcttggttcctctgtacaataatgggkcataaaactgagtggtcaagatcatcccggtgaggcagtccgtgtgttgccatagttgctgtaccggttaagaatgcacctggctgcaatttcctgaaaacctgacgtatagtggcttaaacaaagagtggtttattttccttctgtcatagcaatctgggggaggccactgtggtttgg

SEQ ID NO: 2415 - DNA, 647 bp, Homo sapiens
cgcggacgcgtgggttgagaaacttttttattgctaatggtgaagaggctgttaaatagaaaaatatactacatgcacagaagaacatgggggacatatatatatgtatatattcgaataagactccaaaaagtagaaatttaaaaagtgctatacattgcatcaggttctaaaatcccaaaccccaaacagcctggaacatgttactctgatttcatggcgttgtaaaataacagagctgggaagaatattcaagatgacctgatttaacacctttcattctgttggggggcctttgatttcctatatccagaagttgagagacttactcaagattgtaccatgcaagctggcaactagaacccaaatccttggactacttgttgaatgcagtttttctagattgtaaattaaaaatcatatcyccacaacggctctggaaccccggggaccgcctcctaacccagcccacaagcgacagaaaacccgccatgccgctctgcagcctcacctcagacctctaaacgcttacttaaatgtaaaaaaaatttttttttacaccttttaaagactatatttaccattttgttgaaaaagtaaagaaaaaccatgacccgcaaccaaacgcgaaccacaatccccgagaa

SEQ ID NO: 2416 - DNA, 534 bp, Homo sapiens
  SITE (471): n equals a,t,g, or c
  SITE (484): n equals a,t,g, or c
  SITE (509): n equals a,t,g, or c
aacttgaaatgtaatttttaggacagacacattagcattaatgaatctttacttcaaacatgtttaattcagtgcaagttatttttatgttttgctcaattttattaacattcaaaaaataaatttccattgtcttttggcataaagagagagcttaaatattcagggttcagttacaagttggaactccctggagcagaactcttacagttatgtatactaaatagcagtctagatatcttgaaggcaatttacttaaaaattggtctaagacatagaaatatgagacaaaaggagaatatgtgcttaaattccttaagggagtttgggattgtctgaaacacagtcctccattgtttytaagtgggaaacatttggggcagctcatatctaatgcttagtctctacttaacactgggctaggcattgcaggcatcagaagaggagtaagaagctcttgagggatcttgncaattataggagngctcatggataacataagggataanggattgccataagaaaaggtgccag

SEQ ID NO: 2417 - DNA, 497 bp, Homo sapiens
gagaaccgatgatgagccctgatgaaagaaggaagaagacccgctgtctgcgaaggcctaaaggccgcggttgccaggaaccgtggagggccaactcctcccaaccgccctggtgcaaagtcccacgcggcgaagagttttggagcagcgcttacctagaaagatgtttaaattctgaaccaggaattgtctccaactccaggcgctcagggaatcgccttttccggtgtccaggcgctctgcagacaaataaacagcagaaggtgaatggcggctgcgagggaagggagttggaggccgggagtgggaagcgaggctcatgcgggcgccaaggtggccctgggggtgacgcgaacatcagggagtcaccagggcactcgtccgtgtggcgcactcattgctcgaaatgttccagtctacaaatggtccgaagatggtgatttatttttgtaaaataaatacatmctccatctccmcacccawaaaaaaaaaaaaaa

SEQ ID NO: 2418 - DNA, 412 bp, Homo sapiens
  SITE (374): n equals a,t,g, or c
tacatacatatatacatacatacccacacatatatacacacactcctccctcaaagctactaaacatgaaaacattgtcctatatgataaaaatgtcaatattgctggtgatactgatgctgatggaaatgacgatattagctgccattaacgtagtatctaatgtgtgccaaacaatattaaaaattgctgkatatacatgtttgccattwattatttataaccttaacaagatgtctcactcataagactactttccgcactatgatacagaaatgaatattaaaacatgtgcatgctcatgtcaaactcataggaacttgattttattttgggcgggttaaaccatttggcaacttgagtacaatgccatntttcagctagttcttggaaggtgtggccttgtggccaa

SEQ ID NO: 2419 - DNA, 495 bp, Homo sapiens
actccaggaaagacgagtgcgcttagtgtgcgctgcacgtgagcagtgaagttgattccacgcgctgcgctgctcggcagctgtcccagaactgaccacggaccccttcgcggtyctgctcctgacaagggccttccggcactggagttttgtgttagtggccagaaagcacgggcagcctgggactcctgttgccatagcaacccasstaccgccgaggacttctgcggcttttccagcccagcagcagccgctccaggtactttctgatggctccacagtgcagctccccagactttcctcactcggatttgaggactcgatgtgctgaggcakgacccagaggggtcccaagagcctgtcctcttttgttcaaaatacatcttgaaacgtctttgtgaaggctcttagttttaatgcatggatgctgttatttttccctactgttactgaaattaaaaagtgtttgtctctgaaaaaaaaaaaaaaaaaaag

SEQ ID NO: 2420 - DNA, 614 bp, Homo sapiens
  SITE (506): n equals a,t,g, or c
  SITE (579): n equals a,t,g, or c
  SITE (580): n equals a,t,g, or c
  SITE (588): n equals a,t,g, or c
  SITE (614): n equals a,t,g, or c
caaagtcacggagaacagacaacatgtggcagaagggaagacagaggtgcagaggctgatggmgtcattatcacaggaacaggatttctttggccactttggctgaaattcaccacttccatccaattcactcaagtgagagacttgaaatcacagatggagcatttcttgcaacaagagatactattttttcaaaaagtcacctaaaatttgatagtgttgaatgactagctattcgagtgtggactttttccagttcacgggtactttctacagcagaatgataacagtatcaaagagctggtgccagctatcggtggtagtacaaggatgactttgtgctcaactgaaacccagctgaatatagaattgtgtacgaaagtgttaatatggtgatagaatagaaacagtagcaaatgaactaaatcatactatgaatgcctacactaccattataactttttgaagaatgataataccacttactttattgccttttgaagtangaatattttagtggatatcctatagatctgaaaccctataagaatccaaagaagctgctggataaagcctggnnatgaggcnttatctcaaaggatgataagcaattn

SEQ ID NO: 2421 - DNA, 452 bp, Homo sapiens
  SITE (355): n equals a,t,g, or c
  SITE (389): n equals a,t,g, or c
cctcaccgcctcaccgaggtgggtacgctgcgaagactaggcttatgttacccagaggttagtcctctactaggccacgtactttaaataatttatcacgctagtggaaatgcggggtggaagaaaaccccaccagcctttggattgtaacagcacagtaactttccctggtttttaaaaatattgccaaaatactgcgactccatgtggccaacgtatagtgactgatcactttgaaatgcatgcccttgacccaccaactcgcatggcctctcgctataagagagcaagccggctgtgttccatgttcaattcaataagtgcaattcaataagcttttgacttggtctggccnagccaaatcttgcctttatatcgaccttgcaagnagaacagagaatgctgtttggaaggcagaattcatagtacctagttttcttgccctgggaatt

SEQ ID NO: 2422 - DNA, 894 bp, Homo sapiens
  SITE (1): n equals a,t,g, or c
  SITE (21): n equals a,t,g, or c
  SITE (26): n equals a,t,g, or c
  SITE (68): n equals a,t,g, or c
  SITE (82): n equals a,t,g, or c
natagggtcattcataaaccnccggncttttttttctttaagctcagtgttaccaatgaaagtagatnccactattgaagcncaagttgcaaattggtaccatagtgaccatattgctgtaggaaagggggttcagtgtggtgtgttatatgagcacttgaacttttcaaggtgtcataagccagttatctgccacaaagaatttccatttcaggattcgagtttcctcagaggaagacactgtggacatttgtggtcatgaacttttaagtgcaacagcccaaacaggtcaagtgtctttaagtcccgaacaacggcagcattactgtgaattaccattcaactcaaatgccaaatgatgtgtgtctcactccaagttccagcatcacaatataatctctataactttctgtacaactttacaatggaattgtatttcaatgattattttgatatcagattaaaccttccaaaaagttacacataattcaggtctattttttctaccagtaagagttctgctaaattacaaaaccccataatcacagtgttcagtttttaaaaaattaaacacacagtaatcctgtcaatgttaatcaaaatcaaaacttcggaatgccgtggatttatgtgaccaatcagatacaaataccagctgtttatcccatgaaccatttttcctaggctgaggctgtgaaaaatcggaagtcgacgtacgattctttgtttgtacattgatatcgcacaagggatatatgttgagggttaagagtgaaactgaacgggttcgcaaggcacgagaagacatagtgtctatccctcccccagcgtactccttcgtgctccgcggtgtttccgatgtgccacgaatgagaactgtccccaagtagactg

SEQ ID NO: 2423 - DNA, 433 bp, Homo sapiens
gcacaggacatttggactagcagggacttaaagactcactgttgtattacagattatggctcggaagcactgagggaaggaaagataggtgtgggtgttataattcacccgtggttttcttgccctgatgtatttatctggtactcttttgccagtctccttctcaaagacattttcttgctaaatttcttactaacttgtcaaatggagggaaaataagattgaattagtaaaacattcttatcacaatatactctaaaagaggctgggcgcggtggctcacgcctgtaatcccaacactttgggaggctggggcgggtagatcatttgagctcacaagctcgagaccagcctgggcaacatagtgaaaccctgtctctataaaaatatacaaaaattacccgggtgtggtggcacgcgcctgtggtcccag

SEQ ID NO: 2424 - DNA, 684 bp, Homo sapiens
  SITE (422): n equals a,t,g, or c
  SITE (509): n equals a,t,g, or c
  SITE (568): n equals a,t,g, or c
  SITE (582): n equals a,t,g, or c
  SITE (635): n equals a,t,g, or c
gctcggtgaacaccggacgcgcgaccgtgctggccgcgttcagcaacaagctgctctcgtccccggagaccagagggcttctccccaggttcagccatttaggaaagattggtgacctatctgcatgatggcattaactacaaggatcatcgaagagccacagtcacaaagccagtctctgaatatggttcaaagaaatcttataactctctgaacaggacgtgtattcgtcaacactacttggagggccggtacttccaaggaagtcacctttgcagtcgatctatgtgcactgttctcagagccagctcgcacccatgaagaacaacacaacttaccggtcataggagcagaaagtgtcaaccttgcagcaggatttggacactctgggagccaaactggatgtggaagctccaaaggtncagaaaaagaactccaaaatgttgacttttacctctgtcctgggaatcaccctgacgctagctgtcgagatacttatcagttttttntgccctgattggacatttgtaactttagccacctactttgggggatcaaccagatcttnattctataactcgngctccttgccctaaattatgctctagaaaaaaaaaaatgatctttattactgnctgcctaattactcataatattatggcatgtcatgggaaattaagatta

SEQ ID NO: 2425 - DNA, 433 bp, Homo sapiens
  SITE (219): n equals a,t,g, or c
  SITE (223): n equals a,t,g, or c
  SITE (241): n equals a,t,g, or c
  SITE (258): n equals a,t,g, or c
tttgatggacctcatggtcagccaggaggtggaatcagatttgagggccctttgctacagcaaggggttggaatgaggtttgagggcccccatggtcagtcagtagctggtctgagatttgagggacaacataatcaacttggtgggaacttaggtttgagggtccacatggtcagccaggggttggtatcaggtttgaaggccctttagtccaacaangganggtggaatgaggtttgangggtccttctgtaccanggaaggtggcctgagaattgaagggcctctgggtcaaggtggtccaagatttgaaggttgtcatgctttaaggtttgatggggcagccaggtcagccgtcactcttgccaagatttgatggattacatggtcagccaggtcctagatttgaaaggactcctggtcagccaggccc

SEQ ID NO: 2426 - DNA, 696 bp, Homo sapiens
  SITE (639): n equals a,t,g, or c
  SITE (678): n equals a,t,g, or c
  SITE (682): n equals a,t,g, or c
  SITE (686): n equals a,t,g, or c
  SITE (696): n equals a,t,g, or c
gatattggaatttatgttttacagacaaggaaacttagttatgtgttttgcccaggctaataagttatggaagcacaattcaaaataggtctgtagctttggctttgaatacctgggtagtgagtaaaattttcatttcatgtggtggtttttacatagttgtaatccaagcagtaacacttacaggaagattagattgtcagtaatgtgaacagtagattggaggggaagaagcaaagagagccagtcttaattggttggatacttttatttctgtattcctcagtgatgttataaataaatattttgtttttcagagaatgactaatwgtagcagctccccaagccttctaaatgacagtgccmagccatattcagcccatggtaagacctgatcccttttgcttatgtgtgtctgtgtatatatttcttactctaaaagtaatatacaaccattgtagaaattttgaaaattgtaaacgggcataaagaagaaaataaaaattattatcttcccactcagatctaactattgagatttagattccaggccaggtgtggtggctcatgcctgtaatcccagcactttgggaggctcaagtgggaggaatgattgagcccaggagtttgaaaccaacntgggcaatataacaagacccatgtctctattattaaaanaaanaaangaaaaagtgn

SEQ ID NO: 2427 - DNA, 430 bp, Homo sapiens
  SITE (197): n equals a,t,g, or c
gggaaaggggattcataaagacgttcttctgatggggaatgctctacgaggccgccttcacatgggctggagaaagtacctccgtgcattttccagtgtggaagatgatcaaagtatgacatttcttctaccccagaggctggcatttctgcrggcacaaatgagcttggttttcaagcastgctttttgaacacanggaattcctttaatgatcacgccggactatatagactttggaatcagactctttgaattccagctctgccatttaccaactttgacactttgggtaagtccttttaacctctttaagcctcagtttccttttctgcaaacaggaataatgataactaacaataataataataatcctttctcattgattaaaaataaactgagctgcaactgctatttgtatgctctcaacat

SEQ ID NO: 2428 - DNA, 674 bp, Homo sapiens
  SITE (171): n equals a,t,g, or c
  SITE (179): n equals a,t,g, or c
  SITE (604): n equals a,t,g, or c
  SITE (631): n equals a,t,g, or c
  SITE (644): n equals a,t,g, or c
cttggatctatcaaatggtgcagtgactcggataccttccctagtggccataaagctccagacgaatctcagtgcaggacgccatcctcgcaatattcaagagtcacccttctaaggaggacccctagactgctcgctagtggaacacgacagaggcgaaatcctgccccngtctcccngtggacctggctggatatggtttttgccaatccacagagccatcctgccctgacagctagcaagaggccaagacccacacgaacaaccactacagcccctctgtcagcaggaagcagttaaagaagactgaccttcgtccattttcccagataattgggtcttggactcttgagsgggggaaatgttggagcaggtagctagtcagacatgagcagggcaggggagggccccctcaccaggaatgtcaggcaaccatcaggtgatggtgaggcagttgttaagctgtgtctctaacataataatggagtggcagctggcgccaggggaacgatggcctcccaatagatagggaaacacctggaagctggtgattcagccacttcctggataagatctccaggattgggtgcgcaggcttcaagcntgcaccctaagagggcaaataatggcntttaactcatatntgaccttccttttaggaaggcttgactggt

SEQ ID NO: 2429 - DNA, 503 bp, Homo sapiens
  SITE (399): n equals a,t,g, or c
  SITE (481): n equals a,t,g, or c
acatcttgaaggcggcattagctgaaactgatggtgaattttcacttcatgaacagacagtcttactactttttcttgatcattgcttcaatagtttggaagtagacttgatacgaagtcaagtacagcagcttatctccctcccaatgtggatgggcttacagctggcacgattggaattagaattaaaaaagacacctaagctaagaaaattctggaacttgattaaaaagaatgatgaaaagatggatccagaagcaagagaacaggcatatcaagagaggagatttctttcacaamtcatccagaagtttatctctgtgctgaaatcagtcccactttctgaacctgtcactatggacaaagttcattactgtgaaagattcattgaacttatgnttgatctagaggccctgctacccacaaggcgctggtttaataccatcctggatgattcccaccttctgggtcactgttaccnttccaatcctgttcgtagagaa

SEQ ID NO: 2430 - DNA, 613 bp, Homo sapiens
  SITE (303): n equals a,t,g, or c
  SITE (509): n equals a,t,g, or c
taaaacataccatccttttctattttcttgatgctgtttacaacatagtttggtgatatccagagctaatgtacatgctttcaaaagctaatctgcctgttgatgataactaggtacagcgactttaaatacagttgctataatcctgaaaagccccaggagcacatcagggagctgggaaacacagttgcagagaactcagctgtatgttgccctctgaccttggcccagaccttcagaggctcagtctgttgagtctgttgtgactgtcttatgaatcaaatctgttgtgccaaccctttntgagattcagagaggtccagctagaaaaagtggcagttttaaccaccaacgtagaagcattttttttccccacaagaccattgtactgcaatacttgactatttgtgtagcaaacagcctcttaggttggagagtattgatttcaaataggaagttggtagactaggtgtgaggatgaaataatgaccttgatttttgggtgtgtnttgcagaagcctcgtcgctttcaagtcacatcatatatgcgatctggcctaaccatggagatattggttatcagtttgcagatgaatacacagttctatccaac

SEQ ID NO: 2431 - DNA, 560 bp, Homo sapiens
  SITE (554): n equals a,t,g, or c
ggccgccctttttttttttttttaagacaatgtctcactctgtcgcccaggctgcagtgcagtgacaggatcatagttaactgtagcctcaaactcccaagctcaagtgatcctccaacctcagcctcccaagtagctgggaccacaggtgcatgccaccatgcctggtttttttgtttgtttgtttttgttttttttggtttttttttttggagagatggggtctcaccactgtgttgcctaggctggtcttgaactccagggctcaagtgatccttctactttggcctctcaaagttgatgggattacagatgtgagccatggcatctgtccccactaatttactttaatctactatatttctctttatactttttatttcattgataattttctcttcatagtactatttgatcagaatactaaaaagattgccacattctgtttcttaagacaaactgttgcycctgatgcagatcagccaagagaaacatagtgacaaaaagmygtctataattcyaaagacagactaaattacaaaaaaaaaaaaaanactggg

SEQ ID NO: 2432 - DNA, 459 bp, Homo sapiens
  SITE (369): n equals a,t,g, or c
ctagttctagatcgcgagcggccgctccgatctagaaccgtagctcccgccagcgtggccagagctgtcgcaccgtgagcgtccttcctcctcckytssgggctgcagcacaggtaaggctggtgagcacttgctcttggttggccaggcccaccaggaagtcaccaggacagtccacccgccctgttggcacactcaagcgggagtccacccctgcctcagtggtgggccagtctcggtttgcattcttgtgcttttgggaggtgccaggggargraagggctgggatgctgggacctgttgttgctggcaaagcagaggtcacagtggcctgatctgggccctcccaaagctgagggctgcagcgtngggtcctcagagctgaaagctgcggcgccaccggtgcagagtcagatgtcacagatgtgttgtgtaacagttggctgtttcgtgcttcaa

SEQ ID NO: 2433 - DNA, 389 bp, Homo sapiens
  SITE (351): n equals a,t,g, or c
  SITE (373): n equals a,t,g, or c
  SITE (381): n equals a,t,g, or c
accagaccctgcccccagggatctcttcacatgtggattgacatctttcctcaagatgtgcctgctccacccccagttgacatcaagcctcggcagccaatcagctatgagctcagagttgtcatctggaacacggagatgtggttctggatgacgagaatccactcaccggagagatgtcgagtgmcatctatgtgaagagstrggctgctggccgggcggggcaacggcggtgcactagggggattgcaaatgggtgtgggccctcgggctgagttccagagcccccgaccccaggccctccgtggtgctgagaaccgggtgaggagttgggtctccatgtagcttcanccctgacgcttcaacccacccnggccccancttgggtt

SEQ ID NO: 2434 - DNA, 419 bp, Homo sapiens
  SITE (88): n equals a,t,g, or c
  SITE (372): n equals a,t,g, or c
  SITE (398): n equals a,t,g, or c
  SITE (412): n equals a,t,g, or c
gttccaaacagcagttaggtcagcagtccgctcagccgaggcagctctgttcatggcgttctcgaagctcttggagcaagccggagtngggcctcttccagaccctgcaggtgctcaccttcatcctcccctgcctcatgataccttcccagatgctcctggagaacttctcagccgccatcccaggccaccgatgctggacacacatgctggacaatggctctgcggtttccacaaacatgacccccaaggcccttytgaccatctycatcccgccaggccccaacmaggggcccmaccagtgccgccgcttccggcagccacagtggcagctcttggaacccaatgccaagggcaacagctggagcgaantgaccacggagccgtgtgttgaaggntgggttatgaacgnaggtctt

SEQ ID NO: 2435 - DNA, 641 bp, Homo sapiens
acgggtgaagtccacggttcccggccctcctcacagctggctatggcagagactggctttgcccagtgggtttcagtgggatttggagaagggcccttaggggaggggtttgccctcctccccatcagctgaacgcagctgtgacctctagagctcatgggagctgcagctgggaaggacgcagggggaaaacagaaagagggaaaagcaaggagctggacacccaaccagcaggcccaggccacccctgcacacatggtgggtctgcattgataagacatgtcacacgtgcacacctacaaagacctagaaatgtctctgactcttacctgtgtgctgttaactcaaatgaagataaaggagaatgaagaggcctgtgtcagaagctccgaagtcggcaaacaaccagaacacggcctccttgggaccccacacacgtggtcaccctcctcctgctgctggggagaagggacaccagcacgggatgggctcctgggatgaaatgttctggggttacagtggaggcagccacaccacactgtgaatgcactaaatgccactgaattttacgtgttaaaaggtgaattctgtgaatctgatgctatgtaagttgtatctcaataaaaaatggacaaaaaatg

SEQ ID NO: 2436 - DNA, 445 bp, Homo sapiens
taaagaagaaacctaatgtaggttccattcttaaccatattctttgctcctctctgctccaataccaccaccttgtccactcccaaaaaagtaatcgggtgtgtgtgtgtgtgtgagagagagtgtgtgtgagatatgaatgcatgtatttgtatgcttgcaggagatggcatattattgagccaaacccttctctggccctcaccttcagggaggatgagtggaaaatagcctcctcttgcccaaacatgaagggtgcttgaggtctcagcaggagctgaagaacacaatttggggaacagaagggcttttgttttggagggtttttttttttaagatgaattcaacagcctggtggttaggatgtttctaacccaagccagggcttgtgaacatgaattttctaaggtgaaataaaccttttctttctgctaaaaaaaaaaaa

SEQ ID NO: 2437 - DNA, 463 bp, Homo sapiens
  SITE (18): n equals a,t,g, or c
ctggaacttacttttgancaacaggtgtatcctacagctgtacatgttctagaaacctatcatcccggagcagtcattagaattctcgcttgttctgcaaatccttattccccaaatccaccagctgaagtaagatgggagattctttggtcagagagacctacgaaggtkaatgcttcccaagctcgccagtttaaaccttgtattaagcagataaatttccccacaaatcttatacgactggaagtaaatagttctcttctggaatattacactgrattagatgcattgtgctacatggtgtgaaggacaagscagtgctttctctcaagacttcacttattgacatgaatgatatagaagatgatgcctatggccgaaaagggatgggttgtgggaatgggacagtccttaacaaaaagttttagcagtggctggtccctcgggggaagggggccaaata

SEQ ID NO: 2438 - DNA, 540 bp, Homo sapiens
gaagaggcatttgagggtttctgctttctttctctcaggtcactccctctggaggaaaccagctgccactttgtgaggatactcatagtcctgtggaggcatatcctccatatggctgagacctcctgcgaacaaccatcactgacttgccagacatgagtgtgccaccttggaagcagattttccagccccagttaagccttcagatgacatcagcccctgctaatctcttgactacaacctcatgagagaccctgagccagaactagccaggcttacccctcatggttacaaagtggctgcaacagctccaggtgttctatcctttaacacagaataactcaaacaacaagacccaatattcagacaagaaggaaagggacttttggagagtgaagaaaactttcctagaaacctcaaacttctccccatgccttattggccagattgtatcccatgcccatttctaaaccaatcattggcaaagtgagtggaattgacgtgattagattaactttaccaagaatgcatcctcagaga

SEQ ID NO: 2439 - DNA, 457 bp, Homo sapiens
  SITE (353): n equals a,t,g, or c
  SITE (410): n equals a,t,g, or c
cacatagacacactatacacaggcgtgggccttttggaaacacctgaaggccaaatgtctgactgtgagtggaagatccagagtgtgctgatagaggaagcttttctcatccctcgagagcaaagagggtgatggaggcaagagtcagagagccctgttctcttcttcatgtacactgcaaagggcaacttctctagaagcattaaaagtgtcaattaggttttcaagtaagcgtcatttattcatatatacattcatttgtctttttatttacaaaattaaatcattttcccatgaacattaaaatgggaagagagaacaaagaaaatagagttgaataataataacattgnttctggaccagacactggggctggacataactcgaggggtacttatttatttacacnaagaccggtgaggtacacactaattatttcatctccccattaccaag

SEQ ID NO: 2440 - DNA, 409 bp, Homo sapiens
  SITE (322): n equals a,t,g, or c
  SITE (340): n equals a,t,g, or c
  SITE (376): n equals a,t,g, or c
  SITE (405): n equals a,t,g, or c
ggccctgatagatggggtgcggggacggagacaaatgacggcctttggctcggaatacccacctttctggtaatgcagcccagcggtcccagcctcgttttccagccctcactcaaaatkgagtcgctctkgttcgaacgcctctggacaagtgtgtacctacgtgtcaggatttgccgggtgctgggccccagaagccagccctcctgacgtgtggcggccgtcctcaccgctccctccttccctgcagcattccccagcccccggcccaccctccttcccaaccgtttcttgacccaggttccggggctttcccttcgtnggccactaactgtgtggntttgttttggttgttgttaaaccccaggaagtgatncccgtggagaattcaaatagcaaaggttnattt

SEQ ID NO: 2441 - DNA, 381 bp, Homo sapiens
  SITE (341): n equals a,t,g, or c
  SITE (354): n equals a,t,g, or c
  SITE (377): n equals a,t,g, or c
tctcctgtggttctgccattttaacatttgatcatgaaagatagcacacatatagagtcacacacattcacaagatgtagagctaaattatttattacaaaatgaaaaactgggtaatcaccactcatgtcaagaagtagaatactgttagcagtccagaaatgccattgatgtccccttcagtcatcccccttccttaccactagagctaataataatcctgaaatttatggtaaccctttccttgtttttctttatattttatatcctargcagtacagtttrggrtattgcctgttttgtgaactgtatataaatgggaactatacagcatgtatttnttatggctggcanatttatccaatactatatacaangaac

SEQ ID NO: 2442 - DNA, 350 bp, Homo sapiens
  SITE (305): n equals a,t,g, or c
  SITE (333): n equals a,t,g, or c
  SITE (345): n equals a,t,g, or c
cacatggctttggcccttggagagctccaggccatcagagatggtgcaggaatggggtaggagacagaggaagccctgcaggaagccagcaaaaacctcacctaccttgagaactcagcaatgccggaagagattgagattcctagagaatggaggagccgggaacaaaggagaaggatgggatccaggaacaggccaagagaaccagctcgatgcttcttcctctcccttctagaaattctgtttcagaagccattaggtaaggtagagcaaggcaggctctgtagctgattgggggaaggaantagcgttgcccagagcaggaggttggantcaccggggttnagata

SEQ ID NO: 2443 - DNA, 864 bp, Homo sapiens
  SITE (860): n equals a,t,g, or c
attgccaaaggccgaagagaacaagaaggagcctctctgcaggcagaaacaacacaggaaagtgttggataaaggaaaacctgaagatgtgatgccatctgttaagggggcccaggagcgcctgccaacggtaccgctgtccggcatgtacaataaatctggaggaaaagtgagactcacctttaaactagaacaagaccagctgtggattggcactaaagagcggactgagaaattgcccatgggctccataaaaaatgtggtcagtgaacctatcgaaggacatgaagactaccacatgatggcgtttcagttgggccccacggaagcctcttactactgggtgtactgggttccaactcaatatgtggatgcaatcaaagacactgtgctggggaaatggcagtatttttgaaagcactttcacctctggcccaggagactgacccaaagtgaaggacattgccgggagaggcctgcagcatccctggatttcagagttctggaactttgttcataaaaaatctatattcaatctgaggtgatgtggtgactgaagccagaggtgatgtactttcaccattagcttaattttaacttaaaattaccagttccctttcttgcagtcagcttcataccatttttaaagtcaatacgatggaaatcaataaatctgaattccgaacatgttgtgtggaatactcttaagtgtgtttgagagtagatctgccaattatgttgacaagggaatgatcaaaagctttgttttttttaaaaaaaaaaaagcagtttcaattgaaatattttcatacatctttggttgcaaacatttggactgcattgcaatgarttrgggtgtnttta

SEQ ID NO: 2444 - DNA, 498 bp, Homo sapiens
  SITE (470): n equals a,t,g, or c
ggaaagcccaattcattaaaacagaaaggaagaagctcctgaactacaaggcttggctggtgaagaacctgcaaccccgaatttattgtccctttgctgggtattttgtggaatctcacccatcagacaagtacatcaaggaaacaaacaccaaaaatgacccaaatgaactcaacaatcttatcaagaaaaactctgatgtgataacatggacccctcgaccgggagccacccttgatctgggaagaatgctgaaggatcsaacagacagcaagggcatcatagagcctccagaggggacaaaatttacaaggattcctgggattttgaaccttatttggaaatcttgaatgctgctctaggagatgraatatttcttcaytcatcctggataaagaatacttcacttgggctggatttaaagattacaaccttgtggtccagggatggattggagaccggatggaggncttccaatcccttttccctgggaggatt

SEQ ID NO: 2445 - DNA, 628 bp, Homo sapiens
  SITE (439): n equals a,t,g, or c
  SITE (447): n equals a,t,g, or c
  SITE (517): n equals a,t,g, or c
agctgccctctgcccaaaacccacgtcgaggtccccaaacctgggacccttaggtcttttctcacttagcgtgcccaaccttctcctggcaggaaacaagcctccaggtctgcttccccgcaaaggactatacatggcaaatgacttaaagctcctgagacaccatctccagattcccatccacttccccaaggatttcttgtctgtgatgcttgaaaaaggaagtttgtctgccatgcgtttcctcaccgccgtgaacttggagcatccagagatctggagaaagcgtcccgggagctgtggatgcgcgtctggtcaagggtgartktggggstctgggratcctctgggaggaccttggatgactttctgaccttccccaggcacgttttcagggtcatgatcctgcccccgcccgggcatcctactgtcctcccangtcacacngcctctccccgcaccgccttcctgctgtcttctcttcttcccagaatgaagacatcaccgagccgcagancatcctggcggtgagtgtcctggctccaccccaactgcactcataagagaatctgagaacagttggcgtttgggggtaaagaagacaataggtctcttattgcatggaaaa

SEQ ID NO: 2446 - DNA, 536 bp, Homo sapiens
aaaaatattatactttttttgggtctccataaaggttcacctaaggatcatgaacgtaatggatgcagattatgtaaaagtgataaatattgtgagccacatgactatgaatactgctgtccttgtgagtggcaccgtacagaacatgataggcaactcaatgaagtagagaacaatattmagaagaaagcttgctgttgtgagggattcccattccatgaggtaatatccagtaattcaactgtattaattttagaaactttcttaaaagtttaaatctcagtttctattttcktttttcttgctaggttattcaagaattccttttaaacaaggataaattggtgaaggttatcaggtaccaaagacctgatttgttattgtttcaggtatctgaaaataaattcttctttactgtatgaagttatatgctggaaagataggaacagatattcactctgattggtctgagaggaggtttaaaattaaaacaggcagctcttatattttttcagcatttatttctactctctcat

SEQ ID NO: 2447 - DNA, 237 bp, Homo sapiens
ggcctggctaatttttgtatttttagtagagacggatttcaccatattggtcaggctggtctcgaacttctgaccccaggtgatccacgcctcagccttccaaagtgttgggatcacagtcccagtgattctcatgcaagcaaagtttgatcaccactgtagtaggcacccaataaatattggttggttggttgatttcaattcatttctgatggaaataaatcatgaaggctctgc

SEQ ID NO: 2448 - DNA, 392 bp, Homo sapiens
  SITE (350): n equals a,t,g, or c
  SITE (368): n equals a,t,g, or c
aggagatcgtgcggctgctcattgagcatggagctgacatccgggcccaggactccctgggaaacacagtgttacacatcctcatcctccagcccaacaaaacctttgcctgccagatgtacaacctgttgctgtcctacgacagacatggggaccacctgcagcccctggacctcgtgcccaatcaccagggtctcacccctttcaagctggctggagtggagggtracactgtgatgtttcagcacctgatgcagaagcggaacacacccagtggacgtatggaccactgacctcgactctctatgacctcacagagatcgactcctcaggggatgagcagtccctgntggaaacttattcatcancaccaagaagcgggaggctcgcca

SEQ ID NO: 2449 - DNA, 523 bp, Homo sapiens
  SITE (437): n equals a,t,g, or c
  SITE (498): n equals a,t,g, or c
ctcagcatcctgagtactgggattacaggcatgagccacggtgcccagccattcttttactttcttttgtgaatttttccattcttttgtttcttcctgcttggttcaggatttttcttttgacctaatttccagtccactacttcagctatgtcttcctgtctccttcagcatggttattttaaatctgatagccacaatatctggagtcttttagggtttctgttttctgtcatttttactagttttcatttacattgtcctgtctccttttgtgcctgttacctttgattatytgtcagagtatttgaaaaactatttttaaaatattttgaggcctagataatgttactttcttccaagaatggtttcatttttttctgcctggtcctaaagtattagcaatctgagattaattcatttttagggattagaantttctggaccattcagatgacttgaagctagactacagtatctgcaaggacttttataatnttcagtttactcttatgtctaagga

SEQ ID NO: 2450 - DNA, 124 bp, Homo sapiens
  SITE (113): n equals a,t,g, or c
tttttttttttttttttttttttttttttttttttttagcaaaatagcttcttttattactggatagcatggctttataatagatgcgtatgtttgaacagagattcctgggncttttatttgg

SEQ ID NO: 2451 - DNA, 648 bp, Homo sapiens
  SITE (26): n equals a,t,g, or c
  SITE (36): n equals a,t,g, or c
  SITE (57): n equals a,t,g, or c
  SITE (133): n equals a,t,g, or c
  SITE (140): n equals a,t,g, or c
  SITE (629): n equals a,t,g, or c
  SITE (634): n equals a,t,g, or c
  SITE (645): n equals a,t,g, or c
gggtgaaaaactggcccacccagggnccttgggccnctagaagcccacagtggcccnccctttgtgggaaaggaaagggaacagtttgctttttagtgctggccctctctgtgggtgtggcctgccaaggganccaacangaccctatgcctggggactcctaacatgtgagcctccattaaattccttcccagcattcctaaaggagggtttgtgattgtcaccatttactgatgaggaaactaaggctcctaggggagaaatcacttgcccacagttcccacagctagtgagtgaatgaaccaggatttaaaccggttttttctcactacagagacaatatttttccaccattgtatctcacatttttcccaggaggttacccataacagaagagactagagtggaacagatacgtcagtggataaagctcaaagcaaacaacagtaagcttaaaattccttcatagtctcatgttttacgttcacaattcatgcaaaatttgcattccactttctgatttagccttgttggttttaatatgacyctatgaatatttcaaaaaaaaatgtgctctgttcctcatgttgttctggttctgttcaccccgctatgacgggaccctaggncaatngggtttaaagntgg

SEQ ID NO: 2452 - DNA, 1230 bp, Homo sapiens
ctcgtccccatggtgaggtgagaggcacaggtttgtggctgcccaaggccctcagagatggtgagtagcagaagctgggattggaacccatgttcctgcatctgggctggggcagacagggagggatgaggcaagcaaatggatccatggggtagagatggacaagcaactcacccctgggccttggtcagtttcccccccagactgctgcttccccggatgagcagaaggtgtttgccctctgggagtctggagacatgagtgatcagcatcgacaggttttgcttgaaattttttccaaaaattaccgggtacgccgaaacatgatccagtctcggttgactcaagagtgtggagaagatctcagtaaacaggaggtggataaagtactaaaggactgctgtgtaagctatggtggcatgtggtaccttaaagggacagtacagtcttgacaatagtagcaaactactaacccagcaaatctaagcccaaggaagaagggcggaaccagaagtagggcctcgacttgcttcagacgacacagagcaagaggaactgaccatctcatgacctgtggcattgcacggtgcagtggacagaagggattatcctcagccagtcacagggtcagcttaagttagttagatcactcccagaagagaccagctgggaccttctttgcagtacaatttgaaattcctgatgtattttgcttattatttggtttcattctcataataaagagagtgtatactgacatgggcaggatgataaaaatcatggtttaatattttcttttgtaaacttaatgccaacaaggtctaagttatgtttacaacatgaagaaaacctcaaagttcttaatttttaaaatgcctagaagacaatatttagtcttggattatctatctgctaagacctccaccaatttcattaaaccaaattgaattattctattcttgggattctgtggccacttcacctttgacaacaacctactttatgtagcagtctcaactgtttacatgaaccatagcaaaaaaatcagaatcaaatccatctccttttaatgtttgcagaaagatgcaaacaaaaccaggtaagtatggaacaatgtgtaagtgaggttatcacactttgatgtaaaaatttctattttgtgtatttttaaaataaatgcaaacactaaactagcaaaaaaaaaaaaaaaaaaaaaaaaaaaaaaaaaaa

SEQ ID NO: 2453 - DNA, 465 bp, Homo sapiens
tgatcatgtgatagaggattcattatgtgtgctttccatgtgttgctttctacccattgtgtttcctttttttccagatttctcctctttgccctgcccttcagcttttctcagctaggccccactgctctaaggggcatttactacagcacctattaaacttacttgtaactgtctcttttttttttttttttcccctttgggccaggtcggggtatgataggtcggggaagagggggctttggaggccgaggccraggccktggacgagggagagtgcccttgctcgccctgtattgaccaaggagcagctgggacaaccaatggatgcatatatgtcgaaaacaaaaggacacctggatgctgagttggatgcctacatggcgcagacagatcccgaaaccaatgattgaagcctgcccatcctcccatgagagactcttgttagtcaacacatctgtaaat

SEQ ID NO: 2454 - DNA, 464 bp, Homo sapiens
  SITE (388): n equals a,t,g, or c
  SITE (389): n equals a,t,g, or c
  SITE (430): n equals a,t,g, or c
ccattttaggcctcagcccgcctgcacccaggcgctcattaaaacagcatgttgctccacatcgcctcgtgttgtctgttggcacgctctcgggattcgaaccgatacaagaaccttacaattttctttatgtaagagaatgtccttgttcttaagaaaagccagctgaaatatttagagagtaagtttgcaggatgtctataacttactgtcaagtgttttagacaggaagagaatcacataatggraaatgtaaacaagtgaatgtgagaaaggagtacatgaaagtctttgaactattgttacaacttttctgtggraatttacttttcaaaagtgcgtatagacmtataggaagaacaatttagtaactaacatagttatttcnnagtagtgagatgatgggtagtaattcctttaaaaagactgntttccccaatattctgtaacaagcatgactatac

SEQ ID NO: 2455 - DNA, 468 bp, Homo sapiens
aaaaattctgccacaaaagccacattcaatagaaaacatttttttaaaaaaatagctgggcatggtggcatgcacctgtggtcccagctgcacagcaggccaaggcgggaggattgcttgagcacaagagtttgaggttacagtaagcaatgatcagctactgcattcccacctgggcaacatctctaaagaaaaatcaaacaaaaaacgacatacagaaagtatgcgctatctgatttcaaccccaagtttgtcctgctttaccaggctttctcctggggcctggaggcagtggggccaagggcaggggtggggtgtgcaggggacagcagtgctccagcaataagagttcttgaagagtacttcatgagggggtatacaccaatagaggggaagccaccagccaccaacatgcagagggaaamcamcaccaccaccaaaaacagacccccaaggtatcaggagaag

SEQ ID NO: 2456 - DNA, 303 bp, Homo sapiens
  SITE (213): n equals a,t,g, or c
  SITE (219): n equals a,t,g, or c
  SITE (240): n equals a,t,g, or c
aacaaacctgattgctttttttgatagaattacaaaattaatggataaagggatgcagtaaaagtagaatatttggattttcatgaagtatgtaattcagtgtttcataaaatctgtcttacaatattaattcaaattggcttgaagatgattattctcagatggtgggaaaaccatttaaagagctataaacaaggggtaatgataaatggnaacagntagaattggggggaggaatgngctgtcaccaaggttgatttaggtctcggattttagtatcttcattactaacatgccaaatgg

SEQ ID NO: 2457 - DNA, 543 bp, Homo sapiens
tgcttctcttaggctaggggaagtgggagcttctgggggcacatttgtgctagtcctagccttctatctatcttatcccttgtgtgcgatttgctactcttgccaattagcttccattttctattactatctcagttacagttgaccatgcatatattctcttcagaatacgcgaataagccagtcacagcaatcagtgctatgcacatgcagactactactatggataactacagtgcgattcgtcatgactgagcgtggagcagagtccacacagaagttgatcgtggtacccaaggctgcttctcactcattctggaagcagaccgcaaaagtgaaaagcacacatcaggggaatacattcagttttcattattgacagttgtttttaaaaaagtatgatacgaaggcatttatacatttttgtgataggcattattagaaaaaacaatatccaggcactcctgaaccataagtttgtgagaactattatactgttagattaagaagcaaaagtatttattagacagataaatgtgaaaa

SEQ ID NO: 2458 - DNA, 823 bp, Homo sapiens
caacatttttgcgtttcttttctttgggggggtgggaacaggaaagggataaagaatccaattagtgttaacaaatcttatcaacatgtctccaaatttagactctgccacacatgtggctggaaagcagtggccacccaaaacaactctctaaaaagtaaaacatgtagctctgaaaagtcagataaagcaaacccatgccctcaagaccccgcaggaatgccattagggggcaggaggcctgaatttggctgtaggaatttagagaatttggaggttctcttccattcaaattttttcctccaagtggtatatactttaccataattttcatcataagccaaaagtctgacattagcctgaaggactgtgtgaccattaaagttagtaaattaaactaacttattctttacaaaagagtaaatcattcttttatccaaagagtgactgaggtctacactgcactcagcactgaggggagcgccacggtggaagggaacacacgtgggtcacagtcaccgcacacaaggtacttatggtctagctggggatgcaacacagccacacgccaaccagggagtgaacaagacagcatgatacatagtaaaataatgttccaggttaaccaggaaagaagcaagtgcgactgtgcctttggttactatgtcttttccaactgatgacatgaactatactgtatatttttctgaataaaaatatttttctttaaaaaaaaaaaaaaaaaaaaaaaaaaaaaaaaaaaaaaaaaaaaaaaaaaaaaaaaaaaaaaaaaaaaaaaaaaaaaaaaaaaaaaaaaaaaagg

SEQ ID NO: 2459 - DNA, 419 bp, Homo sapiens
  SITE (316): n equals a,t,g, or c
  SITE (381): n equals a,t,g, or c
  SITE (394): n equals a,t,g, or c
  SITE (404): n equals a,t,g, or c
cagactctggggccccaggmggagggcaaccagatgtcttcagctccaagtctggcctctcctcccagcaagcagccaactgcagagaccttggaaaggatcaaccatatacaatgtccatttcctgccctctaacctggcaggggagcaaggcccagccaaggaggtaacagattcctccaacacaaaccacaccttccttccccacccccaccacctccacacccagctgcctctgtggggacttcagggggagagtgcacacagtggggcctcaaaggttatgtagcttgaataaatgatcctccagggcctngggagcctctccgctccctcccccatttcctctgggaaaggaatgtggggtgggccccagaggtngtgggcggagggngcccagggtnggaaataccagggcg

SEQ ID NO: 2460 - DNA, 328 bp, Homo sapiens
  SITE (4): n equals a,t,g, or c
  SITE (6): n equals a,t,g, or c
  SITE (11): n equals a,t,g, or c
tggncncttgnaaatacatagttaattctgcagggtctcagacatcctactgagttgccaaatattgaacaccaagctggggcttgtcaacactcaggggctacaaagaggagatctcaaaactaccatggcctcaggattctgaatgtgggtctgaaatccctacttcttactttggattaaaagctcacctgagctacacacatctgttgtcctagaatggatatttttatttagatatcaaccaattcaacttcactcctttattgagtcagtcaagaaatcaataaaattgacttcaaaaatgaaatcacaaaaaaaaaaaaag

SEQ ID NO: 2461 - DNA, 609 bp, Homo sapiens
tcactgttaactctcagctaatcttgtctccatcctgccaccctccactccagattattttgaagcaaattctagacatcacttccttttattaaagcaagttgcgtttcatagtgacaatagaaaccatttactcttgggcacaggtgctaaggtctgaatacaactttaaggagacagtgtctgcattgaagagcttatgttttaagaaaggagtttatgttttcactggatatactcggcgttcagggaatcagagactttcttcaagtttcccttgtcttttaaatagggacgtatttgcaagttcttatctgtttggaaattcctgtagcaagttcaggtttagtcattctgtactgctttggtggtgccttatctaaatagtattgaaaggaagaaagaattatttcaccaagagttggccttgaaaggagttagatgtattgggtatatttaggaagtaccccttcaacgctgtaataatataccaacttttaaagctacctcataatagctcttaaaaacacatttaaaaccacttagaggtgatcctttttcctagccatcagtgggacaaattaatccccttttggagtaaaaaaaaaa

SEQ ID NO: 2462 - DNA, 557 bp, Homo sapiens
  SITE (117): n equals a,t,g, or c
  SITE (481): n equals a,t,g, or c
  SITE (530): n equals a,t,g, or c
  SITE (553): n equals a,t,g, or c
ttggtctttgcatcgcctgcttttccagatagtctaaaaaaagacttctgaagacaaggacgttcacgaggaaaaacttgccattttgagctttttaagcagttgctggaaacttgngcagactgcctcaatttttcctaagtaggcgtcaatgaagtcaggtccaggccttggtgtgtctggaatgcttcaagcacattcgaacacttgatcgtaagggagagccggtacttttggaaccggaactcacccgaggctgtggccaccgcatgggcaggctagctgggggacaagccccatatctttgggaacaagggtttgcacagccaccctgggatgccctgggactcctgaccgcacaggaccccagcagggaggccgcctggattggagggtctggtctaacagccggacttggtcttgaaccgtcgccctgtcccgcacaggcgcctgctgagcctggagccctggcagaggcggnatctggggagtggagctgccaggaggcctcccatttcttcacagccttngtggttccgggtcacccagaggnggtc

SEQ ID NO: 2463 - DNA, 484 bp, Homo sapiens
gaaaagtaaaccaggcctgggcacagtggcttatgcctgtaatactaacactttgagaggccaaggtaggaagatcacctgagctcaggagttcaaaaccagcctacgcaatatagtgagacctcatctctataaaaaaattttaaaagttagtcaagtgtggtggcacacacctatagtcctggctactcaggaggaagtaaaccagacagattaagttcctgacctcagagagcttaattctagaggcagggaaaaaaacacaarattactaaattatgttacatgctaccaagaaataaaatggtttakgcataaagagaaatgggagaacctatctagactaagtgttcaaggaaggccttctgaggkacatttaagtttatctgagctcacttgctatgtgactttcagcaagttactttcractagagcttaggttcctcttctgtaaaatggggrtgaatataatgccacttatttc

SEQ ID NO: 2464 - DNA, 404 bp, Homo sapiens
ggattgagttgaacgtgttgaggctttgcaatttcacttgtgttaaaggctctggcatttttccatttctatgcaaatttctttgaagcagaattgcttgcatatttcttctctgccgtcacagaaagcagagtttctttcaaacttcactgaggcatcagttgctctttggcaatgtcccttaaccatgattattaactaagtttgtggcttgagtttacaaattctacttgttgcattgatgttcccatgtagtaagtcatttttagtttggttgtgaaaaaaccctgggstgaagttggcatttcagttaaaagaaaaaaagaaactagtcccagatttgaaaacttgtaataaaattgaaacyccaaaaaaaaaaaaaaaaaaaaaaaaaaaaaaaaaaa

SEQ ID NO: 2465 - DNA, 445 bp, Homo sapiens
ctttttttttttttttgctttcatataaaaatgtactgtagtaatcagtaagaaaaagaaacaacattggctaagtcacgawtaggcatttcaccatatgtacatgataaatggccaatcaaaataaggaatggggctcattctgctggaaattaaatacattcaaacaagaacagagatccattagcaaaatgtttaaaaataatatcacagggttaccaggggtatgacaaaaatggacacttccatacacactaggtgaatatattggtgaaaatagttcagataaacatacaaccatgtatgtaaaagtatttatcatcaatgcattatttgtagtagcaaaaacaacaagcagccttgtgaaaccagtttaatgtcctcagcagggaattaataatattattgtatattcatgaaattgacaccatgtggccacacaaat

SEQ ID NO: 2466 - DNA, 502 bp, Homo sapiens
cttctgctttggggttggtgagcgagaactgctagactcccgaacaaggctgtaaggtttgggaggctcaggagctggttgtttagcttctcgggcacgacgctgaggatcaaaagagctgccatctacgtaagaatcactgatgccaaaggcagcacggagtctttcattcttcttctcatttaawtctgccaactggtgagtctccgtgaccgctggcctctgccctggggtctcctccttgcccccagggttcacatccttctccagcaacatgagtcgaaaggtcgccamtttttcctgaatttgctgttcctcgtacccgccgcctccgcccgccgcctccgagggggagaggtcttgccgccgccgctgctcgaggctyccagtcccttcgggcctggggccgccgcctcgcctcgccggtccgcccgcctcagccgacgccgacgcctcctcgcttcctcaggggccgcaacgggctccgactcggacgcgtggg

SEQ ID NO: 2467 - DNA, 558 bp, Homo sapiens
  SITE (344): n equals a,t,g, or c
  SITE (493): n equals a,t,g, or c
  SITE (555): n equals a,t,g, or c
aagggtcctgtcagcaaggagcccaggagtggtatgaaccgtaacagtgcccttagagtaaatgtgcggcccctaagaccctgccctcaggaaggcggccttcccctgcagtcctgtgtcccacccctgggtctctgtagggtgccatccagggcaagcaacccaagcactgcttcccaccgggtgatgagccatgcaggcctccaaactgcacgtcatgattcatccctaaagtgagtttggccttgagagtccccagggtcctcccccactgggcaggggtcctcaaagccaargaagcctggtgacacaggcacccatgggaggtgggcccagaaaggggnttcccatagataggccctgtgagtagggagcttgtacactgggccatgggagcgcagttcccttgagcagtaaaggcccttttccccctacggtgggacccaggagtctctctggacagcttttctggccaggcacagtgggctcatgncctgtaatcccaacactctgggaagcctaagcggggaagatcacttgaaggtcaggagttcnaga

SEQ ID NO: 2468 - DNA, 479 bp, Homo sapiens
  SITE (435): n equals a,t,g, or c
  SITE (463): n equals a,t,g, or c
  SITE (474): n equals a,t,g, or c
ctgaaacctaacccaactgaactgtcccagtccatccgcaagcaagtattttttttaaagaaggtgtggatcaaagaagaacactgacacagctcctatggatgcctaaattcaaggcaaattcactgaaagacattcttctcaccagagaatatccygggagatggaataactcgaaggaatgaggactacaggaaaatacttgtctcaagacaaaatgacaaaaagccagagcattcagagctcagagaacatgtcacagagcttcagatcagctggccatggaggtttaacaaggaagccattagggacaccctgctgggcctaattgtttttagaacatatggaactttgtgccaccacacagctgtgaactccctgggcttttgtccagcttgtggttcacaacctccaggaaggaaattagctccactnaagggcccccacctctggatttccccantaattttaccnaaatt

SEQ ID NO: 2469 - DNA, 453 bp, Homo sapiens
aagatgttctcatccactgaccgggccatgcgcatccgcctcctgcagcagatggagcagttcatccagtaccttgacgagccaacagtcaacacccagatcttcccccacgtcgtgctagtcaggtcagcaactccgaccacaaatcctccaaatccccagagtccgactggagcagctgggaagctgagggctcctgggaacagggctggcaggagcaagctcccaggagccacctcctgacggtacacggctggccagcgagtataactggggtggcccagagtccagcgacaagggcgaccccttcgctaccctgtctgcacgtcccagcacccaggtaccsagcasasgtctggcgagagggtagagatggtggacctcagccagaagtgggccccactgcagcccacacttctctttacagccgaggccagactcttggggtgagga

SEQ ID NO: 2470 - DNA, 357 bp, Homo sapiens
  SITE (314): n equals a,t,g, or c
agggaacatcctggacttaaaaagccagggcaggccgggcacagtggctcacgcctgtratcccagcactttgggaggccaaagcaggtggattacccaaggccaggagttcaagaccagcctggccaacatggtgaaaccccgtctctactaaaaaatacaaaaaagctgggtgtggtggcacacacccgtagttccagctacttgggaggctgaggcagcattgcttgaacccgggaggtggaggctgcaatgagctgagatcatgccattgcactccagcctgggcaacgagagtgaaactccgtccccancccctgccaaaaaaaaaaaaaaaaaagccagggcaaaggacct

SEQ ID NO: 2471 - DNA, 418 bp, Homo sapiens
  SITE (209): n equals a,t,g, or c
  SITE (390): n equals a,t,g, or c
  SITE (417): n equals a,t,g, or c
gggagcaccccttcctggtcaatctgtggtactmcttccaggatgaggaggacatgttcatggtggtggacctgctcctgggaggcgacctgcgctaccatctgcagcagaatgtgcatttcacagaggggactgtgaaactctacatctgtgagctggcactggccctggagtatcttcagaggtaccacatcatccacagagacatnaagccagacaatatcctgctggatgaacacggacatgttcacattacagacttcaacatagcgacggtagtgaaaggagcagaaagggcttcctccatggctggcaccaagccctacatggctccagaagtattccaggtgtacatggacagaggccccggatactcgtaccctgtcgacnggaggtccctgggcatcacagcctatna

SEQ ID NO: 2472 - DNA, 612 bp, Homo sapiens
ggaagaatataagtactgatgataaagtctagtatgcataataggattttggaggcatttcaggaattttccttttatagtatgctttttaggcatctgtatgtgtaatatcatagtatcatttattgctgggatggatcgaaaagcactgcttttacttttctgataagtatcaaaatgattttccrgtmccmacytgactggcytttaattattgtcacacacacacaaaattcaactcctcaaggtttgggaaattgtgtatttttttgtatacaagataaaagtgtcataaaaaggaatggatgaattgttgataggaacattagcagttaatttttacctgatactgagtttactgtaaaataggaaatgcataggaaggaatacctcctaaataatatgccttatagaatgatgaaatcttaccatagttcatactgaaaatgttgtttatttaaaagtattgtggagtgttgaaaataaagatacacaataagtattttctgaagagaaaattaatgaaggtatttaatgatataggaaataagtgacaagttaaagtccattttgtttcaataaaggagttgtgcaaactcaaaaaaaaaaaaa

SEQ ID NO: 2473 - DNA, 511 bp, Homo sapiens
  SITE (392): n equals a,t,g, or c
  SITE (469): n equals a,t,g, or c
caccctctttaacgctgttccccaggagctggggaaagggatgcttttgcccactcccatggcccctggaactggtggaaaccttttcctctaaacccagaaagcctcggatatcctttaattcacccaagggatccttggcgtggagtcttcctccctttcttcccaaagtctttctccggtgaacttttccttcctggacttttgttaaagcagaaccttcccagctctttgcctgtctccggttgtctcttccctgtattcatggcaacatcagctgacagccccaagttcacccctcggggcggaggatctcctgagtgattcatcagaacccctggsctcaaccaagtgtcgtctgaagtgacctcccagctctatgcttctttgcnctcagccggcaggcggagccacggcccgagcccagctgtatttaccctccacctccccgcctcatgaagggtttagnacgtcgcccaagaattgagtcgaagcttgtcagtcggattgg

SEQ ID NO: 2474 - DNA, 434 bp, Homo sapiens
  SITE (16): n equals a,t,g, or c
  SITE (31): n equals a,t,g, or c
ttgaaacccccgaacntccgggtaaacccgnccgccctcagccccccccaaagtgccgggatcacacccgttccatttgttaaagcaatttgcctaaaaactgaccgaggtttattccattgcctatacagcagtgtttgattcagataaatatccttaatagagtcacatttccttcatgtcatgccctttaaggttgttccccaaatagtcataaagarcagaggatactcaggtatgtaagatcttagagccaagagagagtatggaaatggatgttcagctggtatttactgtcataagtgggattaggaattgtgggtttagggaattaaaaacaaccaacaattctacttggcttttaatctcttcagttatgagtgaagcatatttgcttgtaagggaagagataaggtaaaggaaatgaaataatt

SEQ ID NO: 2475 - DNA, 247 bp, Homo sapiens
  SITE (39): n equals a,t,g, or c
ggagccagcagatggactggctcagggaagagttcctgnggtgtctgaaccaattccagtctgcattcctgtagttggcagaggcctyagagagaacagcaagwtctgggctcacgtrtctcagtcccctgtttccttttttccttcccaatttccttccttcagcctttcctttcttactgaattccttactcttcctttcttccttcctgcctgccctccctctgttcctcctgtctccctttct

SEQ ID NO: 2476 - DNA, 207 bp, Homo sapiens
  SITE (174): n equals a,t,g, or c
aaatagccaaccttactggtcacgcacacagcaagtcctcaataaatgtwagctactacactatgattgtragaactccatgtccagacagcaggcaagagtgagcaggcctaatctggttcacgagggagaatttcagggacaaaatgatctcacagtggtgctgtgattctnttcgcctaacatattttgaaatgctcagaagaa

SEQ ID NO: 2477 - DNA, 204 bp, Homo sapiens
  SITE (138): n equals a,t,g, or c
  SITE (194): n equals a,t,g, or c
ggcacgaggggaaaagctatggggatgtattgagtatctctttscccaatracgtattagtcgtattaaatatggaaagtgcctttgattcgccgtgcccatgggagarggcataggaatggccttttcccacctgtnaatcagagagcaggtgtttcaagaacgcctcaatatgtttgcgaatctctcacgcngcctttcagg

SEQ ID NO: 2478 - DNA, 421 bp, Homo sapiens
  SITE (388): n equals a,t,g, or c
  SITE (397): n equals a,t,g, or c
  SITE (421): n equals a,t,g, or c
ctgggggcctcactcaaaaaaaaaaaaaaaaaaatgctgtcttaggagcagtgagtacctctgtctgctatagcgttttcatgctctatttctaagtgaaactctactctcagattctctttgaaaatctgatgataaaaatgcttgagaaaattaacacagatttgctaatyactttataacacaaggttttacagataaataggtattctcagcctggtatgctgtttgcaggatattctagtttgaatacgggccagtgatgtttccagttccagaacagtctccaacactgttttcaaggcgttagtgtgggcctctgggagtctgacgttgggatttccacccttcgctctgccaccggctggtggcaaccctagggaatgtncccaacctntttgggccctcagctttcctcttn

SEQ ID NO: 2479 - DNA, 337 bp, Homo sapiens
  SITE (329): n equals a,t,g, or c
  SITE (336): n equals a,t,g, or c
aattcggcagagccaccttaaagatgacttccccatgaagtcttatcagggcctgggagagccttggtgttttaccaccactgtgtgttgcccagaggcgcatttgtgagtagccagggcaggacttagaaaagtcggtgtgtctggtgaaaggtagctgatctgaagggtagcaagtaatgcaaaagcactaatttgctaagccctgtctgtgatccagtaagactrgctatctgggcttttggaaaattaatttcctcaacgctggttcacaaaatcaccaatttaccacatactgacaatagtttgttatatctggggggtttcanctttcang

SEQ ID NO: 2480 - DNA, 115 bp, Homo sapiens
  SITE (114): n equals a,t,g, or c
cactctgctgtttcattggctgtctctgtattttaggggtcacagtgggagaagcggtcccgaggccagggaaccagccaagtgcccacactggtaagaattgtcttaccaagnt

SEQ ID NO: 2481 - DNA, 591 bp, Homo sapiens
gacctgtccagctctgcccctgctgcttccatgtgataggagacagtcggcacccccctctgaatttctgtatctgcatcttaacaatggggatgactatcccctctctggttattgtatcagagatgttaagagggtcatgtggcatgattggagaacctgggggaattggaaggccttattatctcagctattgtcccaaacaccacagacacagattgggtcagtccttcatgtaatacatgctgtgttctgtgaggatgtggtccacacaattccttctttgttaagggacatacagttgcaaatrstcactgcaagaaggcaagattcccaagggagatgtgatagytgatcaggsttcccagacacctccttcscaaacacctccttcccaacacctccttccccaacacctccttccccaacacctccttccccaacacttccttcccaacacctccttcccaaacccctccttccccaacatccttccmaacacctccttcccaacacctccttccccaacacctccttcccaaacacctctttcccaaacacctccttcccaacacctccttcccaacaccg

SEQ ID NO: 2482 - DNA, 433 bp, Homo sapiens
tgccggttggcaggaagtaggccacttgagttacaagacatttctgtttgaggtttctgaactgctgtttgttctctgccagctgggggcgcgatttcttgttgatttctagaatgttcatctctgccttctcaccggaccaagggccggcagataccaccatgctgacgtttgtggcagaagaggtggggccagggatgttgagaaaaatgtgatcagtccccgcagcactttaggatccttaacgacaaaaacaatgttcgaggtgcctgagctcagagctgaaggcactgccaatagctcatctccgacaagartgaggccagtgtgccaggtaacggtctgagttgagggtgcagtgagtgtgatcctgggctgcccarcattcatgtggtartgaaggaaggaggactkgatcaawcctgtgccgaag

SEQ ID NO: 2483 - DNA, 704 bp, Homo sapiens
  SITE (368): n equals a,t,g, or c
  SITE (543): n equals a,t,g, or c
  SITE (606): n equals a,t,g, or c
  SITE (637): n equals a,t,g, or c
  SITE (651): n equals a,t,g, or c
  SITE (694): n equals a,t,g, or c
agagaacaggtgcagccggctgatttctccatgtcatttgcgaatccagaatgtaccatcttccatgcctagagatgaaaccgaagtacgtggaaaggtctgtttatgaaaacaggctgttgacagcccatcttcctgttttacaaggatgagttgattgatcacactatgccacatatcatgccacagaatgataatatgtttgcttacaacgaaggtggacgtgggcgtggtgcacttcactcccttgataagcccaagatagagcagccattcaagctggtggaaaaagtggttcagaatgtatttcagttccgaagaaatactgccatcgagggctcagaatgttattccctgaagcgcaggtntggaaagcacgggcaggctgttagagttggcagacatagaccctactcttcggccccgccagctctccatctcacactttaagagcctctgtgatgtatacagaaaaatgtgtgatgaagacccacaactctttgcatataatttcagagaagaactcaagcgaagaaaaaccanaatgaagaaaaagaagaggatgacgcagagaattacagactctagctgtgctggggcgagcanctaccagatgtcgatttgcactacgtgagcntcttatataggtcncttttgcttacagaatgccgatccaatgccatgcccgatgtgnttattccttt

SEQ ID NO: 2484 - DNA, 713 bp, Homo sapiens
  SITE (71): n equals a,t,g, or c
  SITE (75): n equals a,t,g, or c
  SITE (685): n equals a,t,g, or c
  SITE (695): n equals a,t,g, or c
  SITE (708): n equals a,t,g, or c
gtgaaccagtggtagaaagcacagaaactgaggggacataatcatcactcagtaggcaagatgatgatgantgangtcctggcagcttcctgtgtcccaggccttgtagaaataaatgagacagacgtgcttcaaagttctaatgtgcatcacatcggatcttgtttaaggaagcgttaaaaggaacccgccgttacctattgagaaggctctgtactctcaggcattgtttctgattgaatccagaggttgcaagcatgccttcctgtattacctgttggagcaggtttaattttataaattttaaacacaaactctatgagtttctagttcataattgttctttttggggatccactcagatgaacagtattgcatctgtaagagatacccacttcccaggaccagatttgattggaatatcagtggcaacagactccatctgtagctcatccagtaccagtgatggaaaggacagatggcaaggaaaccctttcggggggaaaaagaaagtcatattgtgttggacctacagattactagaaacatagctttagtaaaccaaggstttttttcytgaacacaatctgtgtagactggtgtagttcytgattgggtggcyttaatcccattatcattaggtayctccctggaacggtctccaaacactggaaaggcctttagnctttccattnaaaaaaaaaaagngtttg

SEQ ID NO: 2485 - DNA, 286 bp, Homo sapiens
  SITE (263): n equals a,t,g, or c
cactggcttgacggctttctctgaaaccctctgattccgcctggcccatccacactgtcccttcccggccaggctcatctcctatgcctggaccaaacagcgtagtctycagtctccctgatctccccacacgtggccccacccatcctctgaagcagccccaggaggcagcagtgacttcacacttctagtgcccggccctcccggccctcctctctgggcttgcttgccagggtcctcccaacctgactgctgcctcccanctcctctccgcccctggagctct

SEQ ID NO: 2486 - DNA, 489 bp, Homo sapiens
  SITE (453): n equals a,t,g, or c
ttaacttatctgagcctctattacttctaaaacagtgcataaagtgcagactaagacagtttttttggcaaaattcagtcagactacatcaagtaaactccctaagtctcctagtataattcatggcacaaaaaattggggaaaaaacagggaggatatgattataagttcagtttatgttttttgttgagtgaatgtctccagtcatagagatgcaagtgtagatacacagtaagagtagtatgaatgggagacaccttggaaggctatttcttccttccttcattcagttggtcactcagtgaactatcatgaattgagcaccgcctctktttcttatcaacaaaggagactgcggaaaagaagagtgactaagatctctgaagaagggaaaagctagatgactgggccacaagaggaaaaaaagcagcaagacagttacaatggtttctnggtcccacttttattaacacacacacacacacacac

SEQ ID NO: 2487 - DNA, 758 bp, Homo sapiens
  SITE (20): n equals a,t,g, or c
  SITE (758): n equals a,t,g, or c
agagtgtgccactgccagcnagctctttggctcaggttaactgcagaataattttccgtgctgagaatatttgttaaatatcaccatctcttcattatgcttctgtaattctacctgcctggcagctgtctgcaggccaatatgtcaggtgataagctaccaactgccatggagctgcccctttagttatctttaatttggggaaaactgcaaagtgatatttttaccattttagtatgggtctaagcaaggggtgtgtgtgcatgtgtgtgtgtgttgtatgttttaatgtattcatacactaatcatgggcctttttcttagtattcttacattcccgtgcatgtgactttccagttatgtaacttgctgttagaaaactttagattcccttggttcctgaagtacacagaagtggtgttcattttcagagtagaaactgatgtgcctttcagaatggctgacaaattttgggggtaagaaagtatgttacatgtccttagagagagagaaagaattgatttatgaaatagtacttttaaatttttcttcagatttggtatcattaccgtaattggtagacagtaaaacctgtcacttgaaaatgagcactgtcacgttaccattaataacgttaacgtacgctaggcctaagactccctgcagtgacccatcttgtttgaatgaattgtctttgtgtgtagataataaacctgctgaagaagttgtcccgcaaaaaaaaaaaaaaaaaaaagatn

SEQ ID NO: 2488 - DNA, 1005 bp, Homo sapiens
  SITE (980): n equals a,t,g, or c
  SITE (998): n equals a,t,g, or c
tttttcagaagacaaaagcaggtttattagggccctggggccaggaatgcctaagatatgagttaaggccagggccgtgagaaaaggtgactctcctgaggccaaacctttgcatctcaraagccctggctggagaccttaggagtcagttctgggagggacctggggatacagaggggtctctcctgaccctgggatctttgggcttttgccaggattggggaaatgrtctggggggcagggagccttgaatccacagccttcatttcaataacgaccatttaatttgttccttggcagactgaagaacctgggactccacacgagacagcacaggctcatctcggtagggccaccacagcacgaggagttagcgccagggcgggaagttccatacaagcaggattagtctgagcagagagacctgggccacactctgttcagtcaagccgccatcatctgccctaaaattcaccttctggatcacttgctgggggtcactctccagaatcacaccgccatccacaatctcgtccagcaccaagaaggctccgtccatgttctccagcaaccagcgcttctccacgttcttccttaacatgtggttcagagactcaaacaggcaggtgagaacagacatgagcatcagctcattctcgtaggatgagcccaccacgtataggaagaggtcaatgctgttcttgtagacgatggtcatacccccaaaaaatgcaatctcactctcagtccggctggtcttgttgaagacatttttctcgaaaaccatctgctccttcatggaggggaatgtgtcatcataatacttggccagcagccggcgcccgtcattatctaggatgaaaacagccttgatggtgtagagggaaggttcctgcaaccgcagccccgagggctccccggctcgagcaggcggcgccgggcccccggcctgggccgccgcggccccctcccccgggtgncggacgtgggccaggccncgggccg

SEQ ID NO: 2489 - DNA, 253 bp, Homo sapiens
  SITE (247): n equals a,t,g, or c
  SITE (250): n equals a,t,g, or c
ctagttctagatcgcgagcggccgccctttttttttttttttaaatactctcttaaaaagttccaccgatctttcaaacaaaacattagccagccgccggggccggaggtgcgaagcgacgggactgatagcggaggaaacgcagcctccctccgcgcccgcccgcgtgtaaaccgagtacaggccgtggagcaggctgccccggtcccgctgggtcccaacccccgccccgcctagtgggccccgnggnaag

SEQ ID NO: 2490 - DNA, 465 bp, Homo sapiens
ggttaaagagcctgaccattagtcttttttttttttttttggagataaagtctggccctgttgacgaggcttgagtacagtgacgtcatgctagctcagtgcagcttcgcactcctgggctcatgcaatcctcctgcctcagcctcccaagtagctgggactgcaggagggtgctaccatacctgcctaatatttaaatttcttatagagatgtggtctcacttcgttgcccaggctggtctcaaactcctggtcttaagtgatcttcccacttggcctcccaaagtggtgggattagaggcatgagccactgtgcctggcttgctgtagtcttgagaggatgagagtataggagtgttctggagctcagaagatacccaaagaggargccgacatatatatctkgggtcccaagttgctggcccccttcactctgcacttttgtctgaatgtggcctgtaccaa

SEQ ID NO: 2491 - DNA, 255 bp, Homo sapiens
  SITE (251): n equals a,t,g, or c
  SITE (253): n equals a,t,g, or c
aatttcactaacgcagctaacgcgttaaatgatccgcctgagtagtatgctcgcaagwgtgaacttaaaggaattgacgggaacccgcacaagcggtggagcatgtggagagcaacttgggaagaacaagttcattttgtattgaatgatttttaatgaatgcaatattaatccttgcagatgagcaataatcattaaaatcgattaaaatgataaaaaaaaaaagaaaaagaaaaaaaaattaaaaaaananca

SEQ ID NO: 2492 - DNA, 276 bp, Homo sapiens
  SITE (253): n equals a,t,g, or c
  SITE (259): n equals a,t,g, or c
cggacgcgtgggtttggccacacgcttgtcaacccactgctttaccggctggacgagaacttccagcccattgcacaagatcacctcccccttcacaaagctttcttctctcccttccggattgtgaatgagggcggcatcgatccgcttctcagggggctgttcggggtggcgggggaaaatgcgtgtgccctcgcagtgctggaacacggagctcacggagcggctgttctccaggcacacacgtgggttngggacnggcggccatcaaatcca

SEQ ID NO: 2493 - DNA, 380 bp, Homo sapiens
  SITE (352): n equals a,t,g, or c
  SITE (363): n equals a,t,g, or c
  SITE (375): n equals a,t,g, or c
atcatatagtaaaacccagcccatgacccctaacaggggccctctcagccctcctaatgacctccggcctagccatgtgatttcacttccactccataacgctcctcatactaggcctactaaccaacacactaaccatataccaatgatggcgcgatgtaacacgagaaagcacataccaaggccaccacacaccacctgtccmaaaaggscttcgatacgggrtaatcctatttattacctcmgraatttttttcttcgcrggatttttctggagccttttaccactccagcctagcccctaccccccaattaaggagggcatgggcccccaacaggcatcaacccggtnaattccctagnagttccattctnaacac

SEQ ID NO: 2494 - DNA, 413 bp, Homo sapiens
aacatcttttccagcggctgaaccgatgaaataaactaacacttccgaaagaatgacacctagtgtcatagcaatgattggatagtagaaaaatgcataagaaaaacttgtaaaatatcctaacttcttccctccagatctgtataatcaattagataaaccatttaattttgaaggcttcagaaaacttatttctgaaaagtttaatgcaacaattaaagaaataacaccacctacaactcaggctagtaatcatgttataccttgactgtcagttactttttggrtggaattatttttgaagaaaatcccaactccaacaacagaaccaacaagcatkgctaatgstgcaaaaaaacctaatttctggsgtttttaatgtcmtawtgttcctttacaaaaattttttccgg

SEQ ID NO: 2495 - DNA, 453 bp, Homo sapiens
  SITE (415): n equals a,t,g, or c
  SITE (441): n equals a,t,g, or c
ggccggctttactgaccctcacagacccaggctgggccctcccgatagaggccagccaaaggttcactcagcctctctttcaaggctggtgtatctctaaatcttagaccctcctccgttaccgtcagccaggtgggatgcccacgttttggagagaaaccgttctgaggaacccgggcctctgggtcccagctggctctccggcccccaggttatgtattctgggttggccacaaacagtggaattctaggcactcccgggacagggtgggactgctgtcctcattcatgcaaccagcaaatattcamggcaccttgtttgtgccagacagcagaccggagggacacggttgttaccaagaccargctgttgcttgggaagagcccagagcgtgttcaaggggagacagccacntctccagtccgccgaaggggaaccanggaccgttttcg

SEQ ID NO: 2496 - DNA, 462 bp, Homo sapiens
aggatgagcaaggctaaaatgaaagctcctgtgatatcagggtcagatacaacaagtatttgccaactctaggaaagtttcaccatctgaccttaattattccacagaagggagggtttcaccatgataacaaggagaagcgcacggsatcaacacacacacacacacacacatttttcttctcttcagtacctaagacgtcaacatttatacgtagaccatatgaacaatgtattaggtttctgccctaacaccattccaagaaagcaaagcccattttctgatactaacaatttagtttttgaatctgyttcttccttccaccattaccactattttataagatacccagaagaatggttattatttatgcaggtttgtgctccctckgggttctgtaattaactaataagtctaattcccataactatggctggatgtcatcaattatttttgtgcctg

SEQ ID NO: 2497 - DNA, 160 bp, Homo sapiens
gtctataacaaatttttacacttttacatttgtgaaatctatcatatagaagagagcattcagcatgtacaatttaatgagaaataaagttataaaacagatactcatatacccaatgctcaggttaagaaatgtacattgccaataccttagtaagctc

SEQ ID NO: 2498 - DNA, 300 bp, Homo sapiens
  SITE (14): n equals a,t,g, or c
  SITE (88): n equals a,t,g, or c
  SITE (299): n equals a,t,g, or c
gtcccacctcgtgncgccacacgcccgcgtgctggactcgcgtgtagcctctctggagggtggccgtgtcgtggtgggccgggagccngstgtcacctccattgaggtgcgttccccactgtctgactccatcctgggggagcaggcgctggctgtgacggacgacaaggtctcagtgctggagctgagggtgcagccagtgatgggcatctcgctgaccttgagccggggcaytgcccaccccgggggaggttcacagcttacgttgctgggggcacagtccagcccttttttttttnt

SEQ ID NO: 2499 - DNA, 465 bp, Homo sapiens
  SITE (463): n equals a,t,g, or c
  SITE (464): n equals a,t,g, or c
  SITE (465): n equals a,t,g, or c
ctgtggtcaaaggggtggcaagtggcctcagagaaacaatcayagaaagagctcttcctgccatgatgcagtgggtccgcacgcagaagccaggagagagtggcatcaatattgtcactgccgattttgtagaacttggtgactttatcagcactgtcataaagctcaactatgtctttgatgaaggagaagccaacacttgatagcactacttggagtttccatgaataagatggagaaagctcattgtattagggcatactatctgtaaacactctgatcttcctattccactgagtctctgaagggaatagggctggtagtgggtgggaaaaggggaaaaactgtttcttcagtgattacaatcatactcttcattactataaatatttcatttcccatttgatgagcaaaatctacttctagtgttaggaataaaaaaaaaagaccagtaaaaaaaaannn

SEQ ID NO: 2500 - DNA, 593 bp, Homo sapiens
ctgagcagtgggctgmttaggaagagaaggtcagagttcgcgggggcagaggcattcttgcgctggccagtcactatgtagtggaggggcagacaccctcccgcaaattctggaaggttcttagtctcgactagggcagtagccmcaggactcctagtcgccggcttcaggtcactgccggctgaacggagctgccgtcgccatgtttggctgcttggtggcggggaggctggagaaggaagccaacatccttttggagccatgaatattgtccgaactccatctgttgctcagattggaatttcagtggaattattagacagtatggctcagcagactcctgtaggtaatgctgctgtatcctcagttgactcattcactcagttcacacaaaagatgttggacaatttctacaattttgcttcatcatttgctgtctctcaggcccagatgacaccaagcccatctgaaatgttcattccggcaaatgtggttctgaaatggtatgaaaactttcaaagacgactagcacagaaccctctcttttggaaaacataatttgaataaaataatttttaatggaaaamaaaaac

SEQ ID NO: 2501 - DNA, 560 bp, Homo sapiens
gaaaaggacttttcatttcactgaggtgaaaagtcgggtctgtgagtagagcgactttctttaaaaaaaaaaaaaaaaatcagaaaccaattacttgatatgcagagctgcaagctcgttcctttaacaaaatcagtgcagtgtgcactgccgttaacctgaggaaagcagctgacatctcttgattacggctagaggtggaaggacccaaacttgcagcctccccctccccctcgagagagtgttagtccagtcctttagagaggttcggtttggctctctgtcatcaccgggacgctggcagggagtgtgtgtcatggttacaatagagtgtgctaacatataacaaccatgaaagcccagcgggaaaggctacagattccggggctgaccttggatctcactcccaggagcctgagtccaaccccatccagcccaggcagtccttgtagtcctctcttggcctttcacttttggagccctgtgtgtccaaatgctgggagaacatcaccccttggatgaattgccaccacattaaataaaacatatccaaagctcaa

SEQ ID NO: 2502 - DNA, 526 bp, Homo sapiens
tttttgcaaagaagacaactttattaggtgctttctctcccttatgagaaggatttggttctttcaggtgaagttccaaatcactagacaatacccagtttccttcagttgcaacaagttcatcccacggtgggtgctctgaaaagcaccttgagggcgaatgggtctcaggccattcaggatcaggtccgatgcttttgttgaagattcttcccgtgtcacctcttagaagcagttcggtgtccccctccaaagagcccaccacctggstgcgccccacctccatttgtcccccagttgccaggtaagggtacccagctaccaggtaacggtgagtggttcagaaggtgccgctgcgggggcagccaggccttcacacgcaatcacagatcaatgaacgtcaggaatttccagctccctccgtaggtctggtgtgagggcatttcgatggccttgtagttacacaggwtagagcagtaagacagcaggattgccatccgcagcacctggcaggggacaagcgccc

SEQ ID NO: 2503 - DNA, 441 bp, Homo sapiens
gcagagcacccaacgcatctagcaggaaaggagagggagctttccccgaagaccctcctggaccagccccagctcctgtgctggcggttctragaagtccaagggttgctgggagaggttggttgcacgccagggcctgtactgaccacctccacgtgccactggggctgtaaggaggaatggcggccgtggcagctcgcttcggccggctgagcagagcaccgtgaaggccaccggacctgcactccgccgcctgcacacatcctcctggcgagctgacagcagcagggcctcactcactcgtgtgcaccgccaaggcttaatgcacgactctaccccgtgctgctggtgaagcaggatggctccaccatccacatccgctacaagggagccacggcgcattgcttggcgaatgcccataagattttggacacccttgtt

SEQ ID NO: 2504 - DNA, 693 bp, Homo sapiens
  SITE (1): n equals a,t,g, or c
natatacagtctgcagaaggaggcagtggaacacacttgggcctaggccccatctcaggagccttcacatctccctgggacctgcacaatcaagtccaaaatctttgtctgatgtcaaggctagggcttttgcaaataggatcccatacatcttccagccctcatactcctccactcccttttcatttcctgaacattccaacttctatgcctttgctcttgtgggctccctcatgtaattaggataatttccagccaggtattccctcacccttgttttacaactgaatcccactttctctgggactccactgcttggtcactctgccctgtgctttgagaggaggttgggtggagcatgggacatgggccatttactgccttcacatttccckggtcacggtgatttttttaggggtgggcacatgacctaggtagagccaatgaagtgcaatatcactagaacatgtgagaagagaggcatgaaaccgaagctgagagggtttgagatctggagctactccttcctccacccaaacttcagaaggtgaaggagatagtgcatgtgagtgagcagatcccgagggcactgtttgagcctcagaatcaaagcacttctggaagctagtcccaatcttgggattcgacagtttacaaggaaccaataaatttccttttccttgtgggagttca

SEQ ID NO: 2505 - DNA, 194 bp, Homo sapiens
  SITE (19): n equals a,t,g, or c
  SITE (162): n equals a,t,g, or c
attgggaatcagttgtaanaactgctgagtgcccatgtctgctggttctratatcagggtcggtttcaggaggctgcttttcctccttgtttggggtcctattatgctgccttcctgtgggcctggtactctcgggttgatgcctgaggcattgcgaatttnaccatgttgcgtgctgggtgttttagcatttt

SEQ ID NO: 2506 - DNA, 740 bp, Homo sapiens
  SITE (727): n equals a,t,g, or c
tcccctaacatactttgactgttttgcacatggtagatattcacatttttttgtgttgaagttgatgcaatcttcaaagttatctaccccgttgcttattagtaaaactagtgttaatacttggcaagagatgcagggaatctttctcatgactcacgccctatttagttattaatgctactaccctattttgagtaagtagtaggtccctaagtacattgtccagagttatacttttaaagatatttagccccatatacttcttgaatctaaagtcatacaccttgctcctcatttctgagtgggaaagacatttgagagtatgttgacaattgttctgaaggtttttgccaagaaggtgaaactgtcctttcatctgtgtatgcctggggctgggtccctggcagtgatggggtgacaatgcaaagctgtaaaaactaggtgctagtgggcacctaatatcatcatcatatacttattttcaagctaatatgcaaaatcccatctctgtttttaaactaagtgtagatttcagagaaaatattttgtggttcacataagaaaacagtctactcagcttgacaagtgttttatgttaaattggctggtggtttgaaatgaatcatcttcacataatgttttctttaaaaatattgtgaatttaactctaattcttgttattctgtgtgataataaagaataaactaatttctaaaaaaaaaaaaanaaaaaaaaaaacc

SEQ ID NO: 2507 - DNA, 487 bp, Homo sapiens
  SITE (1): n equals a,t,g, or c
nggcagcagggccactcaatcaagtactcttttcctatgtggaggcctcagccaagaatccccctttttgtgcaaatgcatgcggacattactggcatgcctgtggtcctgtcgcaagaggtggagtccgttcttgtgggtgctgctgttctgggtgcctgtgcctmaggggatttcgcttctgtacaggaagcaatggcaaaaatgagcaaagttgggaaagttgtgttcccgagactacaggataaaaaatactatgataagaaataccaagtattcctgaagctggttgaacaccagaaggagtatttggcgatcatgaatgatgactgaacagggcttgcaggtgctgatgccagaagcttctgtgccattgcattaaagacttctgtcatttgatccatgttcaagacccttgaggtattgtttcatcawttctgtattgtctttcaataaagaaaacaaacatgtgcaaaaaaaaaaaaaa

SEQ ID NO: 2508 - DNA, 534 bp, Homo sapiens
  SITE (1): n equals a,t,g, or c
  SITE (47): n equals a,t,g, or c
  SITE (332): n equals a,t,g, or c
  SITE (454): n equals a,t,g, or c
  SITE (506): n equals a,t,g, or c
  SITE (528): n equals a,t,g, or c
ntgcctgtgctcagtaaataaggaaaatgctttcttagaaggctgcnccagtaactgcatattccttgccatcctctamagaaatcaccatctgctctcctaagttcttctggaaagagcaccgtaaccatgtcatcctaacagcaatgccatgaagaaagggaggcagctccctccacgtcctggctccagtgcccactcccgtgccccctccatggcccacgcagcctggccacctgggtgacatctggtccctgtgtcactttctkcaagacaaggaccagcctcaaagaggagagcatggtgtcctgaaggagatggcggscamcatnamctgtcctgtggctttcctctgactgcccaggtgggggcccagaggcgggcgcttttcagttccagctttgagtgggagtttacattaattttccagggtttccctgcagtttttcgcctncccattcccttgaattgttttacacagttaggttttcaaccacaaagagttncgcattgattgggtttttcctntgtttt

SEQ ID NO: 2509 - DNA, 683 bp, Homo sapiens
  SITE (678): n equals a,t,g, or c
accaaatcccagagatggggtgaagctggggtggggagggtctgctctttgaattacttgaaggtactgactccaaggctgctgttgcccacttaggtgtgagggggacactgtcactgcatgacctgtgatgctgcagacaccaccatcctgtgtgcaggtgtgtgttggggggcacgraggggcatgttccatgtcytgttgcaccctccaccctgtgacccatgtactcggttgtaggaagtaaagagaactgagcacaattcactggattctagtggaatctttctctaagcaattttcccattcctgcctctccctgccccggaaccacctgtggtgctagtgttgggatcgggggcgtttaacgctggtgggcagcaataaggggcagatgtgcccagatgcctgcatccccagggtgccgagggcagcaggaaaaagtggggacctcggtgcatttgccccacccctcccctccctgggctaaagcacaatgttctccccgcagattaatgaccctgcaccctccaggcccctactcacatcctcccccaaccggcttcgggtcctcccaccacactctggttttctatgctgttttggtgcaagtacaactgtcgtagtcatggctttgggatgggttctgtttattaaaatcctattgctcctactganaaaaa

SEQ ID NO: 2510 - DNA, 491 bp, Homo sapiens
agaagaaggacagaaagaagactgggagacaccggaactcgaaagaaaatcggtaacaaaatgtgggttcggccaacagtgccctgtaggcctgaaatttcggtctggccagagcaagatggtactgccttttaaggtctattacttaaacataagtatggctctggttcttaccgcctttaccgtatccttcatgggaagttgatactgatcggaaactgacacagagccttctcacctacactaagggggcctagcatacagaaaggctgtacctggaggaaggaagtgcggagccagcctgagttgggagaagagctccagagatgtgaaaacagactaatacatcgtctcaaaaaaagaaaagaagaaggaactaaagaagaatttctttggaagcaaaatatttggaagcaaaatatttggctcctgactgaaagggttttgatccatgcatacattaataaacccttcagaaccatgaaaaaaaa

SEQ ID NO: 2511 - DNA, 491 bp, Homo sapiens
tagtgcagacagttgtgggtgggaatcagaagacctagattctatcggctatgccccttactttatttatttatttttgccccttactttaaaaccttgggcaagtcacttaatctcacccaacttctcaaaaaaaaaaaaaaaaaaagaaaaaagaagaagggaataaatatggaataaatttaagatatataatgtggattamcctgggccctactcactgaggagggctaattgttggatttaatttatgtatattatatgaacttttggtttatcatttataaactgttaaccagctattcttcccctttttaggactcaaatggatagtgaagtccaaaacggaaagcggcatgtattgtacatattgtatgattcaacatttttaaaggcakattgtttttagtaaaatgtagcttttgatagttaataaatttgtcatggttgtctttgattaaaggaaactcaccgccataaaaaaaaaaaaa

SEQ ID NO: 2512 - DNA, 245 bp, Homo sapiens
gtccccaagggcccgcctccgtgtctccacagcacaactcgggcccaggcctgacaccactggagagaccccaggcccacttctagccaggcctgtgccttcctagtcactctaactcccagagagaataagaatgcatgtaatagctataccaaccgcgcatccggctttcacatgcactgtctcccctccctccacaccccacttcttcacttcaattggcagcgcacatccrggcgtcaccc

SEQ ID NO: 2513 - DNA, 367 bp, Homo sapiens
gccacggacacctccccatcaaaagccacgaaacccccaccatggaccaccacgaacccccagtggctgaacacctcggaaccccgaccaccgacctcctcccggggccccaggtaggacagcctggatgctgggcaccgagccaggggcctcggggctgggggcagcttgggtgctagcgagaggaagttcctgggggcgggcatgcggggagacacagcacccctgtggggggggcttctttctccaggctgggccttggcctccagacgcctctctgccyaccaacccctttgtattgagaggggcctcgacccctcctcatcccctcagtgaaaacaataaagacaaatttttgttaaaaaaa

SEQ ID NO: 2514 - DNA, 362 bp, Homo sapiens
  SITE (342): n equals a,t,g, or c
cccagcgcctgggactggaccttggcgttgggcgcagttgcccggagtttttggggcccccgggaacccgcgcgccgaggccggctaagtttggcagactctctgagctctcggaattcgactgcctccattgttgctccttctggcacccacagaccgtaacgtggccgtaattgtttcccggagagcttagcttccctctgagcacctccctcccctttttaaagtaccttcccactcgcctgcgtttcctcgcgttagtgggtgcaggggcctccgcatttgggggaaataacaaacacccacttccgccccccaccccaaccggggattccccagatnaatggaggaaataggatggg

SEQ ID NO: 2515 - DNA, 225 bp, Homo sapiens
acactacgctgggctcagagtgtagcactgaagcagcaaaagaactagcacagcccactccacgtttgcttaaggggcctttccccactcctgcacataggctaggatgattttagagcactgaagtaataacgcaaaaacagcaatcatgtccttcttgaaaccaactctgggatgaaagaggaaatgtgtaaacagctaactaggttttattaaagatttgcg

SEQ ID NO: 2516 - DNA, 304 bp, Homo sapiens
  SITE (1): n equals a,t,g, or c
  SITE (9): n equals a,t,g, or c
  SITE (15): n equals a,t,g, or c
ncccaattnccaggnaagaggacctcctgagctcaggctcccgggcagcggctgctacactgaggactactcggtgagtgtgcagtacacgctcaccgaggaaccaccgcccggctgctaccccggggcccgggacctgagccagcgcatccccatcattccagaggatgtggactgtgatctgggcctgccctcggactgccaagggacccacagcctcggctcctggggtgggacgcgaggcccggataccccacggccccacaggggcctgggagcaacccgggaagaggagcgggctctg

SEQ ID NO: 2517 - DNA, 354 bp, Homo sapiens
  SITE (2): n equals a,t,g, or c
  SITE (223): n equals a,t,g, or c
gnccgcaccgccagggactggggtgagcggcccagaaatctccaaattgggacatccagagcagcattcttgttctgtctacgtcttgaattagaaactatcaagctctgtaagtcctgaaaaggaaataaaagcaatttcctgctgcagagagcattttaagaaaggacagcattcctgtgacctctgcctaccatccataaaatactcattcccctctcanctctgcctgcagttgaacacaaagacctggaggagactcccacctccttcagggagaagaaaggaggcagcgaagcagattaaaggaacttgtggcttgtggcctttttgtgcaagggccgcctggaaggg

SEQ ID NO: 2518 - DNA, 439 bp, Homo sapiens
  SITE (337): n equals a,t,g, or c
  SITE (402): n equals a,t,g, or c
  SITE (431): n equals a,t,g, or c
ggaggtggtgattcaccaggacttacaggacttaatatatagctgtactcatggcaaacatttattacagtgaaaacacatataaaacaaaatcagcaaagggaaagacacatgggatgaagttcataaaaaaaaaaaaccacacacaagtttccaagagttctcccagtggagaacacagaggttgcacctaattcctccaataatgaattgtgacaacttgtgaaatgttgtctaaaggaaaagcttgagacttggtgcccagggttttcgttgagggctagttacataggtctaccctgccttgcacttaccaaggatttcagactcccaggangggaaagtagatgttcaacattaaactgcatttgttaggcacaaaacagtttaggacacaattangcccaccttgttcaggggattgtgggganccctctta

SEQ ID NO: 2519 - DNA, 536 bp, Homo sapiens
gatttggtttgttcccactgtccctttataaatatttgtgtgctctcattttaaaaagagaaacaccagaaccatgtttttctgtggttggaccagtgctcactgcccttcccagtagcccagtcacacccatgaacattgcagcccctgccagttgtgctttgcagttcgcctttcctcagggacctccaaagtccccagcctctgaagccattggggagaatgcacagtgaattctgatgcttttgctggtacagacacttcccgtgcggtgctaaccgtcccctgtgtaatagtttatgttctaggatgaccaagtagaagaatactttgaaaaaattgataatgccttctggctatacagtgagtctttgttttgttttgttttgtttcctttgccatatcagagaattaatttgcctgagagagtgtctttaagaaaataacgggagcacggaaaacccttagcactttgcctgagcagtgaaagaaagattgagctgtgggtcacagaaatgtccttaaaatgaaccaga

SEQ ID NO: 2520 - DNA, 275 bp, Homo sapiens
  SITE (230): n equals a,t,g, or c
  SITE (248): n equals a,t,g, or c
gatggcggcgggttgctgcggggtgaagaagcagaaactgtccagttcgcccccctctggctcgggtggcggtggtggcgcctcctcctsctsccactgcakcggakagagccagtgccgagctggggagctgggactaggaggcgccggtacgcgctcaacgggctgggaggtctaaccggagaggtagcggcagkctygtaccctctctcccccccaggctgcggcgncggcggcggggggatcgncctgtcgccaccttcgagctgcggagt

SEQ ID NO: 2521 - DNA, 437 bp, Homo sapiens
ccggaactatgtgggtacccctacccctcacagaagccaagggcatggaggaggtccctccacagtgacaacggtgtggggtaggggaggtgcattcaggacaccacccagggacagtgcctatgtgatcacctcttaaaggctaagcttaggggcatttcccaaagtggggacagagggcaggacgcccaggctgggggctctcctcgcccgccctggtgtctgacagcctcaaggaaggagcagtgcctgtgtcagccatggggcccttggastgccgctggtgcctagggggcctgggtttctgcccaggcaccagtggctgttgggagcctctgtttcccctgtgctgggggccttgagtgctatgctagcaggcctggccccaagtgtgagtgatgagcaataaacgtaccgtccccctcaaaaaaaaaaaa

SEQ ID NO: 2522 - DNA, 571 bp, Homo sapiens
  SITE (30): n equals a,t,g, or c
ggcctcctacttgtacggaaaacagctttnatcatgaagagcacccaggtgggaatcctaagaatgtcatgtgagtgtgagaagtgttacaggttaggagatggggttaggccatgaacagaaggaagatagccttaggtagctttctggaaggaaggcctgtgtagactacctctgaaaaagctttgaagggccaagaagagatggcacagggggataatgtctcaattgttacatcatgaccttttattaaggaaagctaactgcattatagtctgctagagtctgggaatccagagaaggaaaattttgcattgttggagggaggaagctaaaagcttaaaaaaaaaagaattgcttcccaacacctagaagtaatgtcaaactgagaattcaggcagcactgattactgttaatggttgtgatggtatctgctgtgtattaagtcacatggtcgcatacttgctatctcttccttgcaccttgtcccttctgtctctccttctgagttgacttttcttccccaaacaggtggaaaacatgctatatccaaagctcaaaaaaaaaaaa

SEQ ID NO: 2523 - DNA, 533 bp, Homo sapiens
acaccccaatattcagcccagctgctcagaggcaaagagctggcacagcagaaaccgagcctgcgcagggccactctgcatgggcaggtgtgacaagcttgtctctcccccagttcaccacaccttttcccccactggtttctctcctgtaagacattgccgagctgttggtagaatttcagacaatggaggaaggtgacgaagccaagggaagggaagtctcagtttgttgcctgtggaagcccagccgcctctgtttataagagctccccattctgcccccttctcactcaaacgtctgggtgtctctgatacaaagagcctggcatagtccctgataaacagcaagtgcctaattaaatgctgtcagtggttatgtggtattgggaagatatatgtgtctgtgtagctctgtgcatatgattctgtatatatgactgtgtatgcttatgtatgtctctctgttcacatacatatgctatatatttatatatttatatacataactgtgtgtgtctgagtgtctatctgtg

SEQ ID NO: 2524 - DNA, 384 bp, Homo sapiens
  SITE (307): n equals a,t,g, or c
  SITE (313): n equals a,t,g, or c
  SITE (375): n equals a,t,g, or c
ggttggaccaagtggaaatctgagtctacttttatgagagtaggtagatgggtgtttaaatgatattttctaaaatatctttcttcagacatctttttggtcagcaatttttaaaagagatgccgtgaactggaagtacttggcacatgggcaatcatttggaaaagaacaaaatagtactggaacatgggggtaaaataggtttcaattttttaacataaaatatccatcataatccacatagtaagccaaatctttccaaggagcttaacttaggaaaaatacctttttttaaagctaaaaaacntagtgnaaatatatttttgaattttaaagcctgtacagcatgccactccagtcattggaaggaccccnggaagtccc

SEQ ID NO: 2525 - DNA, 414 bp, Homo sapiens
ggttgcatataacagctcaggaagctgtgagatagagaagatcgtgggctcagaaatagacagtacgggaaaattcgcttttcctggccacagagagatccacgtgctggacaccgactacgagggctacgccatcctgcgggtgtccctgatgtggcggggcaggaactttcgcgtcctcaagtactttactcggagccttgaggacaaggaccggctggggttctggaagtttcgggagctgacagcagacactggtctctacctggcggcccggcctggtgagcccargggccttggggtggargctgggctgggccctgtgggctgactctkcagctyctmatgctggcctatcctgcagtgcggtgtgccgagctcctgaaggaggtgagcctgacccccgaccctggc

SEQ ID NO: 2526 - DNA, 399 bp, Homo sapiens
  SITE (393): n equals a,t,g, or c
ttctacctgtattgtctgacttctcaggaagatcgtgaacataactgagggcatgagtctcactagcacatggaggcccttttggatttagagactgtaaattattaaatcggcaacagggcttctctttttagatgtagcactgaaatccttgctggagggaagagaggggatgaactcaagttttccacatcctgggacacctgtccctcttttcctaactgcctaagataacccatttcttccaaccatctgaggacagtcccgtcgtctcagaggcctgcaccggggagagactgggctctgcagcagccacatcagcattcacagcttcatgtggcttcactgctgaaaatctaccgactccaacatggccccacggtgacaacaganctgtga

SEQ ID NO: 2527 - DNA, 415 bp, Homo sapiens
gcttgatggtgtatggccacactctgacaatatcctggaaggttctctggatttcttgctgtaattctttctagtttattgtctgtgtataattagacagtgctttctaagtagcaaaacttggttgtagatactgatgcagcttagcaaaaaatgttctatgatggcagttagtccaacttttatcttcttcagggccatcaggcctctgtaataattagaatccataaaaactggctatattctagactaatataaaagttttatgttcttcagtgatgtctcaagcacatcataaagcatcagtgatctttccaacaatgttcctttgtgccggtgatttgggtgatcggaaaagtttgccagtggaagaaccacttgctgccctgataaggaaccaatattactatatttc

SEQ ID NO: 2528 - DNA, 785 bp, Homo sapiens
  SITE (8): n equals a,t,g, or c
  SITE (32): n equals a,t,g, or c
  SITE (40): n equals a,t,g, or c
  SITE (110): n equals a,t,g, or c
  SITE (738): n equals a,t,g, or c
  SITE (751): n equals a,t,g, or c
  SITE (777): n equals a,t,g, or c
ttaagggnccgttgttcgagagagaactgcangtatcttnaacccttccgacacacttaaaaaactcaaactagaaatttaatggaagggaacaatttgattcagcaaanaaactgcagcagcaatgctttgccccagcagatgcaatttatgtttccaggaacaccacttcatccagtgcccacttttcccttgtaggtcccggcggatagggacaaaatacgggctatttagctttgctccttacctagcacctgtaacccctggagttgggttggtcccaacgggaaattctgcccaccacgcctgttattgttmccrgaagtccaccggtcactgtcccggctcaactgcaactcagaaacttctcaggactgacaaactggaggtatgcagggagttccagcgaggaaactgtgcccggggagagaccgactgccgctttgcacaccccgcagacagcaccatgatcgacacaagtgacaacaccgtaaccgtttgtatggattacataaaggggcgttgcatgagggagaaatgcaaatattttcaccctyctgcacacttgcaggccaaaatcaaagctgcgcagcaccaagccaaccaagctgcggtggccgccaggcagcccgcggccgcggccacagtcatggcctttccccctggtgctcttcatcctttaccaaagagacaagccttgaaaaaagcaatggtccagcgcggctttaccccagcgtnttgcactaccagnaggttttaccagcgcacaatttcagnacacgccg

SEQ ID NO: 2529 - DNA, 346 bp, Homo sapiens
  SITE (125): n equals a,t,g, or c
  SITE (236): n equals a,t,g, or c
tctgggcatgccagggttgagcagaagcctgtgtggggtcacggtcgcagttatgacaaggcagtgaamaccccacagctcacaaagcagaagtgcattacataggccagtgagggtcccgtganaggggtcaagaaagggattccgaggccaataagccctcctttctcttggcattttgggaatgccatctctgctgctccgtggtcccgcagagagctcggggctatgctgancaaggcctcccagggtgcctgctgtgccttcactgtttcagtcagggacttgccagctatggaatgccattaaggtcacctttcccgggcctccaagaaccttgccccac

SEQ ID NO: 2530 - DNA, 517 bp, Homo sapiens
gtaatgtgtgtctagccattaggtgagacagaggatatgggtgtgtgcccagagcaggacactgccctgagtccagtggggaggtcgggagggagccccctcagggccaagggtggcagaggagcagggaggtcgctgtcatatgggggactgaccaaagaagtcaatctattaagcatcacagaagccaggtttcttgtcagaaaacggagttgaaaatatgaggagggagaaaactagaattatcccttcaggtggagttggaatctgacccacccatctgaactggtggttttctaggtggctggtgtgttcatttcctacagctgctgtaacaaattgccacaaactgcggggctgaagacaaattgattctcccacagttccagagcccagatgtcagaactcaaggtgttgcarggccgtaatccccaaaagctctaggggagatttccttccctgcccctttcagcttctagtggctccacaacactgagtccctacatggtgacctcga

SEQ ID NO: 2531 - DNA, 489 bp, Homo sapiens
gtgaaatctgatgttttttgtagttttccagtacagtttttcccatcgctggaatcctggtttggttctgcgggaatcgagtgcttgagtgggacccagacagacaggaagggcgctcctgctcagttagccccagtaagctcactgaggcacacaggccccatgtccacagccgctcctggctgaggcgtggttcctaagacgacccttactgttgagggctgccaggagggagagacacattcagccccgcagtcctctgggaatccggtgagcgtcggcaccgggctggggccgtgctgattcccggcagcgtgtgggaatgtgcgggtgcctcgtggcctgctgacatcgcacacaggtcacagcctgtccagttcaggacatcagggccaagagtgaagtgagaatacggaggcacctctgtgtgctcamcctgctgaccgtcacccagctccggggggggtcacagctggcccccaggaagct

SEQ ID NO: 2532 - DNA, 612 bp, Homo sapiens
  SITE (606): n equals a,t,g, or c
agatttcatcttagcaaaatgtcatgaactgcctggagaaccatgagttttctgttggtggggagttacgtcttggagggggcgccacttccaggactaaggcagtgtcggctcagctcgagaatgcagtgggtgacggggtcagcagccctaaaactccctccaccccggctgtgggaagcacccactgggggctccatcccgatgggcttcctgagctaaaatgggtgctttgtccatgctggataaatatgtggcgatgttggtgggttgggcaagtcagttacacgactctgtatgttcttcagatgatttggggatatcactgttattttaataagttctagaatttcccccattgacattgctacaaggcaattaaattaaattaaagttccytcytaataaaatgttccagtaaamcactttcctagtccccttgttgatacgtttgtctgcagtgactggattagctggcgggagaatagaagaaaagtggattttgaagggagattgtgcttgagtcacgcttccagctcctagtcattgtgggaccccagtgggctccccagagctttcgggtcttgatcatcctgtaaaaatganggtcct

SEQ ID NO: 2533 - DNA, 444 bp, Homo sapiens
cggaacatggcgttctggggttggcgcgccgcggcagccctccggctgtggggccgggtagttgaacgggtcgaggccgggggaggcgtggggccgtttcaggcctgcggctgtcggctggtgcttggcggcagggacgatgtgagtgcggggctgagaggcagccatggggcccgcggtgagcccttggacccggcgcgccccttgcagaggcctcccagacccgaggtgcccagggcattccggagcagccgagggagcagctcccagtttcttcttttcgaggtattttgggcaaggacaagcacttcttgcgtgttcgttgtcgacacctmgcccactctttctcaccttgccgtgtttcctttgcggcatgtctgggagtttacgtgcgttccaacaccggggcctccgtctttatgctgatctgtggacgtcccttat

SEQ ID NO: 2534 - DNA, 560 bp, Homo sapiens
  SITE (547): n equals a,t,g, or c
tcgagttttttttttttttttttttttattgatcattcttgggtgtttctcgcagagggggatttggcagggtcataggacaatagtggagggagggtcagcagataaacaagtgaacaagggtctctggttttcctaggcagaggaccctgcggccttccgcagtgtttgtgtccctgggtacttgagattagggagtggtgatgactcttaaccagcatgctgctttcaagcatctgtttaacaaagcacatcttgcaccgcccttaatccatttaaccctgagtggacacagcacatgtttcagagagcacagggttgggggtaaggtcaccgatcaacaggatcccaaggcagaagaatttttcttagtacagaacaaaatgaaaagtctctcatgtctacttcyttctacacagacacgggcaaccatccgattctcaatcctttcccccttttctattccacaaaactgccattgtcawcawgggcccgttctcaatgagctgttgggtacacctcccagatgggggcggctgggccgggncgggggggcttga

SEQ ID NO: 2535 - DNA, 196 bp, Homo sapiens
  SITE (1): n equals a,t,g, or c
ntcactgacgagctgccgctgcttactggtgtggcggggtcaggagctggtcaccagcaaagaacccctggcgatgctccatccggccttgggcctgctgtatgctctgcctggggctcccgtcctctgggctggggtgaccgggggctcctgggcgtggggctgctgtcccaccacctgggagagcccaagctgg

SEQ ID NO: 2536 - DNA, 428 bp, Homo sapiens
  SITE (418): n equals a,t,g, or c
gggagaattgcttgaattcaggaggtggagcctgtagtgagccgaggttgtgccactgcactccagcctgggcgacagagcgagactccgtctcaaaaaaagagaacctgggatgcaattttcctgagccttgacatttgaactgaaaataactaacaagatccgaggagtgaggggcaggaaaaagagtgaggccctgagacaggttgacctgccttctaattctgactctgctctttatagctgtgtgcctctgggaagttgcttaacctctctgatttccagttttattttaaagktgaagargtgctaatctatctggtgargttgtgggaaaaattaatgraacacatgaaagtcccttaaacttgctagactactaaatgccagtctgctcyttctaacacctttccccaancccaattttt

SEQ ID NO: 2537 - DNA, 278 bp, Homo sapiens
  SITE (258): n equals a,t,g, or c
  SITE (265): n equals a,t,g, or c
ggcagaggaaaagataccagaaagactggagggatcacagtgttttcatcagaactaagtagagggtcggttcctgccctggttttggggtagctagaaaaggaaatcatgaatgcactggaaatgttggctcgagagaaaagactggtcatagctctgcctcgcatggagtgagagcgtattgatcgtagggacctgcagagttcctatgaccaggtgagtcggctctgaggaaggggttaggaaagcaagtacagntgcatgnaatagctgaagtt

SEQ ID NO: 2538 - DNA, 457 bp, Homo sapiens
ggcacgagaagagagagtggtaatatatcaaaatttaaaaaaattttaatgagttataaatcttaatatagccatcttagccataaccacaaataaactcattttttctgttaaaatacttgacagagtccttgcaattgaatgtctttgttcaacaaaaactgtattaagtgttttaaatttaaaatctaatcttatgcaaatagctggtggtcaaaacctttttccatcaaaagaagatctttggtttgacttcatattctgggatgtttgtaggtacctggaatggaaacacaaaagtagccataagrctcttaaaccaggcacaatgtcccccgaatcattccttgaggagcgcagatcatgaagragctgagsacgacaagytgtccagytyttggcatggtgtctgaggrgcccattacatgtcaccgrgtwttgracaaaggttgggcaa

SEQ ID NO: 2539 - DNA, 458 bp, Homo sapiens
  SITE (440): n equals a,t,g, or c
  SITE (441): n equals a,t,g, or c
  SITE (453): n equals a,t,g, or c
  SITE (454): n equals a,t,g, or c
aggagaaatcactgcctaacccaggcctcaaagatttactcttatgttttgttctaagagttttatagttttagctcttccatttagctctttggcccattttgagtttattcttttatatgttctgagactgagacttaatgagtttgacatcattttctttgcatgtctatttctatttgtcccacaccatgggatgaaaagagtattctttctccattagattgtcttggtacccttactggaaatcagttgaccataaaaaaatgatgatttgtttctggactctcaattttgtttcattgatttctttgtccatctttatgctgataacacactgtaggtaaacctactatttactgtaggatctgaaatcagaaagtatgagtcttcctaactttattcttctcattcaatattggtttggctatttttgkatnnttttttttttannatta

SEQ ID NO: 2540 - DNA, 536 bp, Homo sapiens
  SITE (35): n equals a,t,g, or c
aattagaaaagatttgggtgttgatttttctattnctagaccttttaaagcacagtggacacttattgccccttggcctgagtttagacatacatgaaagatgactgaatgtagctatcctgatttgtcatgagcgctgctcattatttttatatacatttgcacctgcacctgttcctttgacctctggaaattctttttgaaacatgaagagaagaaatttcagtcttttccttgagctctgtttgatttacacatgagttttcttcccgggatttgccatgccatgttatttcctgggtctccatgcaggatgtcaggtttttccagttttctgcamttcatcatctagggatggtatccaagaagcttattctcactttgttttttccttccttttgttgttgaactttcttgtataacactgggacaaagggttttacttaaaatgttaatatacagtgagggagggccatctctttactgttttctatgtgaagtttcaaacatttggaaaaaagttgtcaatcacaaac

SEQ ID NO: 2541 - DNA, 337 bp, Homo sapiens
  SITE (334): n equals a,t,g, or c
gcagaaatgacatacccttactgtattccttaaataaccacatggttcggcataactaaaagatgttgaaaactacgaaagcaaagaaagttaatagtttatacccttagattatcatattattattctgtaattgctttgtataaactgatttttttttaacttaaaaagtcttacatcttctaagagcaagcttagggctaagttacatttattaacagcccagttgrttgacttgactttttgccagttctagaacctcatttaattctargacagtggaaaactgggttatatctccycttggrtaacttttgtggrattatatttatanatt

SEQ ID NO: 2542 - DNA, 626 bp, Homo sapiens
  SITE (472): n equals a,t,g, or c
  SITE (573): n equals a,t,g, or c
ggacagatgaaagactgtctgggcggtgtaagcctgcatgtatttccctggaggcagtcttccagtcactgggtgttaggcatgcgtgggtgcacatgtgagtgtggcatgaagagccctttctcacacctggaagggctgaagggctggctacggagggcccctctgcacctcacatgctggcaatgctccaacagggctacttcgcttgatacaaggctagattattgagaggtgctgtgaatcccaaggcctcatgaatttttgaagttgtcacacgttagtgtgttgggataggctatctcaacaactgactataattctggacaggaaagcaagaatcaaaagcttcaagggcaatctctagctataccttactaacctcactccctgggctgacatgcccagaaaatatagacagacagcaaataaggcaaagctatcttgcttcgtacttggaaaataacaaagnttacggcagcttagggcacaggcctgtccttttgaaacactctggggcaaaagacatgggcatggaatatcagaggcctgggtcccaatgttagaggtctngctgttaaacctagggttgaacgggttactgaccacacaggcaggttggcaaa

SEQ ID NO: 2543 - DNA, 439 bp, Homo sapiens
aaacaactccatggaactcagaaggagagtccccaaacatggaatttgggcagtratttttccaacactgtccagggaggaacatargccagctttccaccatcatttggacaaatttttagtgataggacacatataatttatcaggctttattgtggtttcattttcttttggtttagattcaatactcaccagataacttctcagatgccacagtatgaggaatagggtaccctgtgtggtaagaggactattccccccattgtaaccaaataaactggcatttggcctatatggtaattttcttcataaactttataaaaaataaatatatattttgttgaggatacagggctagtgaaaaataaaaatatcaatataacattaaccttttagaaattagttagcataaattaacccttggaagcctaatcaatt

SEQ ID NO: 2544 - DNA, 605 bp, Homo sapiens
  SITE (567): n equals a,t,g, or c
  SITE (577): n equals a,t,g, or c
  SITE (600): n equals a,t,g, or c
  SITE (605): n equals a,t,g, or c
tcgagattctgactcagcaggtctgtggcagggtctgagattctgcatttctgaccagctctccgatgatgctgcactgctgatcctgggaccacacttgaacttcccaataatgattcggggaaactctattcaaaataatgagtctcccagtccttgacttctgagcgggtgaaagagacgatcactttggacagttgcactgaaagtcagagagccttcacagtcagatgtgcgggtgcaggctggttctcaccaccccgtttggctgtctcctttcccctttccttaccatcactctttaagctgcctgctttgatcataatctttctccaggctgccctttttttctgtttcgcttgtataaaagtgctgtggcagaagaaaagccctcagagtgattkgccctcagttacgccctggggatggtcctgcctgcagctcttggagtgagctgagaggtccacactgccccaggccctgacccctggctgccgtcctgragctgtgtttcctggcagagccctttgcaagacaaggctggccctctgtgcctggggcctcaantcagcctggnatctagttccaagggatggctcnaacgn

SEQ ID NO: 2545 - DNA, 1112 bp, Homo sapiens
  SITE (27): n equals a,t,g, or c
caattattaggttctacatatttattnaggtaaaccaatgttattaaaattaaaaacatgtgcctggcatataagtgcttcttcaggaattcttttttggatgcatagttattattttttaaacaaactcagattttcaaacactgattttcttctctgaacgggcattgcattgttttaaacagtagctcctggaataatgccacctttagtattttagactttcaaacaacaattggaattggataaatgctttcagctgggagcactttcctaatacctttgtaggtaatgggattctctatttgtgctgggtgacaaacggacagtgccctggacagactgcctaccctctgcagaatctaccaaaaagtagagttttcccatgagactgcttgtggtccatctaaaaatgaaaaaataatcagagaaaatgcgcaaagccttttctaactacagttatgaaatgatggcttaaagaggtatttagaaaataagagtggagtaatacagaaacaaaatctgaagaagaaagtttgcttagcagctgatgctctttgtctacaaacaagagggtaaggagctggatccaattgaattgaattgtttttgtttgcttgtttgttttcttccattcagtgcctttcaaactgttttttactggatgaagaaactcaaccaagaaaatatatgtcgattcttgtatatgggacaatattagctgctgtgatttttaatactagcataaaatataagaatctttttattactgtgatattgttttttcctaaatgaatgcatagtgtaacaattggtgtcaaaaagcattgaatttttttcagatggattaagctggaataataaagtatatctatgagatgatttctgtaaactctgacttgctgagaaaaaagtgaaaaagctttttctggaagaaacatggcaacttaaccgttattaatctggactaaataaaacaggaaactgcytctttacatttctagtaattttttctgcttttccaaacattgttaagttctatgcaacttgtgctattcaagtaaagatgatgtcagtaataaaattacagaatctaaaaaaaaaaaaaaaaa

SEQ ID NO: 2546 - DNA, 818 bp, Homo sapiens
gcaattcagagagctgaattttgggcattatcccagcaggaaaaccattgcgggcacctatactaataggtaaatggcttagctttccatggctttaattatctggctgtactcatggcttgttctatctccaagtgcctccctgcttttgatgttggtggtactgcaggatgccaattcttggctggtcccttctactttctgaataaggtcacacgttcactaagctctcttgggttttgacattaattgatttccaattgctttattcaaccaaaaattcatcatattctgattcataccactgaggttttcttgtttctctggatttgtttttatattctttatgtgattttagaaggaagaaaaaataagtgtgtgtgttctctagtctatgttgaatttgaagtcattatgcatttttatgtgccaaataaaacagcatggmaatatgtaaatataaaaaaagcaaaagaacctatgagacagtaataaaawaaatcaatagtagtggaaggttacaacaactatcaacacttaacagatcaactagtctaaaaggaaaagagaaaatgtatataatcgatattaatctaataactgtaattcaagttccattctctaagaaaagaatattttattttcaaatagccctgcctactccacgtcaagaagaggaaaagaaaatatctgctgttgtaaatagagccccatccttycttgscctyctttacacctcataaagcctgtgttccaactaaaaaaaaaaaaaaaaaaaaaaaaaaaaaaaaaaaaaaaaaaaaaaaaaaaaaaaactc

SEQ ID NO: 2547 - DNA, 440 bp, Homo sapiens
  SITE (46): n equals a,t,g, or c
  SITE (387): n equals a,t,g, or c
  SITE (439): n equals a,t,g, or c
accggtccccaattcccgggtcgacccacgcgtccgcaggcgtganccactgcacctgkccctcgactcacagattttcaaaatacttttgaacagtaagctgaggacagtgtttattatgactatactggtctcctttcactagctcacaaaatttaactacatcacttgtcagtctcctaaaaatgcagtgtatgtgctttgaaacttgtgaatgatctgctgatttgtgctattttatattcaatgttgttgaaagaatagtttttaaaccaagtaatgcaaaaatttagtgtaacatgaatgcttgtgctgtaaaacatactggaaaatcaatagctctggaataaactttggatttttaattaaaattgaaaaaaaaaaaanaaaaaaaaaaaaaaaaaaaaaaaaaataaaaaaaaaaaaaaaaaaaaaaaana

SEQ ID NO: 2548 - DNA, 630 bp, Homo sapiens
  SITE (580): n equals a,t,g, or c
  SITE (583): n equals a,t,g, or c
  SITE (607): n equals a,t,g, or c
ttttgcagaggtagaccttttattttatagaattaaaaggttatctttaaaaaaaaaaagggttcctgtgaagattaaatgagttaatatgtataaagaccttagaatagagctgaataagctggaagtaatattatcttgagagatccctgcttagggaacagcagaaacatttcactcagttcatttctgtccacagccagtcccaaaggctccagaatctccatcgytggactcggccctggcttccccactggaccctcaagccctggcctgcaccccagcttcccctccagattcacaacctcctgcttctccccaggattctgaagccctggactttgaaaccccttcctcctccctggcgccccaaactccggactctgccttggcctccgagacccttgcttctccccagtctctgcctccagcttcaccactgctagaggacagggaagagggggacctggggaaggcctcggaactagcagagaccccaaaggaggagaaagcagagggggcagcaatgctggagctggtgggatccattctccggggctgtgtccctggagtggggttnacngccaatggccttgccggcgcctgnggcaagtctgcatcggccttcag

SEQ ID NO: 2549 - DNA, 413 bp, Homo sapiens
ctcacacccagacatggatggagacggggtgagggtcctgtggtgtcagtgctgttgggcagcagggattgctcaggggccgcatctggatgcactgtcagcgctgtgtaaaccatgataacagaagctgcccatgaagtcaggtgcacacgtacctgctcactggcatagaaaagaacactaaggggaaagctttcctgcctcattggtaactgcatttgaagccgaacaagtgagtcattgggtttccgactccaaactcgtaaagactgggaacagaatggaaagtttagacactgacattggagatagatgattctttcattccatcatccattttaatgkatgacgtcaacataaatgkgkaacaagattcattaaactagkctcagaagctctaaaaaaaaaaaaaa

SEQ ID NO: 2550 - DNA, 490 bp, Homo sapiens
aaaacctttatatgaatctgtatagcagctttatttataatctcaaatgtctggaaacaaacattcttccattggtgaatgaataaacaaatcgtggaacatcttwcaatgaaatattactcagcaataaaaaaggaatggagtatcgataggcacaacaaggaagaatttaaaatgcattgtgctaagagaaataagccagcctccaaggggtacatacaaattataaaattacattcatagaccttctaaaaatggcaaaactgtaggtctggagaacatcattggttgctagggaatggtgttggggaaaagaattgaccacaaagatatagcatgaggaaatttttgggagtgatgtatctgttttgtttcttagttgtggtgtgattacataactgtatgcatttatcaaaactcatataactgtacaccaaaagagtagattttactgtttataaattgaaaataaagtttttaaaagaaaaaa

SEQ ID NO: 2551 - DNA, 518 bp, Homo sapiens
  SITE (118): n equals a,t,g, or c
tcctggctgcttcaaatcatcatgcaaaaagtattcacgggttcagaagattggtgaagacaatgagaaatcgacctgaggagcaaaacaaaggcatcagctcttacaccaaaagagnttaacgctgtaaccaaaggtatagttttgttttttattttaggagaactgactggtaaatgaagaaatggaccaaattttgtgtaaacgattagaaagatgaacaaagtattgccctttgactggttttcttcttcatcctgagaaagatacattctcttgcagctcttcattcattggtgacaagcccccaccccgggactttactaatgagcttgttaaagaggtgccaaagaacatattcctcctttctttattctttctccaccaaaaccctctacttcagaattttttcaggatatttttcagcccaaggtcagaagaatgtgttaatattttaaataaaatatctggacatctacagccactgtgtaaataaaaaaaaaaaaaaaaaaaaaaaa

SEQ ID NO: 2552 - DNA, 346 bp, Homo sapiens
  SITE (11): n equals a,t,g, or c
  SITE (35): n equals a,t,g, or c
  SITE (54): n equals a,t,g, or c
tcccattatgnaaaccattaagatatggcctaagnttccttaactatacagccntctttacaataaatttcttgatttttgtgcacaggatagtattgcaacctgctatttagcctttggtgccttagaattattataaatatttaacaatatgtacataatgtaaatactgccaagagatcagtaaggccaaatattttctctattcactttttattgctcttgctttctattgctactaaagcctcttttatccagctttgtaatagttccaacattgtagcgaatgtaaatgtttactttcaataaatctgaacttgttcaayaaawaaaaaaaaaaaaaaaa

SEQ ID NO: 2553 - DNA, 477 bp, Homo sapiens
agcggccgcccttttttttttttttttcacagcatattagaaatgtttattaagaataatggcatgaactgcttttaacaatttagaaaagacccattccccccgcccccccccgcccccagatccagggcacttcctctaagtaaayacaaatatttctgtagtgaactgtatgcatattcccactgagtaaaggttataagaagcctcaggtcaggtcttaccaccaaacttgaaaacacttggaatgcagctgggcagggacttgagcaggttttgtcttgataagcaggtaagaatggcagaacactggcttattgtcaaccaatgtttttttatatacctgaagtattcacagcaacttattttaagaagctttttaaaagttctacacctccacccccacaactccccaatccagaacatggaacaagggtgtggagctgtttgatggacttggtctgttcttaacattta

SEQ ID NO: 2554 - DNA, 1661 bp, Homo sapiens
gcggacgcgtgggcggacgcgtgggcggacgcgtgggtgagtccagtgagccgacagtccataagaaactcccagaagcacagccccacttcagagcccacccccccgggggatgccctaccaccagtcagctccccacatactcacaggggctaccagccaacaccagccatggccaagtacgtcaagatcctgtatgacttcacagcccgaaatgccaacgagctatcggtgctcaaggatgaggtcctagaggtgctggaggacggccggcagtggtggaagctgcgcagccgcagcggccaggcggggtacgtgccctgcaacatcctaggcgaggcgcgaccggaggacgccggcgccccgttcgagcaggccggtcagaagtactggggccccgccagcccgacccacaagctacccccaagcttcccggggaacaaagacgagctcatgcagcacatggacgaggtcaacgacgagctcatccggaaaatcagcaacatcagggcgcagccacagaggcacttccgcgtggagcgcagccagcccgtgagccagccgctcacctacgagtcgggtccggacgaggtccgcgcctggctggaagccaaggccttcagcccgcggatcgtggagaacctgggcatcctgaccgggccgcagctcttctccctcaacaaggaggagctgaagaaagtgtgcggcgaggagggcgtccgcgtgtacagccagctcaccatgcagaaggccttcctggagaagcagcaaagtgggtcggagctggaagaactcatgaacaagtttcattccatgaatcagaggaggggggaggacagctaggcccagctgccttgggctggggcctgcggaggggaagcccacccacaatgcatggagtattatttttatatgtgtatgtattttgtatcaaggacacggagggggtgtggtgctggctagaggtccctgcccctgtctggaggcacaacgcccatccttaggccaaacagtacccaaggcctcagcccacaccaagactaatctcagccaaacctgctgcttggtggtgccagccccttgtccaccttctcttgaggccacagaactccctggggctggggcctctttctctggcctcccctgtgcacctggggggtcctggcccctgtgatgctcccccatccccacccacttctacatccatccacaccccagggtgagctggagctccaggctggccaggctgaacctcgcacacacgcagagttctgctccctgaggggggcccgggaggggctccagcaggaggccgtgggtgccattcgggggaaagtgggggaacgacacacacttcacctgcaagggccgacagmaggggacaccgtgccggcttcagacactcccagcgcccactcttacaggcccaggactggagctttctctggccaagtttcaggccaatgatccccgcatggtgttgggggtgctggtgtgtcttggtgcctggacttgagtctcaccctacagatgagaggtggctgaggcaccagggctaagcaattaaaccagttaagtctcccaaaaaaaaaaaaaaaaaaaaaaaaaaaaaaaaaaaaaaaaaaaaaaaaaaaaaaaaaaaaaaaaaaaaaaaaaaaaaa

SEQ ID NO: 2555 - DNA, 572 bp, Homo sapiens
  SITE (467): n equals a,t,g, or c
  SITE (478): n equals a,t,g, or c
  SITE (535): n equals a,t,g, or c
  SITE (548): n equals a,t,g, or c
  SITE (567): n equals a,t,g, or c
attcggcactaggggccggccttcggctgccatggacgggcgccgcgtccctgcacagcccgccgcagaggtaaggctggcctctctgcagtcagaggtctgagctctgccatggggataggggtgtctttattactgcagttttctctaacacctgggggctaccggagtgtgggccgaagcaggcgctgcagccgcggaagtatccccaggaacatccccaagaggagctggaaaaagcctcatccccagctctgcagtctccaggggagctcagtgtctgtttgtccagcttctcagagttgctgtgcagctcggatgtggcataggaaacagcagacacaggagagggcagcataaggcactgtagggagcagtggccacattttctgcagaggaagaaccgatgctggaacgttcgtttgcaaggggccccctggccatggggcttgggcccagcccccganttccttttctnggggccttccccagggagtcaaccccagaacccttgggggaaaaggaaattcccgcngggcttgagggcnaaacaagggcaacgttcantgggc

SEQ ID NO: 2556 - DNA, 956 bp, Homo sapiens
  SITE (726): n equals a,t,g, or c
  SITE (910): n equals a,t,g, or c
  SITE (951): n equals a,t,g, or c
cggcggggtccgtggccagagctgcagagagacaaggcggcggcggctgctgtgctgggtgcagtgaggaagaggccctcggtggtgcccatggctggccaggatcctgcgctgagcacgagtcacccgttctacgacgtggccagacatggcattctgcaggtggcaggggatgaccgctttggaagacgtgttgtcacgttcagctgctgccggatgccrccytcccacgagctggaccamcagcggctgctggagtatttgaagtacacactggaccaatacgttgagaacgattataccatcgtctatttccactacgggctgaacagccggaacaagccttccctgggctggctccagagcgcatacaaggagttcgataggaagtacaagaagaacttgaaggccctctacgtggtgcaccccaccagcttcatcaaggtcctgtggaacatcttgaagcccctcatcagtcacaagtttgggaagaaagtcatctatttcaactacctgagtgagctccasgaacaccttaaatacgaccagctggtcatccctcccgaagttttgcggtacgatgagaagctccagagcctgcacgagggccggacgccgcctcccaccaagacacctccgccgcggcccccgctgcccacacagcagtttggcgtcagtctgcaatacctcaaagacaaaaatcaaggcgaactcatcccccctgtngctcgaggttcacagtgacgtacctgagagagaaaggcctcccagagcacaacttacgtcgtcctccgctacctcatggggcttcctgcatgcgggtgtcccggggagagcatcttcaacaaaatggaacagctctaacctggggcctgtgtctttcggggctgaatttgattctgggccattnccaagggggttcttccttcccttgaagttgccctttgttgnccctt

SEQ ID NO: 2557 - DNA, 326 bp, Homo sapiens
ccctgcccaaaaaggggcggcgcaagtctcagcccaccgtgccagacgccggaatggcagcagaaaatgtcctgaccccctcacctccactcagagcccacctgtcccgcccatctcttagaaactgcaggagcagccacggccgggccgccggggatctsgcggactaagggctgggtcagagccgcgcaaacatgggctcgctcgtagtcctggcgagcagcactcccaggcaagtcgccgasggcttgcagggcacccagaaaatgtcactgccggcgaagtgaccccgagccgggccacgggacccctcacacctcaccctt

SEQ ID NO: 2558 - DNA, 580 bp, Homo sapiens
  SITE (4): n equals a,t,g, or c
  SITE (413): n equals a,t,g, or c
gaantcccgggtcgacccacgacgtccgaattttgacaagtacctggtaaagataaagccaatactcaatatcagtctttcagatgtccctggtgatccgtggagttatcacacagttttcaaaaacaaatgttttgctctgcttgagacaaaaacttatgacatgcagaattcttacaatgaaaagcaggatggtatcatgaaatcaaacatgaagttgaaactagctgttattgtagtctgcaaattacataaacctgtttatggtgatttcttcctgttgctcttccctccatcaatcaaacacccaccaggagaaacaagcctcccaagctcttccctggagtggtagtgacttgggaaggggggcggggggatgtctaatttaacattttgaagcatttatatatatntatgaatatacatatatatagatgtgtgtgtctatataaatattcgaaggctaaaatatttgagaagaaaacttgtgagctaggaatgggaaggcttctcttccaatgaccaccaatgagaatgttataaaatatgtctaaaggtttaagaataaatcagcatccat

SEQ ID NO: 2559 - DNA, 538 bp, Homo sapiens
  SITE (4): n equals a,t,g, or c
tttnttttttttggtgggcaaatgtttaatctctctccacccaaacgggcacgtaggggttgcagttcccacaatgtacagcaggtggcgaaataactacaagggcttggacctactttgggccagaaaggaaccccagccagagacagaggggtggggtggggggtcaggtgggattctccaggccaatcagggaacagaggagtggctggatcccgctggagaagctgttggcattcttccagggtctccaccttcttccacagttcattgttctcagatgtaaatgtctccaccttcttttctagacactccacatactccttcttcttacgacggctctcctgggctgagatcttgttcttgattttctccggactctcttcaaggccttctcctcggctttggtgagggggagttttgtggggatggggtagccctcagcaatcagggtccgcttctcctcctctgtcaggagcagtggccctgatgtcccctgtaatttgtgaggggcagtgaggagtggggaggtggagat

SEQ ID NO: 2560 - DNA, 314 bp, Homo sapiens
  SITE (294): n equals a,t,g, or c
  SITE (303): n equals a,t,g, or c
  SITE (313): n equals a,t,g, or c
aggcgccggaaaggggaaacccgggtcccgcagcagcctcttggcggagggtgccctcttcatcccgcgtgggactggactcgcggagaggcgtggccagaacctctagtgccaatgagtcccgggagcttcaccctccacccctccctagcaaggtcggggggcaggcccgagctgcacaggccaaggattccacagagggtgtgacccaaagcccctaacaacagactcgctgggaccccctagacttggcatggaagctgggtgcagacctagaagacagaagtggtgaancccgggcantgaggacaana

SEQ ID NO: 2561 - DNA, 581 bp, Homo sapiens
  SITE (510): n equals a,t,g, or c
ggtcgacccacgcgtccgctgtggcagagttgaaggctggtgagtgcgagcagggaggcctccacatgggaagcgtcgggccttcatcttgtggaaaggatgggatgggaggagagcgcgcggaacacatgggttggcttttacaggcgtcattcttcggtgtgagggcctgcggggagcgtctggctgctgtcttggcccgtgcgcggggagctcttatggggaagaggttgcccactggcgagttttaagccagtttggagctaaaggaggagttgcgtaatcttcaggcatctaagaggcctacaggcctgcatcttgggcccctggctcatcttcttggaccctgccgggggctggaggacttggaccaggcttggcactcagggctgatgactacaatcccacaacccctattgggttaggcactgccctaaacaattgcttggttgtctcgttgggtccttacaacaacctgttaagtagccctcccctccttgcttttttttnttttttttaaagaaaggtcctctgtcgcccaggctggaatgcataacgcgatcacagcttcaatgcaactt

SEQ ID NO: 2562 - DNA, 960 bp, Homo sapiens
  SITE (582): n equals a,t,g, or c
  SITE (908): n equals a,t,g, or c
  SITE (945): n equals a,t,g, or c
cccacgcgtccgcgccactctgtgcctcttgcgctgaaggcccgcctttgagcctgcttctttgcctggggcccttggcccccccttgctttttcagccctagccccctgtctccccttctctctgctccttgtctccctctccctttttctgtctttgccgggtctctgggtctctgacccccatccggccctcatggctttgtgtctggagctcttgaagcaatgttcatcatgcctagtggcgtataagaagaccccgccaccggtccctccacgcaccacttcaaagccgttcatctcagtcacagtccagagcagtactgagtctgcccaggacacctacctggacagccaggaccacaagagcgaggtgactagccagtcgggcctgagcaactcgtcggacagcctggacagcagtacccgaccgcccagcgtgacacggggtggagtcgccccagcccctgaggccccagagccacccccaaaacatgcagctctgaaaagtgaacaagggacgctgaccagctctgagtcccaccccgaggccgcccccaaaaggaaactgtcatcgataggnaatacaagttgactgcattcagccagtgccaaaagaggagcccagtcccgctaccaaattccagtccatcggggttcaggtagaggacgactggcgarcagcgtcccctctcacagtatgtcctcccgacgggacacagactcggatacccaggatgccaatgactcaagctgtaagtcatctgagaggagcctcccggactgtacccctcaccccaaytccatcagcatcgatgccggtcccgcagcccccaagatgcccagatcaacgcactctctatgagcacacgaccgcctagaggtctgtgcccaccgaccctgtgaacnctcactccacaagcggaagcagggctgcgcgaacgtntgttctaagttgaga

SEQ ID NO: 2563 - DNA, 500 bp, Homo sapiens
ccctctctctctctctgagcagttccccccctcccacccctgcactattgtcttctctttgccacatgccctgctggggraagaaaatggaaggtaagcaaacaggctcctctccaaggagagctcatggcagacagcagagcasgcaagtttgcctctccaaagaggttctgggaaggctggataagttttgacaagagaggagcgtgtttgcaaaagaattgtgccctcagcagagcagtgctaaggagagtctagctcctggggcctaggtgggtggtggtgtctgtacacggtcttctcttattctacagagcttctgcacttgaaactacattgttcagcctgttttcctgacttaggttgctacagagtgttctgcaagccagcctacagccagcaaatgtttctgaaagtgttttctaggctttggaggaagttttttggagtagggatggggactggggggtggggggagagatcttggacaacatcctgca

SEQ ID NO: 2564 - DNA, 502 bp, Homo sapiens
tttttatcatggtggcagatggactgctgtcaccatctttgtatttacacgcttgattacttttgagtcctgttgatcgaaactgcttcaactctgaaacatggatttagaatgagtaccaggtattactgattaattacctgttcctcagaaacttctagagggggcgctgctggctcagactgccgaccgccytgatagtttacgttttgtcgctgacgtaaaggaggaaaaagacgattccaattgatcattcctccctgctgctgtctctgtcgctcccttgtgcaaactgagagracatcagctgccggtccagcagctccattctctgctgtctctggatgtccagcgtggctcccatcccaattctgcttcgctggtgggttctgaagaagagaagatgggttcaagtgtccaagaaaagaattttgccatccagctggggatgcagagcacctgttccaggtgcatcaggtgctctgcatccccagctggatgg

SEQ ID NO: 2565 - DNA, 604 bp, Homo sapiens
tttttttttgagagatcaagagcaggtgacgtgtttattgtgggacgcctctttctgggggtcgtgctggctgtgagggaaccctcacaatccccaggtcccagaacagacagatacaagaacttgaatccaaactgcttgcacataaatagaacggaggttggcaaaggaaaaaaaaacaacaacaaatgaacgtgcagcctcctatgctagtgtgacacggtggcagagtcttatccacaccccgtctcttttcttactgtctccatgctgagattttcagctgctctggaaagattcaccaccttccgatctgactcagcagcagacagctgccttcctggcggcccctgccacagtctccaggrgcttggcaaggggctaagggaatccaagacaggtattcctcaaacaaaacaaaaattgcttccacggtcctttgcacctcccagttctgctgggtgaacaatgtgtcccccaaccccaaactaaaccaaagaacatgctgagcacaagctgcgagtcagaataaaaacatattgcacatggttacaagagtcttcctgagggccctctcgctgcagatccctaaatactggctttt

SEQ ID NO: 2566 - DNA, 240 bp, Homo sapiens
  SITE (235): n equals a,t,g, or c
ctagttctagatcgcgrgcggccgctctagaggatccaagcttacgtacgcgtgcatgcgacgtcatagctcttctatagtgtcacctaaattcaattcactggccgtcgttttacaacgtcgtgactgggaaaaccctggcgttacccaacttaaatcgccttgcagcacatccccctttcgccagctggcgtaatagcgaagaggcccgcaccgatcgcccttcccaacagtngcgca

SEQ ID NO: 2567 - DNA, 246 bp, Homo sapiens
  SITE (240): n equals a,t,g, or c
ctagttctagatcgcgagcggccgctctagaggatccaagcttacgtacgcgtgcatgcgacgtcatagctcttctatagtgtcacctaaattcaattcactggccgtcgttttacaacgtcgtgactgggaaaaccctggcgttacccaacttaatcgccttgcagcacatccccctttcgccagctggcgtaatagcgaagaggcccgcaccgatcgcccttcccaacagttgcgcanctgaat

SEQ ID NO: 2568 - DNA, 310 bp, Homo sapiens
  SITE (184): n equals a,t,g, or c
  SITE (288): n equals a,t,g, or c
  SITE (293): n equals a,t,g, or c
ggaggacagaaacctcccgtggagcagaagggcaaaagctcgcttgatcttgattttcagtacgaatacagaccgtgraagcggggcctcacgatccttctgaccttttgggttttaagcaggaggtgtcagaaaagttaccacagggataactggcttgtggcggccaagcgttcatagcgangtcgctttttgatccttcgatgtcggctcttcctatcattgtgaagcagaattcaccaagcgttggattgttcacccactaaatagggaaacgtgagctggggntagancgtcgtgagacaggtta

SEQ ID NO: 2569 - DNA, 154 bp, Homo sapiens
  SITE (18): n equals a,t,g, or c
gactagttctagatcgcnagcggccgctctagaggatccaagcttacgtacgcgtgcatgcgacgtcatagctcttctatagtgtcacctaaattcaattcactggccgtcgttttacaacgtcgtgactgggaaaaccctggcgttacccaac

SEQ ID NO: 2570 - DNA, 149 bp, Homo sapiens
aaaaaaaaaaaaaaaaaaaaaaaaaaaaaaaaaaaaaaagggcggccgctctagaggatccaagcttacgtacgcgtgcatgcgacgtcatagctcttctatagtgtcacctaaattcaattcactggccgtcgttttacaacgtcgtg

SEQ ID NO: 2571 - DNA, 75 bp, Homo sapiens
ggtaggcgacacttgtgtgtgtacgtccgggtcgtgtgtgcgtgtgtacatgtgakcgtgtgtgcacgtgagtta

SEQ ID NO: 2572 - DNA, 409 bp, Homo sapiens
  SITE (381): n equals a,t,g, or c
  SITE (398): n equals a,t,g, or c
caaaccacttgttttttaaaaattgttggaacacagtcatatccattcatttatgtattgcctatggctgcttttgcagtacaaggaagttgggtagttgctacaaagactggtccacagagccaaaaaatactatctggcctctgtcaggaactttgctcaccagcaaacttgtgaaagtggcagcccaattgctaaaatgttctctaggctgatttgagagaatgttctagtagaggggaacaccctggcaagaacaatcatttggccacttgaaaagcaggtatgggttggtttgcaggaaaatgcagaggagggcaatagagttggttggctggcactaaattggcattggacccactagagggagataataaaaanaagtgaggttgttaacnaattaaaaacc

SEQ ID NO: 2573 - DNA, 432 bp, Homo sapiens
gctgaaatcggcactgtcacaaactctcctgtgtcaccttctgatactggttctcatttgttctagtagacaaactttcaactaaatgattcacccatcccaagactttctcaccagtggagaaacacacacatcaagcaaaccaagtcagagcaatgagaattgtctgtataatttaaactatctcctatttatcttttttcctcaatttcctaaaattctatttatctacagaacttgcgtgtataatcttgtgtacatccttaaatttaatgtaataacatgttaaagatgtttccaaatcagaaccatgttgaagatmcaagcgtaaattgktaggctgctattttctagaaaatgctgtaccttgactttttaaaataatctwatgaamcataattctgataaaatataattgttcaattaacaaag

SEQ ID NO: 2574 - DNA, 607 bp, Homo sapiens
  SITE (39): n equals a,t,g, or c
  SITE (49): n equals a,t,g, or c
tctgcaggtaccggtccggaattcccgggtcgacccacncgtccgattngttccgggcctcaacyttggcgtcgtgagattcttgtgaggcgtctgcctggaagccggcagcaattttgcttctttaaagagaaaaagaaggctagggactcagattcctggattctgagatccagaccagctcctcccagacctctccagaagaagccatgggaacccctcgtatccagcatttgctgatcctcctggtcctaggagcctccctcctgacctcgggcctagagctgtattgtcaaaagggtctgtccatgactgtggaagcagatccagccaatatgtttaactggaccacagaggaagtggagacttgtgacaaaggggcactttgccaggaaaccatactaataattaaagcagggactgagacagccattttggccacgaagggctgcatcccggataggaggaggccataacaattgtycagcactcttcacctcccggcctgatcgtgacctcctacagtaactactgtgaggattccttctgtaatgacaaagacagcctgtctcagttttgggagttcagtgagccacagcttccactg

SEQ ID NO: 2575 - DNA, 330 bp, Homo sapiens
  SITE (3): n equals a,t,g, or c
  SITE (152): n equals a,t,g, or c
  SITE (220): n equals a,t,g, or c
ccnatattaaaatttattgaagataaaaatggacacttccggccatatataaaagcattgttggtaagagagtggggtaattgacatgctcctgggaaataatacgcattcagacaacctctaatgagtgaatccactgggggtatcactanggaatagaaaacgaccaccaatgcccaagtttgtggtccagaatttgagcagcgatctaacaaattanagtctccccctgtgtcatgggcccacttcttaagcaaaaaagaatgcctcatttgggtactcaccccaattaacagaatttttttgatatcttatcgctttatttggtta

SEQ ID NO: 2576 - DNA, 579 bp, Homo sapiens
  SITE (35): n equals a,t,g, or c
  SITE (551): n equals a,t,g, or c
  SITE (571): n equals a,t,g, or c
cggctgaaggtttccgtgctgggaaaccgcgcctncgcggaggtagcccctccctgacctagccatggcacagaacactgaaaaccacgaccctgtcggatccatcttaatccagatccatgaagacctttatcagttaaaggagaaattaacaaaattctcacctgaggaaaaaggagagactctagacattcagagtcttgaaacagcaatcaaaaggactgaagtggggktaagaccactttcactatacctcgggaaccacctccatctccagcagaagtgaagttctttcccaagaaacaaagatcaaaggggaaaagcagaaggtcaagaggacatcatgataggaaggccatgaaagtcaaaacacctttgagagccctgaaatcactgtggggattatgactttttaatttatgatgggtgtcataggacaatacagccccagacttctttaggcatttcaagggaacattttagcttagcttggggggaggtattttttctctcttggggacacgtcgagagttttctccagggactttgcntttacccagaagttccaaantaaaaggg

SEQ ID NO: 2577 - DNA, 368 bp, Homo sapiens
  SITE (309): n equals a,t,g, or c
gaacgaaaaatggctatgatagagactactacttgtttcccaatagccagtcattacctctgtcttactaataaaatcacccatttttagctggaaatttggctgaccagaataaagacagtatttcccagcttcccttgtagctgggttgactatattactatgtttctgggatataaccagagcagcatgtgcaacttctaaaaatgtccttgaaggaggatgtaggcactattttctttctagtagctggaattcagctgtgatagtttaaggttttaagccatcttgcttaaaatggagaagcantaaaatgcaaggatccttgagcccctgcatcatcaaacacacctggaaggcctaaactg

SEQ ID NO: 2578 - DNA, 242 bp, Homo sapiens
ggtgacagatgatgaacgatgcatagatgcttccktacgtgaattttcaaattttttgaagaatctggaggaacagagagaaattatggcattaagtgtaactgaaaccctgattaaacccttggaaaaattcagaaaagagcaacttggagctgtaaaggaagaaaaaaaraaktttgacaaaaaaaaaaaaaaaaaaaaaaaaaaaaaaaaaaaaaaaaaaaaaaaaaaaaaaaaaaaaa

SEQ ID NO: 2579 - DNA, 378 bp, Homo sapiens
  SITE (335): n equals a,t,g, or c
  SITE (367): n equals a,t,g, or c
ggcaattctcctgcctcagcctcctgagtagctgggattgcaggcgcttgccaccatgcccgactaaattttctttgtatttttagtaragacggggtttcaccatgttggccaggctggtctcgaactcctgaccttgtgatccacccactgcggcctcccagagtgctgggattacaggcatgagccaccgcacctggccaaaatgcttttatcttatcatagattttaaacttgttaaaagtgttttcytttctttctttttctagctgtttctttarcgctaaacttgawtctcatcmaaacctkggarctaaaratttagctcactagantcaagggaaaggtaaaatactggcattaaccncaatgggcaaa

SEQ ID NO: 2580 - DNA, 344 bp, Homo sapiens
  SITE (1): n equals a,t,g, or c
  SITE (307): n equals a,t,g, or c
  SITE (332): n equals a,t,g, or c
nggcatcacaagawctgcctcacagatttaggcatgattatatattgaggacaaaattaaaactgacctaagtgaagtggcagattcatgtttgttaaattaaaaaaagaaaaaaaggccatgtgcagtagctcacacctgtaatcccagcactttaggaggctgaggcaggaggatcacttgagctcgkgagttcaagaccagcctggttaacatagcaagaccccgtctctacaaaacattagccaggcatgttgacgtgcacctgtggcccagctacttgggaggctgargtgggaaggactgnttgagccgggtagggagaaggttgnaagaaaatggga

SEQ ID NO: 2581 - DNA, 244 bp, Homo sapiens
  SITE (244): n equals a,t,g, or c
cgcgtccgggaacctaagaataggrrttaatagccaagcctcattagggacaggaatcaggaactagagagctgtctcaaacttatatctccctcttctccttttccttcccttcttctaccactgacctaatataggaatgtgtattattaacttagcaggatggaggggrcagtccacacattacacatatatgtttactgtagacctagtatggacattatgcaggtatttctatgtaatn

SEQ ID NO: 2582 - DNA, 577 bp, Homo sapiens
gcactcaaggggacaccattttctaatagccacagtgggagacaaatgtcataattcttgtcccaataagttgccttgtgaggtcattctaagttctacgtgccctaaaaccatgtacttactgaaaagcctgacaaactgttatgaaactgtgcaactgtcagaagaaaagttattccaccttagaatgtgctcttgtatttaagacccttttcaagaawtgagcatacaaaatgcacactgacaaattcaactgatcaaagactccacagtggagcatcaaagaaggcaggatgctttgttcagtcttgaacgtgttaacataaggtttattatgtgttacagaaaacctttctggaggttaagaaaatccatcagctatkctagatttgttaacaagaaacaaaattttcaaaaattatcgttaaaagggatgtgtctatagggaaagactgggtgttcaaattctgaagcaaatgccctgaggctcacagatttattatagcgaatcagacaggcgacagtacaggagaaaagtagtgcatgtgtagggagatggacaacatttgggacctct

SEQ ID NO: 2583 - DNA, 337 bp, Homo sapiens
  SITE (281): n equals a,t,g, or c
  SITE (296): n equals a,t,g, or c
  SITE (335): n equals a,t,g, or c
gttcatttgttayatttgatgaacaaatgctgatacattattattaactgaagttcatagtttacatcagaatcagtttgtgtatgttgtacagttttgtggatttgccaaatacacagtcatgtatccttcattacagtatcatgcataatatatcacttccctaaaaatccctgkaatctgtgaaaaatccctgaagtctgagtacttgatactagggaaataaaaagggaagagtcttaaaatcataggacccgagggaggcaagtcttgggcaaggnacccatttctaatgnagaggaagggtgagctaaaagggactgggtacttagaantc

SEQ ID NO: 2584 - DNA, 627 bp, Homo sapiens
  SITE (1): n equals a,t,g, or c
  SITE (7): n equals a,t,g, or c
  SITE (492): n equals a,t,g, or c
  SITE (494): n equals a,t,g, or c
  SITE (548): n equals a,t,g, or c
ngctcantcactatttggaaagctggcccgcctgcaggtaccggtccggaattcccgggtcgacccacgcgtycgtccacgcgtccgcaaaatgcaaaaggtggttttttgtacttttattgttgcatctaaaccatggaaatttgaactcaccatgctgaagaaacaatgcaaagatatgtagttatcttctagtgtgttctgccacactcatttccattttaaagaagaagcaaagacacttgcaagaactagaacaacacagttaacccattaacttcatttgtttggcctttttgcatttttgtgtgttcttcatgggctgatgttgaaaatccatgatgtgttttgacagcattgcatagcctattcttgctggatacttcccctactagctgggataatctgctgcaataaatggaagtggtttctacacctcacccaaaaaaaaaaaaaaaaaaaaaaaaaaaaaaaaaaaaaaagggcggccgntntagaggatccaagcttacgtacgcgtgcatgcgacgtcatagctcttctatagngtcacctaaattcaattcactggccgtcgttttacaacgtcgtgactgggaaaaccctggcgttacccaacttaatcgc

SEQ ID NO: 2585 - DNA, 269 bp, Homo sapiens
ttctgttctccatctattttggtgcaagtccgtatggttttagttagtgtagcttatactgatgctccttgacttatgatgggattacgtcctgataagcccattgtatgttgaaaatgttgcagccgggtgcagtggctcatgcctgtaatcccgacactttgggatgccggggtgggaggatcacttgagtccagggagttcgagatcagcctgggcaacatagggagacctcgctctcaaaaaaaaaaaaaaaaaaaaaaagggcc

SEQ ID NO: 2586 - DNA, 389 bp, Homo sapiens
  SITE (325): n equals a,t,g, or c
  SITE (365): n equals a,t,g, or c
  SITE (376): n equals a,t,g, or c
caattcccgggtcgacccacgcgtccgtccgtctctactaaaattacaaaaacaaaattagccaggcgtggtggcaggtgcatgtagtcccagctactcgggaggctgaggtgggagagtggcgtgaacccgggaggcggagcttgcagtgagccgagatcgtgccactgcacttcagcctgggcgacagagcgagactctgtctcaaaaaaaaaaaaagttggaaaatacgggagaggtgatagcaaaatataaactcaaacttgatcctaaaagaagttaaaaaaaaaaaaagaacaagccatagcagctggtaaccgtaganaggtttggaaggatgatgaaagatatttagaaggcaccanaagtcattggnttacagagatatt

SEQ ID NO: 2587 - DNA, 345 bp, Homo sapiens
  SITE (3): n equals a,t,g, or c
aanggcttcgcctgcaggtaccggtccggaattcccggttcgacccacgcgttcgtgttattcatgctataaagagtaaacgtttgatgaattagaagagatgctcttttccaagctataatggatgctttgtttaatgagccaaatatgatgaaacattttttccaattcaaattctagctattgctttcctataaatgtttgggttgtgtttggtattgtttttagtggttaatagttttccagttgcatttaattttttgaatatgataccttgtcacatgtaaattagatacttaaatattaaattatagtttctgataaagaaattttgttaamaaaaaa

SEQ ID NO: 2588 - DNA, 878 bp, Homo sapiens
  SITE (35): n equals a,t,g, or c
  SITE (363): n equals a,t,g, or c
tctctctaactgggaagctcccacgcctgcaggtnccgggtccggaattcccgggtcgacccacgcgtccgatttttcccattctgcagcatttagacataaatggttcttcagattcttccacactgcccaaattggaagaattctgtacctctcttacccagtcagagcagtcagcagacgggagccagtctgaacccaacaacagtcagactcagccaaagcaaattcagctttccacagcagcaccctgttcaacaactgcagtggatgattccgcagaaaagccctctggttctgtggaaagctcaccagagatcctaaagaatgaagatttttctagcagccgtgctattacattgnacaaagacaagcgtcaagaatctgtagaccagstgctttgattttgkcttatgagtgccagatttctcagaagctytacattyctcgaagtacagccactgctgccttaggtgctgccgcacggttagctacatccaggagcctcctacactggtaccccagtgtgaaaaggatggaagcatgagggagggagggaggagggagaaaaacagaatccagccgcttaggctttgatgaactcccaggccaaaatgaggagttattgaagcaaaatagtatcttgatcattgatacttttgtctttctgtgactatatgttagctttattatgctaacagtctactttgatgtgtaagtaagtattgatatttactgttaatcttgatttttyttkwttttattctgtgtcattttgttcacctttgtttttaatgtagtttaaaggaatttgtttttttgtgtttgtttttcttgtacattatcatgactgataaatgaaaawtgaaaaactaaaa

SEQ ID NO: 2589 - DNA, 359 bp, Homo sapiens
  SITE (236): n equals a,t,g, or c
  SITE (315): n equals a,t,g, or c
  SITE (355): n equals a,t,g, or c
actattgataaccttttctattggtcctagtgttttgctatttaagataatactgcatcaaatattcttagtgtagccatccatttacaagtgttattttcaagagcaaaatttatgcctttaaactgtgataattaaattaatactggtgagaactatcagatataccactgtgacagaacagatggcctagagacagtgatacctttaaaagttaaataattgctgagcgcggnggcttacgcctgtaatcccagcactttgggaggccgaggtgtgtggatcacgaggtcaggagttcaagaccaagcctgnccaagatggtgaaaccccgtctctactaaaaatacagggngggc

SEQ ID NO: 2590 - DNA, 492 bp, Homo sapiens
  SITE (490): n equals a,t,g, or c
  SITE (491): n equals a,t,g, or c
  SITE (492): n equals a,t,g, or c
gaaatgctacctccagggtcttggtgagagaaagtacagctttacctgataggtgatttcccttggaatccatcagaactcgacaaagcatgattttctgagcctagtaaaatggttctgaatcaaaaccgaagtcacgctgtgctgccgatccctgtttgactctcaaaaccaaaatctgtatcaggaaaggaataatcatttagcagactgagtccaaaatgctcatttttggtttcctgtgaaaatggatttctttttgtcgctttctttttttttttttttttttttgagatggagtctcgctctgttgcccaggctggagtgcagtggtgcaagttttgactcactgcagccaccgcctcccgggttcaagcgattctcctgcttcccaatcccgagctgctgggattacaggcatgcgccaccatgctcggctaattttttgtattttcagtagagacgggttttcaccatgttggccagtggnnn

SEQ ID NO: 2591 - DNA, 699 bp, Homo sapiens
  SITE (6): n equals a,t,g, or c
  SITE (14): n equals a,t,g, or c
gggtanatccctcnaccggtccggaattcccgggtcgacccacgcgtccgcaagtgctgaactctcacatcaggtcctttgctcctgttccctggaccctaatccaatatgactggcatctttatatgaagaggaagaggcaccagagggtacacacgcagagaaaaggccatgtgtggacacagtaagatgacggacatctgtaagccaaggagggaaacctcagaagaaaccagccttgcctgcaccttgatcttggaggtccagtctccagaactgtgaaaaaaatgaactggtgttgtttaaatcccccagtcgtggtattttgtcatggtggccctagaagacaatatacaacccaaaggaatattctttccactttctccctcttccactttatagttttttctccttcgtttctttctttttctcttttactttccttttcttctcttctctttcctctggtttttaattttaattttaatttttggccttcctatacctccatttgcctctccaggaagctgaattccagacaattaatcattcatctcatcagttcagcaaagcaaatgcccycaatggtttyttttgtgattcgattattatgggatcagaatgtatcttattcctctgggaaaaatgaaacataaaaatttcaaaaawaaaaaaaaaaaaaaaaaaaaaaaaaaaaaa

SEQ ID NO: 2592 - DNA, 79 bp, Homo sapiens
acccacgcgtccgatttatcagaataccagtgactataataaacttgccagtgtacttgatgaattccaaatgaaaaaa

SEQ ID NO: 2593 - DNA, 428 bp, Homo sapiens
cctgctgttcagaacactgcccgacgtccccagagctagccactcctccttcccacccacscgcmgcactctcgaggtcgcaacggcagtcaccaggtcccggggcctgcgttcagctgcttgatccgactaggtttggcttcggacccgaatgggtcagctccacgcccgatggagtttttcaagctggtgcctgcacgtgmccccgccgcggggcatgaagccgtgggctgcgcccaaactgcctcacaaccaccgctgacccgaagcctctctcactccgtccactgttagaaacctgaagctgccctctgtgagaaagcgttgggattgaatccagacttttggggaaccttaacaataaagaatacaaaatattgactaaaaattggatttgaaagtgaraaaaaaaaaaaaaaaaaaacatt

SEQ ID NO: 2594 - DNA, 429 bp, Homo sapiens
  SITE (339): n equals a,t,g, or c
  SITE (367): n equals a,t,g, or c
  SITE (388): n equals a,t,g, or c
  SITE (415): n equals a,t,g, or c
agagaacccaggtggacattctttccagccaaagactcaatacttctggaaagattaaggtcacatttgtttcaagagtgtccagtacaacaaagaccttccacagggagtagtaactattcctgatagggaacctccaaactgcaataggctttacccttttttatctttcctctttcttcgtgcctcaagtcagatcatagcaagaagaaaccttggaaaatcccctcttctcctccacacctcccagagatgcccaaaaagcagtttaatgctttttcgtagacttagaaaacagttctgttcttcctgggctcagagaagctcccattttggagncttatcttcaaacctgccaggacagcanggtgattcacatggtacttangtgattagacttataatcagagacgcnaagagtaatccagg

SEQ ID NO: 2595 - DNA, 503 bp, Homo sapiens
  SITE (410): n equals a,t,g, or c
  SITE (462): n equals a,t,g, or c
  SITE (476): n equals a,t,g, or c
  SITE (487): n equals a,t,g, or c
atcttcacactgcmaaaacaaaactcctactcagaattcagtgttaacatacggtcgggattggggttcagtgcctaaaatgcagcaggaggaagatcttgggagtcctgctttctgtcgcgccgggactctggcatcactggatggcaaaccggctccatgggcgaatagtcagcaaaatgccgcagctgcttmctggtgttcgmcctttcccccactccccgtttcctcctttccattccggtgataaaccatgagagaagcagcatctgcgagccagaagatagggttaaatatgatccgaatccctctttcctggctcctgggacagtctaggaataacgggcactgcgacccgctgtaaggttgcgaggtcactccaggcttgcccgagcctctgctcaggtttncaatgacgcgattggggataagcagcgccctcccctcccggcccccatggtncttcctggaaagtngggtttttctncttccccttttcggtt

SEQ ID NO: 2596 - DNA, 654 bp, Homo sapiens
tacccacgcgttccgcttgaactgaggtggtggcatttagcaggcattgctggttagaggagggtgtcgctaatggggccacacttgggccaaactaaaaatcttgaggacaagggatactgtctataagttgtggccacgctgacattagaagaaattagttccatattcccagaccctgaatactgcatggttaaatcaaggcaggtgggcaaaaaattacagaagtccttgcttggtggttccactgggctggggctgtaggcacttttgtaggaattgtagtcaggtccaggcaccatgcggttgggcagaaacagagcagcagcttgagaagtttccaacatctccctttctttatattctctctccagcataatgttctccaactctttatcagcaaaggctcttcttttcctcatcctgtcactaactgggggaggtagagggaaggtccctcctacataagtctccgctggaatgggctgatagcctacaagaagcaaagattgcacatgaaagagattaacatctacggaataaaaatgtggaaacccagaaggtaacagcaacactacagatcagcagaacaattatttacagttccatctcactgatatttttatacagatgcaaaagtacagattaggttct

SEQ ID NO: 2597 - DNA, 1339 bp, Homo sapiens
  SITE (34): n equals a,t,g, or c
  SITE (718): n equals a,t,g, or c
  SITE (835): n equals a,t,g, or c
  SITE (926): n equals a,t,g, or c
gccgcgcctgtcatttccatatcgcctgtgcccngttctctgctgcagtggcagagctcagtagctgccaccgagaccagctggcccaagaagccgaaaatactaactctctggcccttcccacttcaaagcatcattcataaaacttcagtgtgatgtaggagaagataatcacgtcacactcatggcaagaaaaaatactcagatccaagtagactagcagcaaccaaacatgctgatgtgtgggggctgttttctgtattttcttcagtggtctggcagttgtcccattttctagatgagaaaactgatcctcagaaaggtctccaggtgagtaatcagcgaggccagcattcaccattgactgcctcccttacagaaaaggataataacaacatttcagtttagtatgacctgatcctgtaggtggctttactgcaactgagagttgaactgaaggatctgcatttctttctttgacatctgaaaataaaggaaataaaactactgatattgaaagtaataaaaaatgaaaatgaaatgattkttactgtcagttttttttgttttgttttgttttgttttttcacagagtcttgctgtgtcacccaggctggagtgcagtggcatggtctctgctcaccgcaagctccacctcccgggattcacgccatctcctgcctcagcctcccgagtggctgagactacaagcgcccgncaccatgcctgggctaatgttgtttttgtatttttagtagacatggggtttcaccgtgttagcctggatgktctcgatctcccgacctcgtgatccgcccgcctcggcctcccaaantgctgggattacaggcgtgagccaccatgcctggcccggttgttgtagtataaagtgcatgtcagtggcatgaagtggatgtgtaattctncccctagcaccctcccagtgaggcaagccggcattgccattaagctgtttctgtggtttttctagcacgacttttatggtatggcaagtctcaaaaaaagaacttgtcgggaaaccatttctgaccattgctttctgcttaattaaccagtattagcaagaatgtaaaaggacagatcaggtgaactatcttaacaaataccaaaagtaaatgtctctatatggagggtaagatgtagacaaactcagacacaataaagaaatttaaagaggggagtgggcagggcacagtggctcatgcctgtaatcccagcactttgggasactgaggtgggtggattggataaggctgggagtttgagaccagcctaggcaagatagtgagacccccatctctgaaaaaaaaaaaaaaaa

SEQ ID NO: 2598 - DNA, 526 bp, Homo sapiens
  SITE (8): n equals a,t,g, or c
  SITE (15): n equals a,t,g, or c
  SITE (23): n equals a,t,g, or c
  SITE (55): n equals a,t,g, or c
  SITE (415): n equals a,t,g, or c
tcggacgnacgtacnggggaaanctggtacgcctgcaggtaccgggtccggaatnccgggtcgacccacgcgtccgcagcccaccgcccccacccaaagtgacatttgcttatgtgactctgactcacattatagttagaggaccgtgggttccaaaggtggttctcagccctgactggtcagtcaccagagtctcctctcagtgatcattcagtctatgcataaacacttccagtgacaggaagctctcagcctcccacagaggctcacgccaactttggaaatgctcctacacttaaatggttgttggatttgtttataaacctaccttcttgcaactttcacccacccatgctgtttctacttctgtggtgaatgatgcctctcacacatgtcagcatatcgggcttscygncattatctcttcacccatagatccttaaaaccaaaagccttttgacgttgctttagaaaggaagtaaatcctaaggagctttgatgttgaagcaccccttagtcaggaaag

SEQ ID NO: 2599 - DNA, 427 bp, Homo sapiens
tggtgcctacgcacataaaatttgagcagcactgccctagcatgattctagtgtgcagtcaatgttgaggaccactgtcttagaggattgcgtaaaagcaaatgacgtgtatataaatttagattgtaatattctctgagtataaactcattaggtgcaagctgagctcaccctccatgttttctgtgttcctggttaaagtaagttacctttgatgaaaaccacaggttcatctttgacttcaaatcagatttgttgctattgaagctaattggatcccagctcagctttgtggcttggattcacaccatataaaatcttcaacaagacattcattcctttgttcagaacacacaaccttctaacgtgaacctccaattttctaaattcatctttttctacttcacctgaaaccacagatccatgg

SEQ ID NO: 2600 - DNA, 463 bp, Homo sapiens
ggtttctccgaggcgcactgaggctccggggcgagtccgcgcagcgcgagctggggaaagccgtccggggctcccgatgaccctgcactccgccgggaggccgcccttcggaaaagccgtggaaacacacccggattgaaatgcccctggcccgcctgacccgaccctaggagaagcagccgagttacccgacatcgtggtcagcaggagctgggtcggtggctggatgctgcagcagcagggactcagcgcctgggagggctcctggggcagggagagaagcagagatgcaacatttttaaaatttcacaaagcatccggctgcacccaggtccctggaacaggagacaaacagaattaatgttttatacttcgggtataggtttgagttttttccccctcatgccaagtatttaaaacctytagaaacccaaaaaaaaaaaaaaaaaaaaaaaaaaaaaaa

SEQ ID NO: 2601 - DNA, 618 bp, Homo sapiens
  SITE (23): n equals a,t,g, or c
accagggcttcagtgccggatgncccactgtggtgggagttccccgctctctccagcagccccgtcccgtggagcctgaggacaagggagccctttcatccgagatgctgagtatgggcaacagggaggaggggaaggaagaggcagctccacgtgctgatcatcttccgggtctcaccgggcttgtaccagttggtgagcgtcatcatgacgtgcagtgaggccagcaccaggcagaagtggaagaaggagtagctgtaggtgacgccgtcctgctcgttgtcaaaggcccggccctcacaggctgccacctgctgctgctgctgtgtggcgtctacataggtgggcactcctcggtctgcatcaggctgttcacctgccggtggtctgaggagcgcagactgatgaagagggtgcacaggaggaagatgatgaggcccacaatgctcggggcatcccaccactgggtctcatagccctcgggcgctgccacaactgtctcgttgcccagctgggtagggctgctcctctacctgtggaccctggtagccccactcctcctgcgcaaccgcgacttcagctgaggcagcctcacagcctgccatctggtgcctcctg

SEQ ID NO: 2602 - DNA, 456 bp, Homo sapiens
tcgcaagccccaccgtgggagccaatggggcttcggcgcttctgcatagagaaatgggggaaaattactyctctcccccgggcacacacatgccttcaaccgactggatcttccmaccgtatcccctcgtactcccatgttgtatgaaaagctgttaacagcagtagaggaaaccagcacctttggacttgagtgaggacatggaacctcgcctgacattttcctggccagtgacatcacccttcctgggatgatccccttttccctttcccttaatcaactctcctttgattttggtattccatgatttttattttcaaaccaaatcaggattgacaaaagctgtgcatgaagaactgccttcttctaagatctaaccttcaggcttctctcctctgttttcaatgaactgctagcctgtatgsaatattaaaaaacagctgtctcaaaaaaaaa

SEQ ID NO: 2603 - DNA, 411 bp, Homo sapiens
  SITE (394): n equals a,t,g, or c
  SITE (404): n equals a,t,g, or c
ttttggtgagaatgtcatgaggtgtacaaaatagcagataggatattctataaatttaggtgcgctagagtgaaccaagtgtgggctggggagtcaggtttaatttctagttttttaccatctatgtagcatgttgggcaagtcagtggtctctgggcctcagtttttatatccgtaaatggtaaaaatgttagaagtctacttcacacattttggtgagaatgtcatgaggtgtacaaaatagcagataggrtattctataaatttaggtgctatttctcaaatcaccttcacatctgaggattttcttaacygttgtaaccgtggtgacttccctttcatcacygttcattttcacagccctcttcccggctcttccttaaaacccccgggnatttgtttcntaggggt

SEQ ID NO: 2604 - DNA, 334 bp, Homo sapiens
tgctggatggaaggactctgagcctaccaaaggaagcgtatttacaaacctctaggtactgacttgttgctgaaggtcagaaatttgcaatgacatttggatgtattcaagggtggaggggcaggtttggggaaagttcttttaaagaaaaaatgcaaaatttgattacaagaagctggggtgcctcccagggcctcggaaagggcttgcacaagtgaagcaccctgaagataatgcttcattagctttacagtgaagccacctctgaatctctgtttggtgtttgtcaaaatattccaagttgaagcaggcctgatttatatgattcgcacag

SEQ ID NO: 2605 - DNA, 298 bp, Homo sapiens
  SITE (80): n equals a,t,g, or c
  SITE (287): n equals a,t,g, or c
ccctctgaccacccccaacatcctggcaagtcactctcctgagtatttaggcttggagcctggagacctggctcccagtncagctggaaaagtgatcaacgcacagtgcggcttatggatccttcccacccactcaccacccacctgccagattatctgttggcaaatcccaggcctgatagcatttcctctgtcagtatttcagtgtatacctctaaacaataagggatttaagagaaaacataatcctggtaccattgttatacttgaaaagttgcctgtgcgcntgggcttcatg

SEQ ID NO: 2606 - DNA, 615 bp, Homo sapiens
  SITE (11): n equals a,t,g, or c
  SITE (19): n equals a,t,g, or c
  SITE (54): n equals a,t,g, or c
  SITE (118): n equals a,t,g, or c
  SITE (604): n equals a,t,g, or c
acaccccaaantaagccgngtcaagattttaaaatcctgggaaggttaaatctngaagaccttagggacccagccaacccaactctctcattttaaaagtgagggatccatagcaccngattacttgcctaagatcatccaggaacgaagacaggaatcccaaattccagtgttcttcctagtattaaacattgcccctttcgacaaattttggatttcattcttgttatatttcagtactcttgctgatttattttaggtttaactggtaaagaatgaacatttcagaagtgttaggattagtcagtgtcatcgcttatgtatatgaatcacttgccaaagacactggctctcctcagctgtaaccagcatgtcaaatgtgaagattattgtgtgggatcctttggtttcattgttatgatgtattttataaatgtactagttatatccttgtttatgtatttttgctgatctttcataaagcagaatggtatgtatcggattgttttaatgttatatattggattgtattcgwtgttacaaaaccaatattctatggagaatgaaaaaaataaaggactaaattaaaaaaaaaaaaaaaaanctggggggggg

SEQ ID NO: 2607 - DNA, 144 bp, Homo sapiens
  SITE (116): n equals a,t,g, or c
ctggctgatggacagcttcctggaaagtctctgacccacctccacccagctctggtctcacacttttcctcctctgcctgggtttctcctggcccaccagccctccaccamcgcanacacggtggctcagtgggcacaatcaga

SEQ ID NO: 2608 - DNA, 374 bp, Homo sapiens
  SITE (127): n equals a,t,g, or c
  SITE (369): n equals a,t,g, or c
aatttttttttttttttttttttttttttttaactggaaaaaacttctttcatcccagggactttatggctgggatcaaaggggtgactcacttgtttgcacaggaaacaaaaggcaaaaggaagtnttggcatcagttttccatctgcacatataacccccattcctccatgaattgcatgagataggtttcattttctcctgggggcctgtctggagccggctcctcatagagtctagatagaagaccctcctctccgagcccatccccctcagaaggctcgcagccctctgaatcctgggtcgaagctggacagcgaaggaatacacagcctgccagtttggggatcccagttcgaccaggggttnttcga

SEQ ID NO: 2609 - DNA, 299 bp, Homo sapiens
  SITE (260): n equals a,t,g, or c
gccctcaccagcccagccaggccatagtttacagagagctaaaccagcaacctcaacagaacatgttgtcaaatgatcctctctaaaaactgttgattaatgagctgrtgtcagccagatggaaggttatgaaagcatggtgtcaccargttgccctaggacctatttgtaatattcccttacagaaagcttacacctggaaatgtaagacatgtgggaaggcaatttattcagggtaaaggccttggaagactaaaganttaaagaattcatactgctgaaaactcctatttatccct

SEQ ID NO: 2610 - DNA, 154 bp, Homo sapiens
  SITE (149): n equals a,t,g, or c
aattcggcagagctggtattcaaacagcttcttcctgggtccggacttcatgtaatatgcatatgggtaggtgtattgcagggtgtatcgacaattggccaagagcttggcagcattctagcaggctcagctggaggctgaattcgganaacct

SEQ ID NO: 2611 - DNA, 319 bp, Homo sapiens
  SITE (113): n equals a,t,g, or c
  SITE (279): n equals a,t,g, or c
  SITE (291): n equals a,t,g, or c
agggaacagccatcacccctagggctaagggaagagaaaacagagaaggaacgtggaaactcagaggaggttccccaaggtggagagacctccgaggggtggctgtggttgcntgggaatatgctgcctgtcccatgctggagaatcaacttactggaggtgcccccccgccaagccacaggagcagagagctgtcacggtggggaatgctgctgggacccgtgcaggacgaaaggagacagaagaaaaaggccattttcctcctctagccttgttagnccctttcaaagncccattttgggttcaagttggcaagggt

SEQ ID NO: 2612 - DNA, 352 bp, Homo sapiens
  SITE (241): n equals a,t,g, or c
  SITE (317): n equals a,t,g, or c
  SITE (340): n equals a,t,g, or c
agcccagcctccggagtagctgggactacacatgcatcaccacaccccactaatttttaaattttttgtagagacagagtctcattatgttgcctaggctggtctcaaactcctggcctcaattaatcctcctccctttgggggattagaggcaggtgggatcccttgagcttagggaatttgagactaggctgggcaacatagtgaggacctcatctctaaaattgaaaaaaataaaagncaccagaaaaaaacctaaaaacatgccaagtggcatcagtctttggttgaaatgggcagcagaagggtgatggccngggtggggggtggggaatggttntttttcagcaga

SEQ ID NO: 2613 - DNA, 422 bp, Homo sapiens
  SITE (4): n equals a,t,g, or c
  SITE (408): n equals a,t,g, or c
tttncacaaggctgcggacacccaccgaacccctttatggttttagcaccttccttagccaggagcatcaagaagcactttatcgctaagaggttctgtagaacaggaaagacacaagtttaaacagcgatgcattggctagaaataacctctaaagaagcacacatttccctctgtcacgttatagatcgctaacgactcctcgggtgatgttttatgtcctttaagcctcatatcttacagcgttagaatgtgggatgccagcaatygataaattttagtgtcatggggttgggggaagaaatgcctatcaaatgctgaccaccagtttttcaaaaaaacttccattgggcaataaaaatggcaagataatttagataaaaaaaaaaaaaaaaaaaaaaaaaaccncggggggggccccc

SEQ ID NO: 2614 - DNA, 220 bp, Homo sapiens
  SITE (79): n equals a,t,g, or c
  SITE (207): n equals a,t,g, or c
agggaacacttggcctcatgtgatccttccaccttggcctcccaaagcattgggattacaggcgagagcactggttggntaaaatatttatatttacctgacatgatttgttgatttgggggctagggagttcttaaaacaacaataaaaaatcttctgtggctgcaaaaaaaaaaaaaaaaaaaaaaaaaaaaaaaaaaaaaaaanaaaaaataaaaaa

SEQ ID NO: 2615 - DNA, 321 bp, Homo sapiens
  SITE (269): n equals a,t,g, or c
  SITE (279): n equals a,t,g, or c
  SITE (283): n equals a,t,g, or c
aattcggcagaggcaaccttttaatttttttaaaccattttggtgctgtttcttagaccctttttgtatgtacatgaatttaaaaataaaattttgatcatactcacatttatttttttatttcccattatatgggataaatattttaagttatcacataacattcaaaatggaatagctgcgtaataatccctttgaataagcatgccatagttcacttgcctatcttccagtggaaggcttatttaacaattctccctatttttaancctctatctngggnggctccaggctgatcttggggctccgggccccaaggaa

SEQ ID NO: 2616 - DNA, 146 bp, Homo sapiens
  SITE (14): n equals a,t,g, or c
caaacctgggtggncagagtaagactctatctcaaaaaaaatgtatacatatatacatatatttacctcagtatatattttcctacacatgtctggtttttacaaaagaaacaaaaaacaaaaatcaaaatataaggcacacaaaa

SEQ ID NO: 2617 - DNA, 77 bp, Homo sapiens
aggatagacagacctctgcagtaagagagtggttgggaaacccagggtgttccttggatctcaggatctgagccatc

SEQ ID NO: 2618 - DNA, 201 bp, Homo sapiens
  SITE (120): n equals a,t,g, or c
  SITE (125): n equals a,t,g, or c
aattcggcagaggctttgtggggccgaggagaaggcaaagctgccttgcatttgcctggtgcctgctaagccccaagtccatccctcccctgaacaggacgctcgcagggccctgccctncagantgcacgtggagtcctctgaggttcgggggtgtgggttgcacttgagggaccatcttcctgggagatcccgtagagt

SEQ ID NO: 2619 - DNA, 833 bp, Homo sapiens
  SITE (745): n equals a,t,g, or c
  SITE (817): n equals a,t,g, or c
taaccctcactaaagggaacaaaagctggagctccaccgcggtggcggccgctctagaactagtggatcccccgggctgcaggaattcggcacgagctcagagacccccctgaccttagccgctcagctggacgactctgtggaggtcatcaaagctctcaaaaatggtggagctcacctggacttccgtgccaaagatgggatgaccgccctacacaaagctgcccgagcgaggaaccaagttgccctgaagacccttttagagcttggtgcatccccagattataaagacagttacggcctcaccccgctgtatcacacagccatcgtcggaggtgatccctactgctgcgagcttctcctgcacgaacacgccactgtgtgctgcaaagatgagaacggctggcacgagatccaccaggcctgcaggtacgggcacgtgcagcacctggagcacctgctgttctacggggcagacatgagtgcccagaatgcctcggggaacacggccttgcacatctgcgccctctacaaccaggtgagtgctgagcgcatttaaaggaaataatgtatacagtggtccatttccaaaacaaagtgccttaaattggcttacgtcaagccgggcgcggtggctcatgcctgtaatcccagcactttgggaggctgaagcggscggatcacgaggtcaggagatcgagaccatcctgctaacatggtgaaaccctgctctactaaaaatacnaaaaattagccgggcatggtggcagcacctgtagtcccaagttactygggaagctkagcaggagaatggcgngaaccaggaagcggaa

SEQ ID NO: 2620 - DNA, 327 bp, Homo sapiens
ttccagcccagcctctctccagccaacaggacggaggaagcccagggcccgaccttcctgtggctcctgactaggggcacagtcactgctggggacactggtggggaagggaaccagccacaaaagggatgtggcctcccaaggcagtatttatacgttcctggcctcaagcgggccakatgcttctcagaakcttakttctgacacagaatggggcsgggggttcctgacccatttttgcaactcttctttacgtttgaaattctgtcaaagcaaaatcagctcagaattaaaggttacgcggacactcaaaaaaaaaaaaaaaaa

SEQ ID NO: 2621 - DNA, 450 bp, Homo sapiens
  SITE (272): n equals a,t,g, or c
  SITE (373): n equals a,t,g, or c
  SITE (438): n equals a,t,g, or c
  SITE (444): n equals a,t,g, or c
gcgagggcgagccggcgcccaccgtggcctgggtgaccccccagcaccggccggtgacggycaccagcgcgggccgggcgcgcgtgctccccggggggacgctggagatccaggacgcgcggccgcaggacagcggcacctacacgtgcgtggccagcaacgcgggcggcaacgacacctacttcgccacgctgaccgtgcgccccgagccggccgcaaccggaccccgggcgaggcccacaacgagacgctggcggccctgcgcgcgccgntcgacctcaccaccatcctggtgtccaccgccatgggctgcatcaccttcctgggcttggtcctcttctgcttcgtgctgctgttcgtgtggagccgcggncgcgggcagcacaaaaacaacttctcgtggagtactccttccgcaaggtggatgggcccggacgncgcgtntggcca

SEQ ID NO: 2622 - DNA, 706 bp, Homo sapiens
  SITE (52): n equals a,t,g, or c
  SITE (225): n equals a,t,g, or c
gaggcacgtgggttgttttctccctggacttcctgtggccccagaggagccnaccgtgtgagtgctgggctccagatggcgccgggtcccaatcgtggctccacacagggttgtctgggaggacgggacggtgtctctggccagcactggcagcttccgggccttgtaccccactctgcctggcatgagcctcatggggggttggtccctgtgcctggaagcggngtggtgtccagggtctgcaggctggggctcgggctttgggagttgtttcactgtgcttgcttccagcatgtctcagggtggggctatgcgtggtctagaggggtctggggcattggatcaggtggcatgtgggtgtctacacatcgagaagcacacagggatgagccactaggtatcccatgctggaggcttgtggaaggctgtgcccatctcccatgtttccccacctctgttcctcctcagagccctccaggagcgtggggtgggggccagcgcagggctcaggagccagcagggcagagttctgcctgtgtgtgctgggttttgcatagcctgtgtttgcagtgagastgacttgctgtcagtcacgggcacagcctcctgttcacccactggcttcccccttcccactgaagtgtgagctctatgtttcagggcatctattaaagagtgaccacaggcaaaaaaaaaaaaaaaaaaa

SEQ ID NO: 2623 - DNA, 596 bp, Homo sapiens
gcaccatcccattttccaagggtctctggacccaatcctcttgcttctggctaggtgagaaccaggatgagcttggtgcctctcctggcttcttttcctgcaggtgctgtcctgcaccagtggacagaacggcggctggtgaaccacaagcagtacctggaggccaagaggctgttgaaggagttccaggcacgttaccggcagctggtgagtggctctctgcgcacagtgttcgggactaccccgctccccatggcctgcccagcgctgagtgagagccagcccaagttcggccacttcctcgagttcatggatgagttctgccaggagcccacagccagtgactcacaaggctagagctgtgcatgggggctgtgtgcaccacccggcctgtgccccagctctccccgagggctctgtgccctggaccgcacctcaaggttgaccagccggccacaggcctcagagctcagctgggccccacttgctkgccacaaggtggcatccccttgtcaggatctcccctccttggcccaggcatgacctggtgcctggcccagcggcaataaagagtgggtgcacagggcaataaaaaa

SEQ ID NO: 2624 - DNA, 509 bp, Homo sapiens
  SITE (1): n equals a,t,g, or c
  SITE (2): n equals a,t,g, or c
nnttttttctcgtcccagggtttttaagtggaaccgccccctgcccatgctgsgcccagcacaccagccaatcggcgctcgggggcggacccgacgcgggcgcctcagaagcctcagcttcaaaaccccgcycccggaaaggcccgcccagcaagcgagaggaggaggccacacatgtttattaggccggtcctgacacctgcctgcggggaaggaccaccgagaccagatcctgggtgccatggggtgcagggacagaccggtgcatggcagcggctgcgcctagccgcgctcgcagatgacctcaaccacactgggctccatgggcacagggtctgggcagcgcagggcagcagaggccaccacttcgtccagcagcaagtgcacgagttcttcgtcggccacaaaacgccacaggtagagctgcagaaagtggcagtccaatttgaacttcttgagccccaaacccccaaaagttccacacggaacaaaattcaagaaggttttta

SEQ ID NO: 2625 - DNA, 452 bp, Homo sapiens
agctgcaaagcgtcttccattctctgggcagtggtggccccgagctgtggcctctcagggggtttctgtggacacgggcagcagagtgtgtccaggccagcccccaagaatgccctgctcctgacagcttggccaacccctggtcagggcagagggagttgggtgggtcaggctctgggctcacctccatctccagagcatcccctgcctgcagttgtggcaagaacgcccagctcagaatgaacacaccccaccaagagcctccttgttcataaccacaggttaccctacaaaccactgtccccacacaaccctggggatgttttaaaacacacacctctaacgcatatcttacagtcactgttgtcttgcctgagggttgaattttttttaatgaaagtgcaatgaaaatcactggattaaatctacggacacagagctgaaaaaaaaaa

SEQ ID NO: 2626 - DNA, 488 bp, Homo sapiens
  SITE (475): n equals a,t,g, or c
ctacgcccgtgttccacaagccataattatagctttggtgggacaagagactgatctcagtaactttctcctgataagaccatcggccatggactggttctagccagcttacagaggctgcgcacttgagtgcttttgtctttttgacgtatggggcctaactgcgatatatttaaatattaagtctccaccccaaggtgaacatggatggtatataacatgcatgtttgttcgatatgcatatgtcaggaccccttccgtaaatattcgtagctcctccagtaacctgttgaccaatccattcaactaaaattcctatctcactcctccctccctcaaagtgcctgttaaggctttggctggaggctctgcttcctagccagtgggatggccagcctgcaggttgtaaccctttataaaagagaaataaagtctccttttcaaatttaaaaaaaaaaaaaaaaaaaaaaaaaanaaaaaaaaaaaaa

SEQ ID NO: 2627 - DNA, 692 bp, Homo sapiens
gatcaaatcttccattggctggtggcatgcacttaggtgggaaagaaggtggacggagataaacaaccacttctcaagagaacagccatgcagaacggaatcacaccaggctcttggactatgttgtgttttttgtttgtttgtttgtttgtttttgtttttttttttttgagacggagtcttgctctgtcgcccaggctggagtgcagtggtgcgatctcagctcactgcaagctccgcctcccgggttcacgccattctcctgcctcagcctcccgagcagctgggacttataggtgcccaccacctttttttttttttttttttttttgtatttttagtagagacatgatttcaccgtgttagccaggatggtctcaatctcctgaccttgtgatccgccctcctcagcactttgggaggccaaggccgggggatcacctgaggtcaggagttcgagaccagcctggccaacacggtgaaaccccgtctctactaaaaatacaaaaattggccaggcgtggtggcaggcgcctgtagtcccagctacttgggagactgagtcaggagaatcgcttgaacccgggaggcggaggttgcagtgagccaagatcacgccatcacgctccagcctggggacaacagcaagactttgtctaaaaaaaaaaaaaaaaaaaaaaaaaaaaactcga

SEQ ID NO: 2628 - DNA, 642 bp, Homo sapiens
  SITE (357): n equals a,t,g, or c
ttttttttttttttttttgaatgttctcaccaaatgtaaaacaggcccagtcaatgccatttattatacatgtcaaacagcttctaagaccgacgggctcccataataaggttttggggattttttgttttgtttttcattttcttttttgcatcaaacaggttcttccaaaagcctgctcacaaggtagacaaaaacataawtcttcaggaaaatgaaacawgagaagctgaaacaatctacacctgaatgttaaaaaactcatcagacacaaaccacaccaaacactcatcccatttaatttcctgttacatgctctgaggaagccaagaacatcaggccccagggcagcaatgntctaggattccagctcggaccccctctatatgacagattcatgcacacacatccacacaccatagaaccaggcagaaatacacatgcatgcacaggtggctagagaaccatagggcaggatgaacatgagttaaaattaaaacaaaggcagaacacaggataaaggtgggatgttcagacaagaggtgggatagatgaagagataaagatgcagggggagttttgggaaagcagcctcagaaggggaggtttttctttattgggaactcaggtgggcagggtccc

SEQ ID NO: 2629 - DNA, 475 bp, Homo sapiens
aaaatctttsaatctgcaccaagtctcagaacagctctggccccggagtgctccgtccaggccgctgtgaaccggctgtccccgcgtctcctccacctcccctgacacaatcctggccccgactcagtccacccagggtgcagtgcagargctgatacccgccaggacttccttgccaaggsccggccacgtcacaaggccactgcacgcttttcgacatgcacctggaaatcgggaagggccatgctgcagttgcttctagttgagacgagaagagcgacaaggttgtgatccacgtggcaggtgttcagaaggctgggggcgggcagcgctggggagagccctgggtacttcgaggagaccccgaagagggctgctcccacacctgcgccagtttccaccctctctgtgagcagggctgcggtcacctcccacatctgaagagaaccaacctgaggatttcacgctggctgcg

SEQ ID NO: 2630 - DNA, 472 bp, Homo sapiens
  SITE (281): n equals a,t,g, or c
  SITE (316): n equals a,t,g, or c
ttttccttgaagctgtttggtgtktgacccagcaagggccctttgtaggacagcaggagggaggcgtcgggggccttagcagaaggggaacaatgagggcatttcatgaaccatctcaggcacttctgcatcacggaagacctggccctcccagccgtccctggggatgctcagggtgcaggcagaggctcgggaggccggactcaggggtcagaagcagggactggggcaggcgagcccggacagggaagaggggctccgatcaaagccggccgtgctgnctgccgggggcccaggtgggtacaagctysctttngctttgcacaaacctgaatcccccaccagagaggatgtgtgtgaggagccagaaacgctgaatccaattaagagagaaaaataataataacaataaatgatcttggacaagaaaaaaaaaaaaaaaaaaaaaattcctggcggtccaagggaattc

SEQ ID NO: 2631 - DNA, 355 bp, Homo sapiens
  SITE (37): n equals a,t,g, or c
actgactatcagtggccgtctggcccaggcgatgggnggcgaactgagcgccaccagcacgccggaggttgggaagctgtttttgtttacgcttgccgttacgtgttgccacgcacccgtgccaaaaacagtcaatcaggcggtgcgtcttgacggtttacgtttgctgttaattgaagataacccgctaacccagcgaattaccattgaratgctgaaaaccagtggtgcgcagattgttgctgttggcaatgccgcgcaggctttagagacactgcaaaatagcgaaccgtttkctgccgcactggtggattttgatctgccggatatcgacggcattamgsttgcccsacaa

SEQ ID NO: 2632 - DNA, 488 bp, Homo sapiens
  SITE (427): n equals a,t,g, or c
  SITE (431): n equals a,t,g, or c
  SITE (480): n equals a,t,g, or c
aattcggcacgaggccacgggatctcccgccctctccggcccctctgcagcccttggctcattgaccatgcggtgttgcttgtgggctacggcaaccgctctgacgttcccttttgggccatcaagaacagctggggcactgactggggtgagaagctccccctctyccccagggttactactacttgcatcgtgggtccggggcctgtggcgtgaacaccatggccagctcggcggtggtggactgaagaggggcccccagctcgggacctggtgctgatcagagtggctgctgcccagcctgacatgtgtccaggcccctccccgggaggtacagctggcagagggaaaggcaytgggtamctcaggtgagcagagggcaytgggytggggcacagccttgtttcttgacccattccacctgaantctnactgacttgtgaatgggactagaagattcggtaaggggatctgagtgantggagctt

SEQ ID NO: 2633 - DNA, 57 bp, Homo sapiens
acccgtagttacctcatacgtaaggcccggcaagccaaggcgcgccgcatcgccccg

SEQ ID NO: 2634 - DNA, 206 bp, Homo sapiens
  SITE (13): n equals a,t,g, or c
  SITE (201): n equals a,t,g, or c
aattcggcacagnaacaagactgcggccaacttggtagtggaaactgggcaggatggagtacagataaggagcctttctaaggagaccacccgttataatcatcccaagcccaacttgctgtatcagaagtttgtgcaaggtattagaggctgtgggtaacagaaaaaaaaaaaaaaaaaaaaaaaaaaaaaaaaaaaaanaaaaa

SEQ ID NO: 2635 - DNA, 259 bp, Homo sapiens
  SITE (236): n equals a,t,g, or c
  SITE (248): n equals a,t,g, or c
aattcggcagagcttcagtggtggccaggcatggtggctcacactgtaatcccagcactttgggacggctgtggcgggcggatcacctgaggtcaggagatcgagaccatcctggctaaccccgtgaaaccccgtctctattaaaatacaaaaaaaaattagccgggcgtggtgggcatacgcctgtagtcccagcttacttcaggaggctgaggcaggagaattgcttgaaactngcgggggtggtngaggttgcagt

SEQ ID NO: 2636 - DNA, 151 bp, Homo sapiens
  SITE (91): n equals a,t,g, or c
agcagcaacactgtcagaaggtgccctgagacggccggcttgccttcccttgcactggttggggtggaactgtcagaggccagcccggggnttagtaggcgcaaggtagaggagggatccagtggggccgtgggctgggttagggtgcctt

SEQ ID NO: 2637 - DNA, 108 bp, Homo sapiens
  SITE (7): n equals a,t,g, or c
ctgatgnagatactgtgcaaatgtagaatggtagaaatgacaacaaaggatttagaatgtgacataaattagttgataaagcagcagcagggtttgagaggactgagt

SEQ ID NO: 2638 - DNA, 343 bp, Homo sapiens
  SITE (85): n equals a,t,g, or c
  SITE (274): n equals a,t,g, or c
  SITE (326): n equals a,t,g, or c
ctccaggccccccgctgtgcttctcccgcttctccgtctcgcctgcgctggagaccccggggccacccgcccgggcccccgacgnccggcccgcagccccgtggagaattgattccccgaagacccgaccccgctgcamcctcagaagaggggttgagaatggaatcctctgtggatgacggcgscactgccaccaccgcagacgccgcctctggggaggcccccgaggctgggccctccccctcccactcccctaccatgtgccaaacgggangccccgggccccgccccccagccccccagatggctcccctaacccccctgancccctttggagccaaat

SEQ ID NO: 2639 - DNA, 404 bp, Homo sapiens
gcggccgcccccgcgccccgggcgccgggccttagtgctggcgcgggcccgggagagcgccgagctgccgctgcccgccggctgggaggaggcgcgagactacgacggtcgcgwcttttacattgaccacaacacgcgccagacgtcgwggatcgacccccgcgaccggataacaaagccattgacctttgccgattgtgttggggacgaacttcctttaggatgggaaaccgtatatgataaacaaattggagtttattacatggaccacataaataaacttacccagattgaggatccaagaggaacagtggaggcgagacaagagcgcatgttgaaggaatatttaattgtagctcaggaggctctcaatgccaagaaagaaatctaccagattaagcagc

SEQ ID NO: 2640 - DNA, 487 bp, Homo sapiens
taccgggccggaattcccgggtcgacccacgcgtccggaaattttcctaggtcagtttatatataacaaaacaggaaccaccgttcaaacatttgaactccagcatgcagtttctgaatatttattatgtgtgaaacttaatatctttagcaactggggacacccgaagtatacttgtttatatcgattcagggtccatggcacaccaggcaagcacatctagaagagttggtacagaaggccatgccacatgtccagaatattcaagaatgcttattctcttagatgataccgcacccataggaattgagaattgggagtgggaagaaaacctcaaagtggttcatacttgcctgtaaaaagtaaatgcattttactaataaaaaaatatggaagtaaattaaatatccttgccatagtttagtctttaaggatgcttcatgttgttagagcattgaaaactcattttgtatttagaagaagatag

SEQ ID NO: 2641 - DNA, 734 bp, Homo sapiens
  SITE (433): n equals a,t,g, or c
  SITE (648): n equals a,t,g, or c
  SITE (676): n equals a,t,g, or c
  SITE (730): n equals a,t,g, or c
atgacagcttcatgtgtgttactgcccctgaagaagaccttccagtgggacaaaatgtggaggtggaagacaatgatcattgatgatcctgaccctgtgtaggccgaggctaatgtgtgtttgggtcttagctttcaacaaaaaaagtttaaaaagtaaataaaaaattttttaaatagaaaaaggcctatagaatagggatataaagaagaaaatatttttgtacagctgtacaattttttgtgttttaagctgtgttattacaaaagagccaaaaagttataaaattgaaaatacagttaaagtaagctgtttattattgaagaaagaaaaacattttaaaataaatttaatgttgcctgagtatccagtgttgataaagtctacagtagtgtacagtaacatcctagggccttcacatttcactcaccgntcactcactgactcagccagagcaactttcagtactgaaagccccattcgtggtaagtgccctatacatgtgtaccatttttaatcttttttatacagtatttttactgtatcttttctctttttagatgtttaaatacacaaataccgatgtgttacagttgcctacagtattgagtacagtaacaatgatgtacaggttttgtagcctatgancatagactataccatctatgtttgtgtnagtatactctgtgatgttcacacagtgaaatcacctaaccatgcatttcttcanaata

SEQ ID NO: 2642 - DNA, 508 bp, Homo sapiens
gcaaaaaagtaccaggatctcaaatatcagtgctggtattttttttttttttacttaaagaaattgatatgattaaatattaagagacaatatgatccttgttggcttgtaaccctagtttttattgycttktagttattaaatagagcatctgttgagggactcttttaaaaccacagccatgaacagacgttggggctaagagacagagcagcctgcgacagtgtggacctacctgtagcagctagcaaaggcctctagcagctacagtcccttctggagtctttatttgcatgcaaaatgcaaaggagtcctggtgacctacctccaaggcagctgccctcctgaacactcccttggaaaacagtaaacatcattttggaatgtgaacaaccagagactacacaggagaaaggaaaaaaaaattctgaagatgcaaaatcttgggtggcttcaccgttcagttttttaataaaaggaacaatatacaaaaaaaaaaaaaaaaaaa

SEQ ID NO: 2643 - DNA, 389 bp, Homo sapiens
  SITE (319): n equals a,t,g, or c
  SITE (376): n equals a,t,g, or c
ttaattttcatgttagacatttggattatgatactcaaggccgcagttgtctaaatgtaaatagtaccgagggaagagtagcacattccgacattctctcagtgagacttattcatcagatgggggctstkagtgggtgagatttcacacagatggatgggagtctgctggaaggaaaaattcagagcattgaaggttctgcctgtgtgagtgtttgttgggtgaatgaggggactgagtaggaaggagggcaggcaatgaggctttaaagggaagaaggtagggaaatttgaactcatctttcctagtgcttactctncagcccattccctgggtttgtgggaccttgaccccacactctttttcccagcaccantgtcttgtgtgag

SEQ ID NO: 2644 - DNA, 404 bp, Homo sapiens
agatggagactgtggcacaktagactgtagtgtgaggctcgcgggggcagtggccatggaggccgtgctgaacgagctggtgtctgtggaggacctgctgagctgctgcccaaagggagcaaggaggaacagcgggattacgtcttctacctggccgtggggaactaccggctcaaggaatacgagaaggccttaaagtacgtccgcgggttgctgcagacagagccccagaacaaccaggccaaggaactggagcggctcattgacaaggccatgaagaaagatggactcgtgggcatggcatcgtgggaggcatggcctgggtgtggcgggactggccggactcatcggacttgctgtgtccaagtccaaatcctgaaggagacgcgggacccacggagaac

SEQ ID NO: 2645 - DNA, 350 bp, Homo sapiens
  SITE (269): n equals a,t,g, or c
  SITE (288): n equals a,t,g, or c
  SITE (322): n equals a,t,g, or c
agggatagggtccccttgcccgcgtgaaagtctcattcctcctcagctcagaaacactccaaggtctcggcgccctatactggccttccctcatccgaatacccctcgtggctcctgaatgtacttttccattcccactccctactctggcagtctagcttctgaagctgaggagtttggccttcgctccaggtgcggggactcgtgggaaggatttggattcgcgcttgagaaagatcgctccggttcctgtaaggaaggagagcgtnttaggggctgcaaaccagnggacacagttcagaaagcttccgagggttaccgngatggttccagtggccacaggacaaagc

SEQ ID NO: 2646 - DNA, 178 bp, Homo sapiens
gagaggtgctgcggcgctgcgtagaagtatcaatcagccggttgcttttgtragaagaattccttggactgcggygtcgaggatcatagtccacatagcacagtaactggtatgaaaacactcgatatttsctgaggatggagactgcagccaacttcaacaacttctctgtccatct

SEQ ID NO: 2647 - DNA, 534 bp, Homo sapiens
  SITE (41): n equals a,t,g, or c
  SITE (341): n equals a,t,g, or c
ttgaagcaatttggtttaaatatgaatgtatttcacttgtncctgttttgttgaaagggcctaatgcaaataataccaagaaacccactgtctgtgcaatattccaataacatttacatagggcaaataaaatacttgaaagaattctgaaacaattgtacctggggtggatggcctctcagggtttcttctggctttatgacttcatagtttaaagaactttttttttaagtagttacatcagatgcaggtactccattagttagggctgcactctgaaaattcaaattattattatgagctcttaaatactatttaactctggragrgrtatgccagantaargccaaaagaccatcacccctataatggagaaattgatctgcctattcttttcaaagcctatcttactaatgtttggatcttttaaaatcatcttatcatcagtataattcttgagtatgttaggtccttctttaaggataaattgcacaagcacaggacaccatgatttgtgtgtgtatatatatatat

SEQ ID NO: 2648 - DNA, 527 bp, Homo sapiens
  SITE (448): n equals a,t,g, or c
  SITE (475): n equals a,t,g, or c
  SITE (503): n equals a,t,g, or c
ggcagagggaaacttttcctttgtccatcgaggtgtttcataagttttttggtgtgttttctgggtcgtctatgtgtcatatggttttacttttctctcctttttcgttttcagaacatttttctgtctgttttggattcactgcttccattttacagaatgtcactctttagactctcagtccatcatgccatcgggtactcttgttgcagtgtaatttttattacatgcggttatttccctaacgatgtgctattcacgttcatcttcaaactcattttccatcagccagtgtctactatttagtgccctggctctatttcggtcctcctccccgggctttccctggctgctgtgctggccaaaagcatgggctttattctctccattggctgctgctccaccttagaggtgtggacctcactaggcgtttgactgagcgagtctngttggtgggagaaggaacttttttgtnagtcattgtactagggaaaaaattctgnaacaagtaaaaatatgaaagggaa

SEQ ID NO: 2649 - DNA, 453 bp, Homo sapiens
ttgaagccatacacagagcccgaggaggacttcggggacaccaagagaattgaggtgatggtgggtatgggctacacacgggaagaaatcaaagagtccttgaccagcctgttgcccaataaatttaggagagtccccccctccccaatgctgaccctaggattttccttccctgccctcacctgcaaatgagttaaagaagaggcgtgggaatccaggcagtggtttttcctttcggagcctcggttttctcatctgcagaatgggagcggtgggggtgggaaggtaaggatggtcgtggaagaaggcaggatggaactcggcctcatccccgaggccccagttcctatatcgggccccccattcatccactcacactcccagccaccatgttacactggactctaagccacttcttactccagtagtaaatttattcaataaacaaaaaaa

SEQ ID NO: 2650 - DNA, 499 bp, Homo sapiens
atctggactttttttttttttttttttttttgagacagagtctcactctgtcacccaggctggaatccagtggcactatctcagctcactgcaacctccgcctcccaggttcaagcaattctcctgcctcagcctcctgagtagctgggattacaggcacacgccaccacacgcagctaatttttgtatttttagtagagatggggtttcaccatgttggtcaggctggtctcgaactcctgaccttgtgatctgcccacctcagcctcccaaagtgctatgattacagacgtgagccaccgtgcctggcctggaattatctggactttcaaagaagatggcattattataagaagagaagattattgccgaaaagatggattgcctcactttccactttttatgtaacagtagttaaaaaacagctttttttttacttgaattacaaaaaagtttaaataaaacttgtatttatgatwcgaaaaaaaaaaaaaaaaaa

SEQ ID NO: 2651 - DNA, 962 bp, Homo sapiens
  SITE (6): n equals a,t,g, or c
  SITE (9): n equals a,t,g, or c
  SITE (21): n equals a,t,g, or c
  SITE (22): n equals a,t,g, or c
attttngantgggccctctanngcatgctcgagcggccgccagtgtgatggatatytgcagaattcggcttcggatcctgtgtgtgattgcggttgatcggtacagcaagttccactcggcaatgtacctgtttctgggcaacctggccgcctccgatctactggcaggcgtggccttcgtagccaataccttgctctctggctctgtcacgctgaggctgacgcctgtgcagtggtttgcccgggagggctctgccttcatcacgctctcggcctctgtcttcagcctcctggccatcgccattgagcgccacgtggccattgccaaggtcaagctgtatggcagcgacaagagctgccgcatgcttctgctcatcggggcctcgtggctcatctcgctggtcctcggtggcctgcccatccttggctggaactgcctgggccacctcgaggcctgctccactgtcctgcctctctacgccaagcattatgtgctgtgcgtggtgaccatcttctccatcatcctgttggccatcgtggccctgttcgtgcgcatctactgcgtggtccgctcaagccacgctgacatggccgccccgcagacgctagccctgctcaagacggtcaccatcgtgctaggcgtcttcrysctctgctggctgcccttcttgaattccaagccgaattccagcacactggcggccgttactagtggatccgagctcggtaccaagcttggcgtaatcatggtcatagctgtttcctgtgtgaaattgttatccgctcacaattccacacaacatacgagccggaagcataaagtgtaaagcctggggtgcctaatgagtgagctaactcacattaattgcgttgcgctcactgcccgctttccagtcgggaaacctgtcgtgccagctgcattaatgaatcggccaacgcgcggggagaggcggtttgcgtat

SEQ ID NO: 2652 - DNA, 908 bp, Homo sapiens
gggctgcaggacagtgggctcacagatgtcttgctgctttgccaccgagcctcacagccatctgctgacctctcagagcccagcaggcccctgcccgggggttcgtggaatgcccctgggggtctcagacccactgctcagctcttggccaggctccgtatctctctagattggaggattctggagggaagtcggtgtggcctccgatcaaagcctggtgctgacggccccgaagcgggtggagggcttgttcctcaccttgagcgggagtaacctgaccgtgaaggttgcatataacagctcaggaagctgtgagatagagaagatcgtgggctcagaaatagacagtacgggaaaattcgcttttcctgacgtctcccccaacgccatggccggctcttgaaggccacagagagatccacgtgctggacaccgactacgagggctacgccatcctgcgggtgtccctgatgtggcggggcaggaactttcgcgtcctcaagtactttactcggagccttgaggacaaggaccggctggggttctggaagtttcgggagctgacagcagacactggtctctacctggcggcccggcctgggcggtgtgccgagctcctgaaggagattgagaaggcgctcagggagctgggtgctttgcgcaaaaccaggcagcgaggacagaagtcccgccgtgtggccctcatcgaagccccgtggggcctccagagaccacacgggcctgagcccctgcacttctgtgtcgcaggagctgatttaatggagttcctgcctcagaccacaaggttcggagcgcccgcccacccctgcccctcctgggcaccctgcccaccaggtcacctgcacctgctctgaataaactgtgaagtcaaaaaaaaaaaaaaaaaa

SEQ ID NO: 2653 - DNA, 743 bp, Homo sapiens
gcggccgccctttttttttttttttttttttttttagcattttagagagtttatttgagcaagggtgattcatgaacaggcagggcaaactgcaagcaactgggtctctactacagaggtacaagggggaaaattttataaggttcccacagaagcaagacaaagaaaatacttggttaaagttgaaaggacctagttagaggttagatggtggtttctaattggttaagcttgtttggctgtttacactgagtcgggtgttagtttgcttggtgctggaacctaaatggtggaactgttaccagcagcaaatccaatgggtctgcagcagactccatccttgccccccggaggagaggagggaatttkgccggggaggcgtaaggtagcatgatagtccaaggcaagttttatagcaggagtaaaagttttagagcaagaacaaaaggaagcaaagtgcacttgaagagagccaagcgggtgacttgagagatccaattgccttggtaggcccttgacttggggttttatacattggcattgttccggggtttccatttctcctcctctgatttttctttggggcgggctgtctgcatgcacagtggcctgccagcacttgggaggggacgcatgtgcagtgtttttactgaagttgtgcacgtgttcactggaggagtttttcccttaccagtcaagcttcctaaaggaaggtcatatatgagttaaatgccactattttg

SEQ ID NO: 2654 - DNA, 558 bp, Homo sapiens
  SITE (505): n equals a,t,g, or c
  SITE (507): n equals a,t,g, or c
gaattcggcacgagcaagcacaaatccctcagaatataaggaaaaaagtggccataaatgggagccagcggaaacaatgaattgaaaaaacacacaaagacctcaggttttttttgttttgtttttttgttttgttgttgttgttttttttgagacagagtctcactctcacccaggctggagtgcagtggcacaatcttcgctcaccacaacctccacttcctgggttcaagcgattctcctgcctccccctcccaagtagctctgattacatgtgtgtggtatgacttctggctaattttttgtttgtatttttagtaagagatggggttctcccatgtcgggcaggctggtctcgaactcctgaccccaagcgatccacccactttggsctccaaaatcctggggattacaggcatgagtcacamgcccagctgacctcaggtatttgaatcatcagacagcatawgtttaatgtgtttaaataaatatgaaagacttatcnanstaaggaattaaggcctaaawtttaagaagcmgattaggttaaaaagtcca

SEQ ID NO: 2655 - DNA, 447 bp, Homo sapiens
  SITE (422): n equals a,t,g, or c
  SITE (438): n equals a,t,g, or c
  SITE (441): n equals a,t,g, or c
ggggtcgacccacgcgtccggcaacgatgaagccaccgcccctccgacaagcacagggggctataccaagcacaggctgctgaccgggctcccgggtcccacctctgcctcctcggccaccgggcaggactgcctggagccggacaccgaggaacctaacctgtccgcgccgaagaggccactggatggcaccagagcccagcctccgggaaggggaagctgctacaggactgctttttcgaggacagcagctccacggaagaggctgggggacaaaatcgtcttcaatgtaaatctgagctctgtattcgtgagcacccttcgatgatgatgttgagcacccttcgaatgaacgatttcgggtgttcccttccagtgttaaccaagtttttccagaaagaaggatttcccaacacaacggnaaaccaagcttttttnggnacaacg

SEQ ID NO: 2656 - DNA, 341 bp, Homo sapiens
  SITE (138): n equals a,t,g, or c
  SITE (297): n equals a,t,g, or c
  SITE (303): n equals a,t,g, or c
  SITE (320): n equals a,t,g, or c
gagacagcagtgtggagtctggaaactcagagtccttctggctgccgccgcggctttaccatctggagagccaccacgctgaagcctcctccaccctragcgcttggytggcttcaggcctgtytcaagatgcaaggnagaggaggatacaccaccatcctgctggctgctctgagtgtcacccccctggaaagcagcacagggtgcccctcccatcctgggcaccccctacttcttcccccagtgggatgcagaatgtgctgggggccaggttgctgggacgcgctgggaataacntggcancatttgggacattcatnccacaaggaatcttcaaaacc

SEQ ID NO: 2657 - DNA, 457 bp, Homo sapiens
  SITE (11): n equals a,t,g, or c
  SITE (30): n equals a,t,g, or c
  SITE (32): n equals a,t,g, or c
  SITE (83): n equals a,t,g, or c
  SITE (387): n equals a,t,g, or c
  SITE (421): n equals a,t,g, or c
  SITE (433): n equals a,t,g, or c
  SITE (435): n equals a,t,g, or c
tcccaaccatntcttttaaagaatcccacncntgggatttgccagggagtaacatcaatttctatggtttctagaattcacangggagccaatatttgttctttttaaaccatctggcttttttcttctattgccacagtttctccaagataattactttggttctgagatcatagtctttagtgccaaagacagcagttctctgcctttttcctgtgatagggatgattttcctgtgaataatcactcccatgaaaggcccaggaatcaacacccaaacccctcccaggctgcatctccatcctttcccactgcaaagcaaatcatagcacaggtgagtaacgaggaaagcagaatagccttagatctactttagcaagcgccttnaggactttgacttttatcaaatcttggggggcanttaccttgacangntacacacctggttacaggatag

SEQ ID NO: 2658 - DNA, 330 bp, Homo sapiens
  SITE (219): n equals a,t,g, or c
tttttttttttttttttttttttttttttttttttttttttctccccaaaccccattaatgggctctccttaatttaattccgggttttaaaagaagaaacaacggggctggcaggaggagggccggcctctcaagcccgggggatactgcaggctgacaatgaccttgcaggcctggatctgaacatcttcctcaggggggatgaccagggcaagtantcggtctgccagtcggaactcttccccaaagagggattcatgcagggactgttcgttgaaatgccatttcaccacggggaaggggggggcgttccggccctcactcagccg

SEQ ID NO: 2659 - DNA, 435 bp, Homo sapiens
  SITE (375): n equals a,t,g, or c
  SITE (396): n equals a,t,g, or c
  SITE (420): n equals a,t,g, or c
aaggtcttggagcaagacagtctcaatgttgtatgggcttgggacctgcatctggccccaagcatctggaactgtgcacttaacctttcttcattacccagacttggatggccttgttggggttcaagggataggtcctctgtctcttcctttaaattattaactatttattacatccggaacctgtgagattcagcactcccaaccagaccctgggatgggtgagagaaaagcgggggtgtctctyccctccccactctgcccagctctcatcactgtcagacccaccagagctgagggcggagggattgggggctggggcagcctgggtccccatgcccctctctgtgcctcggtctccccccttccatggtnggcgggggggaagctccattnttaacctacctcgttttgggggangggttggacgggtga

SEQ ID NO: 2660 - DNA, 349 bp, Homo sapiens
  SITE (72): n equals a,t,g, or c
  SITE (338): n equals a,t,g, or c
  SITE (349): n equals a,t,g, or c
tcgagtttttttttttttttttttttttttgagacagagtctcgctctgttgcccaggctggagtgcaacgncatgatcttggctcactgcaacctctgcctcccgggttcacgccattcttctgcgtcacctcctgagtagctgagattataggcgcccaccaccatktccagctaatttttttgtctttttagttgagatggggtttcaccatgttggccaagctggtctcaaactcctgacctcaagtgatctgcccaccttggcctcccaaaatgctgggattacaggcgtgagccaccgcacctggtcgatactatagttttggtagtaagtnttgaaatggan

SEQ ID NO: 2661 - DNA, 512 bp, Homo sapiens
  SITE (469): n equals a,t,g, or c
  SITE (488): n equals a,t,g, or c
  SITE (498): n equals a,t,g, or c
  SITE (500): n equals a,t,g, or c
taaccactctccatttggtgaatatttgagttgttttcagctgtatgttgctatgaataatgccaggaygmaakggagcagcattttgcatgtgtcactgcatattttttgccagtttatcttggggaagcgtaccagtaaaattgctaggtaatttcaccattacatttctctgcatatgagttgaagcattttgcattcccaccagcagtgtttgaaagtactgttctcaaatggaggaatatgargcttttttgttttgttttgttttttaataaagttagtacgagtaaccatattggtcatgttttacttaaattgataggccttcaagatggcttttagttatctcaggaggctgagacaagagaatagcttgaacccaggaggtggaggttgcagtgagctgagattgcaccaytgcactccagactgggcaacagagcaagactctgtctcaaaaaaaaanaaaagaaaaaaaaaatttnaaattttggnanaaaggcgcgggg

SEQ ID NO: 2662 - DNA, 2099 bp, Homo sapiens
  SITE (11): n equals a,t,g, or c
  SITE (75): n equals a,t,g, or c
  SITE (118): n equals a,t,g, or c
  SITE (1943): n equals a,t,g, or c
  SITE (1995): n equals a,t,g, or c
  SITE (2024): n equals a,t,g, or c
  SITE (2041): n equals a,t,g, or c
  SITE (2067): n equals a,t,g, or c
  SITE (2068): n equals a,t,g, or c
  SITE (2069): n equals a,t,g, or c
tgttctttccntgggttatcccctgatttctgtgaataccggtattcccgcctttgaattaagttgataccgctngccgcagccgaacgaccgaagcgcagcgagtcagtgagcgagnaagcggaagagcgcccaatacgcaaaccgcctctccccgcgcgttgccgattcattaatgcagctggcacgacaggtttcccgactggaaagcgggcagtagcgcaacgcaattaatgtgagttagctcactcattaggcaccccaggctttacactttatgcttccggctcgtatgttgtgtggaattgtgagcggataacaatttcacacaggaaacagctatgaccatgattacgccaagctcgaaattaaccctcactaaagggaacaaaagctggagctccaccgcggtggcggccgctctagaactagtggatcccccgggctgcaggaattcggcacgagccaggaggacactcataaggacagggccccagccctgggagtggagggtgtgagcagaggccctgggactagggcctgggatggacaaccctccttactgaccctccagagtgcctgggagctgagggccggctggctctcaagctgttccgtgacctctttgccaactacacaagtgccctgagacctgtggcagacacagaccagactctgaatgtgaccctggaggtgacactgtcccagatcatcgacatggtgcgttgtggtggtggtacagctgtggagtcttacctgtcacagtgtcaagaaatgaaggggatgaacggaaccaggtgctgaccctgtatctgtggatacggcaggagtggacagatgcctacctacgatgggaccccaatgcctatggtggcctggatgccatccgcatccccagcagtcttgtgtggcggccagacatcgtactctataacaagtactgcctatctgggcccctcctctctcttacccctctctagacttgcccttagctgtgggggtgtagtgatcccctctccctaccacataacctggttgccacgctgccctggaagcttttccccaggacccttctaagctgccaagcactcagcccctccatggcacccccactttaggctatcccaggccagcccaggctgaacgtctcctcggaacctactgtgggtccagggcagatgtctgaatcacaagggcctctctagggcacacttttagctctaagtctctcagggctcccccaagagcctgtctaagggtctctttcctccaggacatagccctctggaacactgctttatgtctccttgaccagttccgtgtctcccagccagcacatagctctgcatattttctctggggcccttctacaagttttgcagatgtcccccaagggaagtcactgtgtgtcccggagctacctctgggttctgcagaggcctttttatacatcctctggctacgtctgtgtcccttctgggcccttcaggcaccaccccttccaggcctcgaaaggcagcgggtctctctaggtgcactccaccctctgtgttgctttgttctgaaaacaaaaaaaaaaaaaaaaaaaaaaactcgagggggggcccgtacccaattcgccctatagtgagtcgtattacaattcactggccgtcgttttacaacgtcgtgactgggaaaaccctggcgttacccaacttaatcgccttgcagcacatccccctttcgccagctggcgtaatagcgaagaggcccgcaccgatcgcccttcccaacagttgcgcagcctgaatggcgaatggcaaattgtaagcgttaatattttgttaaaattcgcgttaaatttttgttaaatcaagctcattttttaaccaataggccgaaatcggcaaaatcccttataaatcaaaagaatagaccgagatagggttgaagtgttggtncaagtttggaacaagagtccactattaaagaacgtggacttcaacgtcaaanggcgaaaaaaccgttattaaggcgatggnccattacgtgaaccatnacctaatcaagtttttggggtcaagnnncctaaagcactaaatggaacctaaagggag

SEQ ID NO: 2663 - DNA, 639 bp, Homo sapiens
  SITE (17): n equals a,t,g, or c
  SITE (137): n equals a,t,g, or c
  SITE (300): n equals a,t,g, or c
  SITE (329): n equals a,t,g, or c
  SITE (606): n equals a,t,g, or c
tacctcatcgggaaggnagagcccgtagccctcatcacgcctgggtggaggagtcaggatcggkggatacaccttcccttgacaggtaagaaaagatccagccttgacggcccatggagacgtgcagaagaggcggnggcgaggaggggaggctggagagggtctctgacctttccctgtggtctcttaaattcgtccatggtaggaagggagatggagcatgggcagtgcctctaagtcggccgtgcgaatgcaaagggccacagaacaggctcctactgtcttcgaagcccctgatgnaagcgtgagcatcagggcctcaggccggntgacctcccttagccagctggtaatcctaagattcatgccaagacattctcccctccgagctgatggaacacagctgtgcaccagtaacttctggatccttggatttggctgaagggaggtcaccaaaggttgctcggtcactgcacgttcagagccaagtcacacgtggacaccctcattggcccaggttgtctttatcttggaagcggccgacccagagcagactctgggtggagtcaggatggtgcattgttctcccccacaggcggtgaaccncttagctgcctgggctggcaacagctgaggtct

SEQ ID NO: 2664 - DNA, 366 bp, Homo sapiens
  SITE (363): n equals a,t,g, or c
  SITE (364): n equals a,t,g, or c
cgtggatcgccaccgcgggtggcgtccgctctagaactagtggatcccccgggctgcaggaattcggcacgagctccactccacctatcttccagtggcagtcacgaaaaatcttctcaatatgcagtgggcaggacctgcaaggagtcacgaaggactgacaggaatttcacaagggaaaagggaaagactgattggagtgggaaatacacatacaggatgccaggcaaagcctgggcagaaggggcggggcttcgtttaaagtgcttttcaaacatgctccttgacttcctgtttctctctgcagtctgttttctaccttccaaagcctagagcttcccagaaccatttctcctctgggtnntt

SEQ ID NO: 2665 - DNA, 464 bp, Homo sapiens
  SITE (418): n equals a,t,g, or c
  SITE (421): n equals a,t,g, or c
  SITE (426): n equals a,t,g, or c
  SITE (457): n equals a,t,g, or c
  SITE (463): n equals a,t,g, or c
gaattcggcacgagagggacactgccttccccagcagggctgctcatggctgctgcgagaggctgcataatgttagagttatgacaatggtctctgaagacccccacctgttagcagctgtgggattgtgggatttagtgcaagttgcttcaccacacgatgttatgcaggacacactatcctcattttacagcaaaatggtggtggtgatatgccctggcttcagagacagacagacctgggatggaatcccagctctgccacctacttgctggataccttaggctttcctcatctggaagatgcagaggatccaaactcataccttcctcttgctcttgtcggsttacctccctgagctgatgggagagagtaggytccacagcacagacaagragggsccargctgarggaccanggntggantatgtggacamtgtaggaccatttactgtgnccgctng

SEQ ID NO: 2666 - DNA, 1035 bp, Homo sapiens
  SITE (804): n equals a,t,g, or c
ctcgagttttttttttttttttttaagttgcaggatgttatatttacaggctgaggttatttaaataaactaaaacaaacaactaccaattctccatggtaacaagtataggaaaactgtactgaaccaacatataccaaatttgcaaaagtaattgtttcagttagggcacagggccagggtcatgataggaaaagggaacagaagaggaaacagtggttaaaaatgactttatctggccaggcacggtggctcatgcatgtaatcccagcactttgggaggccaaggtgggtggatcacctgaggtcaggagttcaagaccagcctggccaacatggtgaaaccctgtctctagtaaaaagaaataaaaaattagctgagtgtggtggcgtgtgcctgtagtcccagctactcgggagaccgaggtagagaatcacttgaacccaggaggcggacttgcagtgagccaagatcacgccactgcactccagcctgggtgacggagtgagactgtctttaaaaaaaaaaaaagactttaacactattaatatattccttttaaaaagggacaatgtgcttctatattatttgctctgtttaaaacatatgcacataaataagaaactgaaagtaagtacaaatgttaacagtgtagaattcttagtggtggtagtattttctccgctgcacttttcaaatctcatcaccacctcaccacacctgaaccagaactaggatcacagcaatgggaaaaggctagaagaaaacaggtgtggatggttgtcatgtttgcaagattcttnccattatttytacttgcacttttggctctctgacatttctacaatgtgtaattttaatagttgagcttaaaaaaactccgaaataaaaagttatcatagtatcagctggccacagtggctctcgcccgtaatcccaacactttgggatgctaagacggacggattacttgatgtcaggagtttgagaccagcctgacctcaagtgatccacccacctcagcctccaaaagt

SEQ ID NO: 2667 - DNA, 799 bp, Homo sapiens
  SITE (393): n equals a,t,g, or c
  SITE (432): n equals a,t,g, or c
  SITE (697): n equals a,t,g, or c
  SITE (741): n equals a,t,g, or c
gaattcggcacgagatttctagatagattgaacatgtaataatgttcattacaatattgtttattccctattcatgtttcttgcccatagagttgtcattttttttaattataagcatgaaaaaggtaagggtattaactccttcacatatttgtggatatttttctcagattgtcatttttctcccacatagaaaaacatttcattttaaaataatgaatctgtcttctggtttcattttgctgtggacaggaactctcaccacattaccaaattaattttcaccatatctgattatttaggttcaattttttgcatttaaaaaattcatatgaatatatttttatattggtatgaaatacaatttaagagtttttttctaaattttttgtnacctcatcaccatctaaatgaatcttcctactgattggnatgccacgtttataatatgctaagtacttctgtaaattcagagtttgtttcagggctttctttcctgtcccataggcctttccatttgttacaataacaattttttttttcttttttttttgaggcagartcttgctctgtcaccaggctggagtgcattgtgtggtctcggctcactgcaacctccgcctcctgggttcgggcgattctcctgcctcagcctcccgggtagctgaggctacaggtgcacaccaccgtgcgcagntaatttttgtatttttggtatagacgggatttcagcatgttggncaggatgctcttgatctcttgaccttgtgatccacccacctctgcctcccaaggtggt

SEQ ID NO: 2668 - DNA, 556 bp, Homo sapiens
  SITE (12): n equals a,t,g, or c
  SITE (14): n equals a,t,g, or c
  SITE (346): n equals a,t,g, or c
  SITE (543): n equals a,t,g, or c
  SITE (552): n equals a,t,g, or c
tatacgatcatnanaggcgattgggtacgggccccccctcgagttttttttttttttttttttttttaagagacactgtctcactatattgcctatgttggcctagaactcccgggctcaagtgatccccctgcctcagcctctcaagtacccagtagtgactacaggcaagcctcaccacgcccagctctgtcttttcattttcttaatggtatcttttgaggaccaaaagttttaaattttaatgaagtccaatttattttttcttttaatagctattgcttcatgtatcctaataaatctttttttggcctggcacggtggctcatacctgtaatcccagcantttgggaggccgaggcaggcagatcacttgaggtcaggagtttgagaccagcctggccaacatgggcaaaaccctgcctctactaaaaatacaaaattagccaggcatggtggcgcacactgtaatcccagctacttggaaggctggagataaaaggggggggcacccactaaccctggactaaggtttttttgggnaattttttnggtt

SEQ ID NO: 2669 - DNA, 506 bp, Homo sapiens
  SITE (365): n equals a,t,g, or c
tcgagttttttttttttttttttttaaagcaaataatcatgtttaataattaaatgagcatataataaatattcagtttcaacttgaaacattcattattcagacattcattcaccaatctttctatgaagggctaaaatcctgcaaggtttaggtctcctactctctatttcatgtcacctttagaagaaaggtaatttaaacatctgtaatgctgcacagttatttgattacagttttacccacagtccctaattatttcatctacacctcagttaacatatatgctgtatctactttgccttcatcaagtctttcaaagaaagcattcaatcaagttttcatagraacaacaacaatatttntggctatatttcagtgggttatataattwtaaatwaaatccygcaattacmacactaaggraaagtgggcataacygggccaggtaaccaccacaattgatgaacatccgttgggatttttaaccggaagactccagagca

SEQ ID NO: 2670 - DNA, 1111 bp, Homo sapiens
  SITE (5): n equals a,t,g, or c
  SITE (13): n equals a,t,g, or c
  SITE (24): n equals a,t,g, or c
  SITE (28): n equals a,t,g, or c
  SITE (1061): n equals a,t,g, or c
  SITE (1084): n equals a,t,g, or c
ctccnttagctcnggttgaaatangccngaagtccccaaatatttaaaagacttagtttgtcaagatttaaccatctttttctgagttcttttcatcactgttgacaaaagcaagcactggagaaaaatttttcttttgcctatggggccagcagtgaagatgagctcatctgtccatcaagctcttgctgctgctacctggcctcatttaatagctgtgaggccaaatccttactgtctttgaagtcagaacatgcaaagtttgagtatttgatgtatctttgagatgtgtcagtggccaaccaatgagagggatttggcagttagtgtcaatgctacaaaagacagttaattgtacgaaaaccacaggataaaactccaagtcaaaacaatagaacatcatccaggttatatattttttagctatgtagcaggggccctctgcattcagggcttttaaacttatttccattaacatctttatcatttacatagtaaagctttcagaatataaaaattcttctgattatggacaagctactgtgtgtccaaagcattgtataatttaacatgatcaactactttttctaaaaatgttatttctcaaagaaataaaatatagcatttgcaaaacacacacacagaggatcttattattgaagaaatgcctaggttatttgcaagtctattaggaataattttccttaacttattgactgttttcatctcatggaaagaagtttccctcctgtctttgctttggattatgtaactttgatttttcttaaagtaatgatttgcctagaagtgaattcattcagcttaaaaaccatagtagggcagtgtgaaaggaaaatttatgaataactttttccactatcttttcacaaagataagttctagtggggagaagctctcaaagtwaccaaaacaaaactagcattgacagtgaaggcagaacgccattccaggttctgaaatgaaaaccataaggaaaaaattgtcttcattgaacttgaacttaactaacttgctagaaattaaccartkgcyctgggaanttctttcctgtttaaaaaattanccaactggaatgtttccatcaaattgg

SEQ ID NO: 2671 - DNA, 724 bp, Homo sapiens
  SITE (700): n equals a,t,g, or c
aggatttcaaaatacattagtgagagtaacagctagcagaataattacaatggctaaaacgtttttatagagaatcttgtttttcaaaaaagaataaaaagtttgaatagctattattaaagaaaagccatgtcttcaacatctgagtcaccaagaagtaacactttttaaacttgttagaaatccctggaggcatttcaaattcatcttctaacctacctaagcactttaaaatacagcctccttctgttcctctgttccccttcatgcctccttttgaattgatatctcagctgtcaatatttctttgacttcagcattgttattttatttctctatatcaatgtgtccttagttttcttagcctgttaatttaaaaatccagacttgggggtcattgtgttgctacccaagagaaaatgctacagttttatagattgcacatcattctttaaggcatacttttacctcaggaaacttactctagtatgttctcatatattgaattctcaactaagtaactatttctttatacctataaactagtacctaattcactgttagttaaatgagctatagataaggcagctaaatttctgaaagatagccagagtaagtaagcagccactgcaagctctgaatcagttttttaaaaaaaaagaaaaaaaaaaaaaaggagctgtgccccattgaacaatgncaacatcacaaggggaagggaggg

SEQ ID NO: 2672 - DNA, 821 bp, Homo sapiens
gaattcggcacgagggtacctgttcagaacatgtttgtgaagggatggagtcatttatgcagctccatcttctctgcccttgtagttcctttactccatcctccatcttagggagtttttttctcttgctaggtatcctggatacagccatcgttgatcgggggaggaatgtggtgtctgcttctcgagatgggacagcacgactttgggattgtgggcgctcagcctgcttgggagtccttgcagattgtggttcttctatcaatggagtggcggtgggtgctgctgacaactccataaaccttggctcccctgagcagatgcccagtaagttgataatgatatgtagcattgttttattttcttaggcccccttcagtgattgccttagtttctccttttcttcctcatccttttctgctctgtgcctggtatttctgttttcaccatacgattaatatttactctgtacctactatgtttctattactttggaatctacaaaggaagtatatgtcatagcactgcgtttcagtaagtacaatctaatgtagaagatgagataaatgcctataaagcaggggtgtccgatcttttggcttccctgggccacattggaagacttgtcttgggccacacataaaatacacaacattgatgatagctgagctaaaaataaataaatctcataatattttaagaaagtttatgaatttgtgttgggcctcattcagagccaccctgggctgcaggttggacaagcttgctttaaaacatttagagaacagtaacatttggctgaaataattaatgaatctttt

SEQ ID NO: 2673 - DNA, 93 bp, Homo sapiens
ggggcagtttgcattatacttggacgtgaaactaartgttatataaaaagatatgtttgactgggctakaaattgaattaagaagggtatagt

SEQ ID NO: 2674 - DNA, 451 bp, Homo sapiens
gaattcggcacgaggttttttcttaatttaattaattaattaatttttgtttgtttgtttgagacagggtctcttgctctgtctcccaggctggagtgcagtggcatgatctcagctcactgcagcctccacctcccaggttcaaagtgattcctgcctcagcctcccatgaagctggaactacaggcacccaccaccatgcccagctaattttctcactttttacaaacatgcgggtcttgcccaggctggtcttgaactcctggcctcaagcgatcctaccttggcctcccaaagccctgggattacaggcgtcactacaacttaagtggaagttacctgagaaagcctgagagacaggcagacacagacagaggcccaagcagacacgataggggccagagtgctccgttttctaatttttcagccaaacctcatagttggaatgtta

SEQ ID NO: 2675 - DNA, 694 bp, Homo sapiens
ttactgagattcaatgtaaaaacaatactgcattggtttgactacggtatagctacttttgtaagaaggaaaaaaacaaaacatttgaggtaacctagaaagcacagacagagccatataatagacatcttagagataagcattttaaacatttttgccagtgcttctctgagagcaagttctttaaacagaactcaacaatttttacaattttaaaaaaaatacatccctcaaaaatagcccatcaatgctaaaccaaactttttgtatttctacaaaaatagatgcacatagagctacaaacttgtattcctgaaagaatgaacattttaatgtgtggttccatcctttcctgacaaggtggttggctaaaaaaaaaaatcaaaatgaaacaaaaacttagctatatattgataaaagcaagataacaaaaggagagagttgcacagttggcaaaggctcagatgaggaaataaacaaataaaaatgcttttcttcaatgtctgggacccactttgctttctcaagaaaggccgaaaaccagtcaactgcgtgacactttgtcttctccttctatgcctttcgtgtcctattgctgaatggaaaaacccgacagtatcttttcccagtgggcccttggatttatgctgcaacttaactcactaagattgtgtgtttcagtaccacggtgatt

SEQ ID NO: 2676 - DNA, 283 bp, Homo sapiens
  SITE (65): n equals a,t,g, or c
  SITE (141): n equals a,t,g, or c
  SITE (275): n equals a,t,g, or c
agcccaacatcagggctggggcgggcagggctggcctggtgaatccacatgggaaagtgtgtgtntggacgtggtgggggccactgggccactgacctgggagatgacaagcttgaaggatgacttaaactcctgcacgtnagttgtcaagcggctcaccagctgccctgtcttattggcgtcaaagaaggtratgtcttgtctggcatgggacaagaaccaataaggagggcagaagagggagacattacttcaggataaggtcctacccccanacccctca

SEQ ID NO: 2677 - DNA, 769 bp, Homo sapiens
  SITE (6): n equals a,t,g, or c
  SITE (13): n equals a,t,g, or c
  SITE (25): n equals a,t,g, or c
  SITE (38): n equals a,t,g, or c
gcttgnacttctncgggaaaccgcncctatcactctcnaatcctctacagaagatgagtttggtagacctctgcttatctgatttaaattcttcttgctgtaatctcagctgttctggttggtggcaatgggcaaactcaggatgttggtcagacaatggactgaagagtttacttttctctgcttccctgcccaactgtacttgagtaatctttatagtatctctaaaagatggtcctggaatggtgctccctggtccttccctgtctcttgcagtcggccaggacacaggcgggagtatccacagctctcattttacagcttccttcccgttccctacagcaatagagggggagccctaacggggttttagcaatcagtccagccccttcagtctggaaaggaggacactgaggcagggatgggcggtgccttgctccaggccacacaacaaggcagtgacagtggctgcgtttgaacccaggtgtcctaacctccaggacccacacatggcaatctgaggaactgctcggggagcagagtgcttaatgacaggscttcagggacactatttgtcagaggggctttcaaggtaactcctgtggtggtgttgggagggggtgctcagccgatgcctagctctctgtagccttggtggggaggccactgtgacccargtcagcttgcctggaacagctgggtttctggaaacacttctctctttctatggggccctgtcgtgggtggtggtggagaccccggggtttgt

SEQ ID NO: 2678 - DNA, 1332 bp, Homo sapiens
  SITE (680): n equals a,t,g, or c
  SITE (1114): n equals a,t,g, or c
  SITE (1173): n equals a,t,g, or c
  SITE (1199): n equals a,t,g, or c
  SITE (1219): n equals a,t,g, or c
  SITE (1269): n equals a,t,g, or c
  SITE (1321): n equals a,t,g, or c
ggtaggcagaacctgggagacggtggaagaaatcttcaactcctggtagggaaggacacatagaaaaaggtgaggatggcggtgtggagacagcctgggggagaggccagagtggacagaggctgtggaatcacttaacaaacctttctgggctgggagactcggtgctggggtgtgggcctccagaggggagtaagcagggcagacccacccttcctcataatacatatgcataagctcatttgcataacaacacacctgctcacctggcccccatcgaagtaactggccttgcctcaaatggtccattatttttgactaaagtatggggaaaggggacccattctcttgctcatccttttccttatctcccagattcctgggtttggaagagaaggaggagtaactgtggaatgagtcacagaattattccacctgccccagggccaggccacgagtagagcgaggatagatgtctccctagagccttacctgctgcccctggggaggtctggggcttccacccagaggaagagcaggggtggtctgggcagcccaggagtctgggggaaggaagcaagcacccttactcctcatgatctctgtcctgktaccctwctcagtgcctggggccagggctaggtgtgtgttatctcacctcaaacagtggctctgggctnccctgcccaagctaatgtcatagtggaggctcaggccctgcaccaacatggttccgtagtccctggagtcaggctgggggagcccagggctgaggctccctttcatcccctcccaccaggaaagggtctttctcggtatttcccacaaacactcatatcaccacttgacagccttttcattccattctcccgcctctctcagccccaccacacccctgacacattccttcccccacttcagctcctggatcgcaggcaggggcaccctgcctatcccctctcccaaagcgggtgcctgggagctgacatcttggctcaccttctcctcctttgkcttctcttctttcccccactccccagcatttcatccaagccagaaatgggcctagaagtctgtagaaagacatcccgctgctatcactccacaaatcctntagagaagatgagtttggtaagacctctgctttatcttgatttaaattcttcttgctgnaaatctcagcttggtcttgggttggnggcaatggggcaaaactcangatgttggtcaagacaatgggactggaagaagtttacttttctctgcttncctggccaaactgtacttgagtaatcttataggatctctaaaaaatggtccnggatgggctcc

SEQ ID NO: 2679 - DNA, 1112 bp, Homo sapiens
  SITE (1020): n equals a,t,g, or c
  SITE (1023): n equals a,t,g, or c
  SITE (1081): n equals a,t,g, or c
tatcrtgcycatgtmcaattctgttgctttcaattcatcagtccttatatattctgtytakaawwcttcattcacatccacttccatttgtatgactgaatcccaagtccgcacctctcgctttctatccttgtctttctttattcttgtaaatgaggatacagacatgataaagacacatttgcaacctcaagatgttttacaatttgttaggaaatgtagaggataggaacctaagtcagtctagggtggtgagaaaatatgcttaaattgatgttgagagacacatatgagatatgagttaaccttgtcaaaggaaaagacaaagcttctagggagaaaggacagagacagagagagagagagagagattaacacactataacatgcagatacacatacaaaagaggaatgtttgtggagaacacttcaacatactgtgatttgtgtgtgtgtgtgtgtgtgtttggaagagttaaacaattggaaaacagagccagagttcaagagtccggccttgagagttagttatatgatagtaggatttctttatacaaagtgagtatgcatgtggatgaaattgcccaggtagaatgtgtaatgactgaatgagagagggttgaaaagaaacgtctggggaatagacatttcagggagggacagaggagaagcaacacacgggaaaggcaaagaatgagcaactagaaaatcagaagagaaccaggagaggtgtgtatcatagaaactaaggcagaagatggtttcatggtggtagtagtcaatgatgtcagacatggcagaaaatagaattgaaatgaaccagtsctcccatttctggggctatttccgggtgaccaaatttaagaagagtctccacagcttgagggattccagcatgcaggaagatgcccaagatcctcaagacaaaaggggagatacttgktaaggacgacagaaaacccagaagtttccaaatgccaagaggagaatgagaaagatcatcaagtctgggcaggtcantangagtatatgaaaattcaatttaaagtccttgagaaccaggggaaaatactcatggganctgggaaaccagagtggttatttgaaccagc

SEQ ID NO: 2680 - DNA, 763 bp, Homo sapiens
  SITE (632): n equals a,t,g, or c
  SITE (654): n equals a,t,g, or c
  SITE (659): n equals a,t,g, or c
  SITE (669): n equals a,t,g, or c
  SITE (677): n equals a,t,g, or c
  SITE (695): n equals a,t,g, or c
  SITE (750): n equals a,t,g, or c
gcagcaataggatactgatacatcctcataactcattccgagtctaaacattaaagataaaagggaaatatgccactggcaatatcttttctttcttattcagacatttgattcttccagtcttaatcctcgtcccacatgcctctggcacatctacttgagcacatttattctttatctgattatcctactccaatttccataagcaccatcctattcttggcattacacctcctctccaatattttacccagttcttttttgttgttgatgtttaaatacttcctcaaattctcctgcttattttgtcagtgtgaaaccagagtagtaatctctaaaagcctcttgggctgctcttacttttttgacttatgttactcattgagcaagtattttcctgcttctcttttatctgttgttttgtttactagtttgkcagcatcaaatgttttctgkcttaaatccaaagctcactggtaccacatacaaagttcaataatgtattctgcaaacctaacatattatcatgctcatgtacmattctgttgctttcaatcatcagtccttatatatctgtctagaaaacttcattcacatccacttccattggaatgactgaatcccaagtccgnaactctcgctttctatcctggncttcnttaatcctgnaaaggggntacagacatggataaagncaccattggcacctcaagaaggtttacaaattggtaaggaaatgtaggaggatanggacccaaggcag

SEQ ID NO: 2681 - DNA, 471 bp, Homo sapiens
tcgagcactgggggatcagagattttaaggttcatttggtgggtcgggtggtgggggcagtaagtcgggagtgctgattggtcaggtcagagatgaaattatagaaattagacgctgtccrctttcgctgagtcasttcctgtgtgaccgccacaacattggatgagccagtttatcgatctgggtggtgccagctgatccatcaagtgcaaggtctgcaaaatatctcaagcactgatcttagtcttacaataaagatgttatccccaggagaaggtcagaatcttgtagcctcctgctgcatgactcctaaactgtaatttttaatcttttagctaatttgttagtcatacaaaggcagtctatccccaaggcaagaagagggtttgttttgggaaagggctgttattgtctttgttttaaactataaactaagttattcccaaagttagttcaacctatacccaggaa

SEQ ID NO: 2682 - DNA, 362 bp, Homo sapiens
ggcacgagcagaagttgatgcactgagaagaaaaggccctctgatcacagatcagagcttgtgaattattattattttttttatctctggtaacaagctgatagggtgagtgagaaggatcaaagagacatactttgatttatcactgagtaataatcctttcccaagaaagacaagttaattactttttgtcttagacccagttagggtcaccttacagtgcaggtggaaagaaagcaggactgctgagaggagctcaggacccattttccaggactattgccttctcaaaactttggagagcagtgaaaatagattcccaagtgaaagaggtggcagaaataaaaaaaaaaaaaaaaaaa

SEQ ID NO: 2683 - DNA, 1180 bp, Homo sapiens
  SITE (4): n equals a,t,g, or c
  SITE (1151): n equals a,t,g, or c
tgtntcaaaatttgatgaggtcctatttatttatttattttatttatttattttttttgagacagagttttactcttgttgcctaagcgggagtgcaatggcatgatctcggctcactgcaacctccgcctcctgggttcaagcgattcttctgcctcagcctcctgagtagctgggattacaggcgtgcaccaccacgcccagctaatttttggtatttttagtagagatggggtttcaccatgttagccaggcttgtctcgaactgctgamctcaggtgatccacctgcctcggsctcctaaagtgctgggattacaggcgagagccactgcacccggccattgattttttttctttatagatcattgatgtcaagtctaagaattctgtgcctggtcctarattctgaacattttgccctatwttttctatatgtkttatgattttaggtwttacctttaagtttgcatccattttggattgatgtttatataataattttttttttgagacaaggtctcactgtcacccacgttgcagtgtagtggtgtgatcacagctcactgcagcctcgacctccccaagctcaagtgatcttcctacctcagcctcccaagtagccgggactacaggcgtctgccaccatgcccggctaatttttgtaatttttgtagagatggggttttgtcatgttgcccargctggtctccaacttctgggctcaagtgatctgcctgcctcagtctcccaaagtgctaggattataggcgtgagccactgcacccagcccaaattcaacatcttttcatgataaaaactctacaaaattgagtttggaaagaacatacctcaacataataaaagccacgtatgacagacccacagctagtatcatactacagtattctccagtattttcttctaatgatttttttkttttttttttgagagcgakagtctcgctctgttgcctaagctggagtgcagtggcaatcttggctcactgcaacctctgcttcctgggttcaagtgagcacatctgggtwatttttgtasttttattagacaaggtttcaccatgtattccaggctggtcacaaactcctgggctgaagtgatccacccgcctcggcctctgaaagtgctganattacaggcatgaagcatgctcccgggca

SEQ ID NO: 2684 - DNA, 639 bp, Homo sapiens
  SITE (573): n equals a,t,g, or c
  SITE (624): n equals a,t,g, or c
  SITE (637): n equals a,t,g, or c
gaattcggcacgagaaagaaatgaagatgttttcatatcacattatagttttacatatctttatatgtttatcactgttccaaaattgtggtagttattaaaccggctactagttctgggttgttttttgtttgtttgttttgagccagagtctcattccatgacccaggctggagtgcagtgacacaatctcagctcactgcggcctccacctcctgggttcaagcgattctcctgctaagcctcctgagtagctggggctacaggtgtgtgccaccacacccagctaatttttgtatttgtatttacatttaatatattgrttaatatactacatgatttattatttttagttagctgtaasaaaatcaatcattatatatataatctaacctggtgctacccattagaaacataatataagccacacatggaactttaaattttctaaaagtcacatattttatatttagtttttcatattaaatctttaaaattcactgtatgttttatacttacagtatatatcaatttggactagcctcatttcaagtactcaatagccacatgtanctagtggctactatattgaatggtgctgatgtagccatttctttggacatngggctatttctanat

SEQ ID NO: 2685 - DNA, 179 bp, Homo sapiens
  SITE (117): n equals a,t,g, or c
ccacgcgtccgcggacgcgtgggcgggagcggagagcggaccccagagagccctgagcagccccaccgccgccgccggcctagttaccatcacaccccgggaggagccgtagctgcnacagccggccccagtcaccatcaccgcaaccatgagcagcgaggccgagacccagcagccgc

SEQ ID NO: 2686 - DNA, 1553 bp, Homo sapiens
  SITE (1507): n equals a,t,g, or c
  SITE (1511): n equals a,t,g, or c
tcgacccacgcgtccgcacaccgtgratgccaaagtatctttaaaaaatgaaatggagctcgtagcttcctgacaggctaccagatgaagtgtttgttggggatagtgtcctttgttatttgctccatgaatgttttcagctgtgaatcagcaaagagcctacactccttggttttgtgacaccattggttgtgtttggatgacttggaaccctaatttctgtggagctggtggggctgggagtccatggtttgctttgactgggtttttaaagtattaaagtgtcatcaatttataattaagggagggaatgttgacctaaagggrtcccttccttttgtcytgctaggtatagtttgttactttactctcttacagctgactsmwtggtggtttccttcttgatgtcctggagcagaggcaagaaaaactctttgaywagcttttagtggggaatgtagagaattttctcagttatttgcaaggaaatactcttttttaacaaatgccattcyaaagttcagatgttggattggctttaatgaggcttctgtttataggaaataatcttttgacctaagtcatgctttacaactttcttgtgttctaaaatgcgccaaatatgagtgagctaaggtatttatgtacgaacagtttttacataatgtttgacataaggaagtgaggtggtacataatgtttactcatttctgktctctgataccttacatcaacttcctccattttcccgcagcaagtgatttcaaactttaatttacataggactttctgtaagccattaagagatacgtgtgacatgtctagaaagatcgacagtgtagtcatctgtaaaacaacgatagagtttacttctcaattatgagagagaaaaattatcccctctccccatcgtcgwtttttttttagcaggagagtccgagatccctcattaggtggctcaggtggtttccatattatagcctaatagactgtatacasyatccaaaaaagtcacttccccaggatttattttttaaaaatttgggttattagttctggaagtcatcagtaaagactttttaaaaagatggcataggtttggcctggcctcttttgtcagtctagtccatacataagagagtctggttagttaattagaaattatgcttttgtctggtcacataaggaagtagaagaggaaaagacacattgactgtttatttccagtggttaagcctcagactcttgagctgcttgggctcgtctggggccagtctagtgagacagtctgacacctcagcagagaggggaaaatgtgtctgagcaacgagagtaaatactgtgggctttaggagatcggaagatagagatctaattgtgaggcagacttctcgtgggtcttcctgtctctgagaaagagatggggctacaagaacccagcgaaaaccgcatttcatgaattgaggaactggttttatctggggtttcttggaatttcccttcaggnctgngatgaggattgatccggggtgggtgggggggtgtttgggccc

SEQ ID NO: 2687 - DNA, 941 bp, Homo sapiens
  SITE (828): n equals a,t,g, or c
  SITE (836): n equals a,t,g, or c
  SITE (876): n equals a,t,g, or c
  SITE (915): n equals a,t,g, or c
  SITE (922): n equals a,t,g, or c
tcgacccacgcgtccgaacgcacgtgtctcttcatggaacagaactatgtgacgagtcctacccggctttactcactgacattcctgtgggagacttaaatccgggggaacagctggaaaaaatgttatacgttcgctgtggaacagtaggttcaagaatgtttctcgtgtatgtttcttacctgatcaatacaactattgaagacaaagaaattgtctgcaagtgtcacaaggatgaaaccgtaactatagaaactgtctttccattcgatgtcgcggttaaatttgtctctacaaagtttgagcacctggaaagggtctatgcggacatcccctttctgttgatgaccgaccttttaagtgcctcaccttgggccctcaccatcgtatccagtgagctccagcttgctccttccatgaccgcagtggaccagctagagtcccaagtggacaaagttgttttacagactggagaaagtgctagtgaatgcttttgtcttcggtgcccatctgctggaaatgttgaaggtggagtagcgactgggcattatatcatctcctggaagaggacgtcagccatgggaaatgtccctgtgatcagtactgtcatcactctgccacacgtgatcgtagaaaacattcctctccatgtgaacgcagatctgccatcgtttgggcgtgtcagagaatccttacctgtcaaatatcacctgcagaataagactaacttagttcaagatgtggagatttctgtggagcccagtgatgccttcatgttctcaggtcttaaacagattcgattacggatcctccccggcaccgaaacangaaatgtnatataacttctaccctctgatgggcgggtacaacagctgncgtctctccacgtcaacctgctgaagttcctcacttcancaatcanctgctcaggggtttcatac

SEQ ID NO: 2688 - DNA, 478 bp, Homo sapiens
tcgacccacgcgtccggaaagccttcaccagtgacaacaatgaatgtaatgaacctgaaaaaagcttcagtctggactctaccattgatacagatcagagagttcttagaattcagaatattgatgatactgataagtatgacatgggggtgaaccagaattcagctgctgggaaacaagaacaaataaatctcatacaggatgttcagagtagtgaatataaggaaagcttaatggatctctcccaccttagtaaatgtgacagcattcctgccactgagaaatcctataaatgtgatgcatgtgagaaggtcttccatcagagctctgccctttccagacatcagagaattcatactagagagaaaccgtacaagtgtaaagaatgtgagaaatctttcagtcagagttcaagtcttagtcgacataaaagaatacacactagagaaaaaccctataaatgtgaagcatctgataa

SEQ ID NO: 2689 - DNA, 447 bp, Homo sapiens
  SITE (390): n equals a,t,g, or c
  SITE (431): n equals a,t,g, or c
tacagtgattgtgggttgacctttgttaaacatcaaggaattcatctcagagaaaagccctatacgtgtaatgaatgtggcaaagacttcagactgaattcccatcttattcagcatcaaagaattcacacaggagagaaaccacatgaatgtaacgaatgtggaaaagcttttggtcmaacttcatgccttattcagcatcacaaaatccacgggcgagagaaatcctatgagtgtaacgaatatgacgaaagtttcaatcacggctcagatcttgttcttcagcaggaagtcctcaccagagaaaaagcctttgattgtgatgtatgggaaaagaacctcggtcagagagcacacctcgttcaacatcaaagaattcataccaaaganaaaccttatgaatgtgatgaacgtggagagacctttagtcnaattcaggcctccttc

SEQ ID NO: 2690 - DNA, 863 bp, Homo sapiens
  SITE (590): n equals a,t,g, or c
  SITE (849): n equals a,t,g, or c
ggcagagggtaaatgtccaagaaaaatatatctttttgttttatcagaaaatatacatgctatttgatcactcttcaggcattaacaaatggtgtctatgagaacattttaacaaaatgtcctttctactgttaatacccacagcaaccaacttggaaatcagtcatcatagaagatgactgcaggttctggctttcccaaatcaccaataattcacacctttgtacatggttctgtgcatgatctgttcctaatattatgcaacacttgtgaaatctttaggactttaagtaattcatcgttttgccccaaacctagacactactakmagawacccaacaggctactcttaccagcaataggggttcctgaacaatatcacggaacaatgagaaatcctgcactcatgaattctctttacaacccaggtgctcaagcatggtttttaagggtgactccctggccacctggtaagtctgagtgacttgcgggcagctgtctttctkgagcgggagttattcyctgaagccataaaagtgtcagggaaggctggatacacatcacgtatgtgcatgagaagtaatacttcnaacagcagcagcatcttccaagtgataaaaataactcagctttagtcagtagcccagaagccaagtgtcccctttcactgcttgttctctgttggtattcttcaaagggacatcgtgtctttcacagtttggaatgtgatgtttctgttctcactgacataactgtcttagtatctgctcctcctcttgtcatatatttggaaggtcttcacctcttgatcacttgcattttacattctacttgtctattgttcattcncacggcaagaaatg

SEQ ID NO: 2691 - DNA, 578 bp, Homo sapiens
  SITE (560): n equals a,t,g, or c
  SITE (569): n equals a,t,g, or c
  SITE (571): n equals a,t,g, or c
  SITE (578): n equals a,t,g, or c
tcgacccacgcgtccgtttgaattcagcagaaatgaagtggatgtcagaggatgacacatattcagagagtccatccgtccttatcttgtcctaccctccactcccttcctcctttcacccttctcctctctgtcctctttctcccttcccttctttccatcttccccactcctgcccttgtaagtttgccatgagcccctagataacttaggtctatttccttgacatttttggaaattgctgaggtttactggagaccacttgaagccatgccaactgcaaataataatcataataaaagtcacattatttttagaccttttgactttaccttcttctgactttccaattagaacagtaagttatagttagatcaacgattcatatattkaacaactgccaaaatcatttcctcaaaaagaggagaatcagagagttgggtttctagtatctcagaaagaatcatcatctcaaagattkgatgkaaaaagcttagckgtaacatataataatttggggkggaaaagcctaatatgaatggggaattagacctggtaanaggaacctngnataaagn

SEQ ID NO: 2692 - DNA, 462 bp, Homo sapiens
  SITE (455): n equals a,t,g, or c
cagatcctggtaagtcaggcagggaatgaggtgtggaccaaagtgttgagtactctggggttctcagggccatcacaagggcagaacaccaggttcaagcttctttcttcctagaaatgcccggaggctgagtgtttcaggctgcgctgtgagctcgggcccctgcaccaacaagagagccaaagtctgcagttgcatttccgagtctgggccaagactttcttgcagcgggagcaccagccatttagcctgcagtgtgaggctgtgtacaaagccctgaagatgccctaccgaatcctgcctcggcagctgccccaaaaagagcgtcaggtggccacagctgtgcaatggaccaaggcagaaggcagctatggcgtcccactgtggatcatcatcctagccatcctgtttggcctcctgctcctaggtctaatcatctacatcctctacaagcntggattg

SEQ ID NO: 2693 - DNA, 566 bp, Homo sapiens
  SITE (536): n equals a,t,g, or c
  SITE (542): n equals a,t,g, or c
  SITE (555): n equals a,t,g, or c
tagcttttaggtgacactatagaaggtacgcctgcaggtaccggtccggaattcccgggtcgacccacgcgtccgtgtaaatgaaatacttcttacgagtaatcgtttggaaaatgtgcagcataagatgttcaagggattggaaagcctcaaaactttgatgttgagaagcaatcgaataacctgtgtggggaatgacagtttcataggactcagttctgtgcgtttgctttctttgtatgataatcaaattactacagttgcaccaggggcatttgatactctccattctttatctactctaaacctcttggccaatccttttaactgtaactgctacctggcttggttgggagagtggctgagaaagaagagaattgtcacgggaaatcctagatgtcaaaaaccatacttcctgaaagaaatacccatccaggatgtggccattcaggacttcacttgtgatgacggaaatgatgacaatagttgctccccctttctcgctgcctactgaatgtacttgctttggatacagncttccnaatgtagcaacangggtttgaagg

SEQ ID NO: 2694 - DNA, 576 bp, Homo sapiens
  SITE (368): n equals a,t,g, or c
  SITE (477): n equals a,t,g, or c
  SITE (505): n equals a,t,g, or c
  SITE (521): n equals a,t,g, or c
gaattcggcacgagctccaaacctattgctcttgttttgtttttagtcctggaaaatactgtcatccactgacactctagccagaatcctgagaatcagcctagatgcctccctccccagtggactctttttccattcattcagctatgattgctacttcctaagtgtacctcgaaacctcccccttctctccatgtccaccagaatgatcctggcccaggctctcaccctttatctgctgcttgttgcatcagcctgtctcttcttgtccactatccacctctctgtaattcatcctctatgcaacagagaaaggggtcttctataagagatgcaaatatgatcakggcagtcacctatgcaatggntccccagtgccctgggtacaaagaccaaacttttaagcatgacatataagtcctttaggatttawtttcagtctgcctctgaacctctcaccttcttacttgggcctanttttttttttttctgcctggccagccgncccctctgggaaggangagtggggggtcagccccccggcccgggcaagccggcccatctgggggaggggta

SEQ ID NO: 2695 - DNA, 1973 bp, Homo sapiens
  SITE (4): n equals a,t,g, or c
  SITE (14): n equals a,t,g, or c
  SITE (25): n equals a,t,g, or c
  SITE (727): n equals a,t,g, or c
  SITE (1962): n equals a,t,g, or c
  SITE (1965): n equals a,t,g, or c
gtcntgtcctctgnttgaacccctnaccctctctgttggcacagtcatcttgtggaagttttgtgacctctcttttggtttcctgacccatgaaatgggtataataatacatacctcagagggttatttggagagtttaatgctttcatatagacatgcctgcttagtgcctgtacatgatagcttttcaaaaactgctcatcttcacagcctgtcttttttactccactgcttttattttatttcaagtactatacaaatattccaagtggatttttaaaagaatggataactaccagtatttccaacatcctaacctcaactatattctttttttctggggtctcttctagtacatattcacataaagccttaggaattgatcttataggaaatgcctgtaggcaaatatgctcatctctagactggaaattgaaccaaagtattttacaacgacactgtggctaaataagaaaacgtgtttaacagctgaaaacgtcatccaagagcatttagaggaaaaaagaaacagtcctttggccaggattatggcaaagcaaggtatgataatattaacggctgttaattactaagtgcctgatatttgtgccaaacattctttatattatttctttcatccttatagcacccacttagctatgcatctcttttcaaataatgktttcaaatgcataacaaaaaaaaatttcacaggaaaccaattagnttaaaacaacattttttataaaattgaaaaacatttgkgatatagtaacgtatgtgcctcattattaatgcattaaatttcaagatttatttcacaaagaaggggttcaagagcataagtacttttcatagaaccacatggtcaggaaggcttctgctcccaggtcttctacctgcatagtctgtcctcttacccccttatcctgctgcctgaagacacttagggagcttaagactcttagcctaagttcctgaaaacttctctcctggcttaaagtgaatgctgggtaatttatttagtctgctcggggtagtcattcattccaacatgattgtagtccaaggacctcccttcctttcagaacatttgtcacttgtcatgttgcatttaggacgccagaggaggcatscagtgaaatgaacaggaggcacttttgtgacaaatagacttcggaagccaaagctggaactggaaaagaccttgcagatcttcaatcctccttaaggtgcagcctgatggatttccagatccgtgacattttttaaacacttgatcacagcaaaaagaataaacactgatttaaaaggaagacgccgggcctaggtgtaagagagaatgttgccatttttatgtcatcttcacagggaaatagcagatttcatgaactcagactttggagaaaggctaatgtggatttaaattccaggtcatatacttacttgtgtggctttggacaatttactgtaaaatggaggtatatcacctacttcacaggattactgtgagaatgaaataaaagtgatgcgtgtaacacattgacacttggctggcgctccgtaaatgtgtgcacaatacaattcctttcactaaaccagtgatcctctgctttgcctgtttcttagaatcccctgtgtaccttttacaagttctaatgcccagacagcaccccggaccatcagactttttggggtgggagccacgcaacagtatttctccatatccagccaacgttgagcatccctggactagatgcaggctgagtgaggcccaggcacagagggcagcctgtctgcaagggctctgcaggaacacagctcaggacggcagcaggggtcagggcctggggcagtgtggacctctcagctcactccaagagctrcaggcargaccatccccagggcgtaactgagggcaaatcactctgagggcttttsttggccacagccctagtattnacnggggttct

SEQ ID NO: 2696 - DNA, 728 bp, Homo sapiens
  SITE (686): n equals a,t,g, or c
  SITE (698): n equals a,t,g, or c
atcccccgggcctggcaggaattcggcagagccaakcacggactctgtgcatagatgccttgtataggctccaagctgcaagcctcccacactgatggatttaaatttttattttacatcccagccaatcaggtgtctgactataacttgaagccaattagtatttttcacagagccaggtgcaaagctgccaggtaacatctgcaagtgacttgcattgctctaatgggatctgcatatgttcagctctgtatgaagatgtttttcacttgacatgaagtcatctttggtcttgttctccctcgactccattaagcagacacacctacgtgtgtggccaatttgatccactttcaaaggaggatggtgcctagtgtttcttttcatgatctattatttatgctgatgcctcttggaaaactgtatctacccatccaaagtgctttgagaggggaggggaaggggtgtggcaacacatctctcagttactatcaaggcattttctgataatacgtggcccaacctaaattatccaataaagatttacttgaggactttgtaaatttcttttaaaaaatatatctgatggaggcaatttttttctcaaagaacatacctgagttcctttaactttgaggaacaaagacgtgggttctagtctcctagttgcagctgatgagctatgnggctctaggcangacagcctttgctgagccactttgcatagg

SEQ ID NO: 2697 - DNA, 254 bp, Homo sapiens
  SITE (220): n equals a,t,g, or c
aggttctttctgatggtgaaaccatgtatttgccctctgtgctctgcttcctccttwgtcttagagcaggacaagctggggaaaggcattgtgtttggatgctggcctgcacctgagccttacttccctgtcctgacattctgtaaacagactgtggttcctgcmcaggccctggggctggggctctgatgcataaatcattggttctctctctctctgnacttcttaagtgaactcattccctgccccctggg

SEQ ID NO: 2698 - protein, 23 aa, Homo sapiens
  SITE (15): Xaa equals any of the naturally occurring L-amino acids
  SITE (16): Xaa equals any of the naturally occurring L-amino acids
  SITE (17): Xaa equals any of the naturally occurring L-amino acids
IRLGIQVGQPAEREXXXSTAMTH

SEQ ID NO: 2699 - protein, 41 aa, Homo sapiens
  SITE (1): Xaa equals any of the naturally occurring L-amino acids
  SITE (2): Xaa equals any of the naturally occurring L-amino acids
  SITE (35): Xaa equals any of the naturally occurring L-amino acids
XXLQWGQFLVSIEALLQDADAEHGLRAVTQVQVFXLCWLPY

SEQ ID NO: 2700 - protein, 137 aa, Homo sapiens
ADHAVDAHEQGHDGQQDDGEDGHHAQHIMLGVERQDSGAGLEVAQAVPAKDGQATEDQRDEPRGPDEQKHAAALVAAIQLDLGNGHVALNGDGQEAEDRGRERDEGRALPGKPLHRRQPQRDRAREQGIGYEGHACQ

SEQ ID NO: 2701 - protein, 118 aa, Homo sapiens
FGLDIGGTLVKLVYFEPKDITAEEEEEEVESLKSIRKYLTSNVAYGSTGIRDVHLELKDLTLCGRKGNLHFIRFPTHDMPAFIQMGRDKNFSSLHTVFCATGGGAYKFEQDFLTVCIF

SEQ ID NO: 2702 - protein, 71 aa, Homo sapiens
EQLIWANEPFPAPLCETSQKPLRALEELGKERGDRMIEESHPRESLQRRLWGQPRSVEEVPERQSEGLGTS

SEQ ID NO: 2703 - protein, 66 aa, Homo sapiens
  SITE (14): Xaa equals any of the naturally occurring L-amino acids
  SITE (53): Xaa equals any of the naturally occurring L-amino acids
LAYRCRICTPDLLXQNLGSFAVIDINIKCRWAEACLKSVVPNFFGTRDQFWEXNFSTDRVADDLQE

SEQ ID NO: 2704 - protein, 23 aa, Homo sapiens
  SITE (4): Xaa equals any of the naturally occurring L-amino acids
RDEXSQARGTDDPTHVCTAVAVL

SEQ ID NO: 2705 - protein, 117 aa, Homo sapiens
  SITE (73): Xaa equals any of the naturally occurring L-amino acids
QQSIFFGRQNQLFTADPYLTATHVQRQIANNQLTFALDYYGVVAGRGYGHVTLPAQKASPDSRRHRHPARRFXRSAYRERVRISTGQGIFFPAGYGRRKWQSHLRRVNPKIQLPPGC

SEQ ID NO: 2706 - protein, 19 aa, Homo sapiens
RLAGMAMTSATPSMRISEE

SEQ ID NO: 2707 - protein, 93 aa, Homo sapiens
  SITE (14): Xaa equals any of the naturally occurring L-amino acids
  SITE (72): Xaa equals any of the naturally occurring L-amino acids
  SITE (78): Xaa equals any of the naturally occurring L-amino acids
  SITE (79): Xaa equals any of the naturally occurring L-amino acids
  SITE (82): Xaa equals any of the naturally occurring L-amino acids
LTWPFPTHSNLTFXDSPHSALAMLNLLPASCICQEMVMLQGLWHLALPPPGMWFSQLCPWLLFSPPWGLGKXPFSETXXSNXSPSIGSLSEVL

SEQ ID NO: 2708 - protein, 44 aa, Homo sapiens
  SITE (13): Xaa equals any of the naturally occurring L-amino acids
HLLCTEIGFSYAXEKVEKILRLPEVATAGSSDFLRIPFQGKQKE

SEQ ID NO: 2709 - protein, 43 aa, Homo sapiens
  SITE (27): Xaa equals any of the naturally occurring L-amino acids
  SITE (28): Xaa equals any of the naturally occurring L-amino acids
  SITE (39): Xaa equals any of the naturally occurring L-amino acids
KLVVSFRTKGLRHTHTDPLIVSPRTSXXYNNLIAKNLLXIWNF

SEQ ID NO: 2710 - protein, 49 aa, Homo sapiens
  SITE (48): Xaa equals any of the naturally occurring L-amino acids
FQHFGRLRQVNHLMSGVRDQPGHHSETPSLLKMQKLTWHWGRPFVIPXT

SEQ ID NO: 2711 - protein, 42 aa, Homo sapiens
  SITE (22): Xaa equals any of the naturally occurring L-amino acids
AGCRIPVSKMGKLRYRKIDATXLHHSGCSGLKLFWLPGWLPN

SEQ ID NO: 2712 - protein, 46 aa, Homo sapiens
RLRFKKKKNRSPSPWQAHILADAWVDPGIPDRYLQAYQLWLYIEAP

SEQ ID NO: 2713 - protein, 105 aa, Homo sapiens
NLDKEILLRKELLEKIEKETLQVEEDRAKAEAVNKRLRKQLAEFRAPQVMTYVREKILNADLEKSIRMWERKVEIAEMSLKGHRKAWNRMKITNEQLQADYLAGK

SEQ ID NO: 2714 - protein, 62 aa, Homo sapiens
GYPPHGDVMRLKEENACKVLAQYLAVSICAIILIITILSRGLDSGPSSATVFPPWACLSFCL

SEQ ID NO: 2715 - protein, 61 aa, Homo sapiens
  SITE (50): Xaa equals any of the naturally occurring L-amino acids
  SITE (60): Xaa equals any of the naturally occurring L-amino acids
FGRAWSSAWSIVGTRFRENVCCQKADLCHLLSPQLLNHCQQCSGNQPVLXFCILGCNSGXL

SEQ ID NO: 2716 - protein, 61 aa, Homo sapiens
  SITE (37): Xaa equals any of the naturally occurring L-amino acids
GRLSAIVDVSAWKIHKHKYLQLPIHHHLAAPREPREXRFLWYFCSLPLVHSLHPQDDKKAD

SEQ ID NO: 2717 - protein, 140 aa, Homo sapiens
  SITE (13): Xaa equals any of the naturally occurring L-amino acids
VGGAAPAGSSYAXGGDSASGPELWISLEEHQDALELIMSKYRKQMLQLMVAKKAVDAEPVLKAHQSHSAEIESQIDRICEMGEVMRKAVQVDDDQFCKIQEKLAQLELENKELRELLSISSESLQARKENSMDTASQAIK

SEQ ID NO: 2718 - protein, 65 aa, Homo sapiens
  SITE (21): Xaa equals any of the naturally occurring L-amino acids
  SITE (43): Xaa equals any of the naturally occurring L-amino acids
WSHAFQAALLKDLSWPCSCKXSTCLDSPAKSLGLPQPFFWGTXSSASPAPLTFLGPVRVFCGAVL

SEQ ID NO: 2719 - protein, 108 aa, Homo sapiens
  SITE (107): Xaa equals any of the naturally occurring L-amino acids
NSAELASVHSTPCSLHLFLLLPPRFFFFPWLSSSCPASVHSRVDQKLGLRITSLTEVRGKGREQPLAEQGRGTLFSKVVKKQEGGPVLSRVSHPGEHFTTALLPFNXK

SEQ ID NO: 2720 - protein, 66 aa, Homo sapiens
  SITE (24): Xaa equals any of the naturally occurring L-amino acids
  SITE (33): Xaa equals any of the naturally occurring L-amino acids
  SITE (59): Xaa equals any of the naturally occurring L-amino acids
  SITE (62): Xaa equals any of the naturally occurring L-amino acids
ITSCSARYIRQSDQSFWKGMGICXNQVLTCPIXKISAIDYSLNINGGLQSHCYRRRRGXRNXGSLY

SEQ ID NO: 2721 - protein, 147 aa, Homo sapiens
  SITE (3): Xaa equals any of the naturally occurring L-amino acids
YPXANRTHVTCVSCRPQHSATLQPWELRPRNPRGQHGQQHRQPPSQGQGVQPAPQPGAYGELKSSPTRTQTPPWVDSNRKGGRRPGSDLLLDELSWPVCPAWTPEPTRLLRPLQPGPALLSLATRDCSPQPLEGLGRKVEEPAKDLI

SEQ ID NO: 2722 - protein, 42 aa, Homo sapiens
  SITE (25): Xaa equals any of the naturally occurring L-amino acids
EMKEYPGRGEISSIWETLGRLPGVXTFGHLSRVGGEYVGMAS

SEQ ID NO: 2723 - protein, 115 aa, Homo sapiens
  SITE (18): Xaa equals any of the naturally occurring L-amino acids
  SITE (30): Xaa equals any of the naturally occurring L-amino acids
  SITE (74): Xaa equals any of the naturally occurring L-amino acids
  SITE (87): Xaa equals any of the naturally occurring L-amino acids
  SITE (96): Xaa equals any of the naturally occurring L-amino acids
  SITE (101): Xaa equals any of the naturally occurring L-amino acids
TKHSTPQAAFPHCALHMXSCCCRLHPSQWXPRQHSQTALTSSPAEGPTSGGQKILEETLALDIPEVNSTFLDLXVGWWNLPFRPFHXLRCSTPFWXVPQFXQTQIQVHGTILLKA

SEQ ID NO: 2724 - protein, 44 aa, Homo sapiens
  SITE (14): Xaa equals any of the naturally occurring L-amino acids
  SITE (41): Xaa equals any of the naturally occurring L-amino acids
  SITE (43): Xaa equals any of the naturally occurring L-amino acids
WLMHDPAYPESLPXAPLVRYTYTEAGELLAVYDRSNYAVRXFXV

SEQ ID NO: 2725 - protein, 46 aa, Homo sapiens
  SITE (12): Xaa equals any of the naturally occurring L-amino acids
  SITE (31): Xaa equals any of the naturally occurring L-amino acids
RHWLGVTRFPGXTPPKNSYYLQSHIRSKYHXLTGGYAGEDIAHDTI

SEQ ID NO: 2726 - protein, 73 aa, Homo sapiens
  SITE (36): Xaa equals any of the naturally occurring L-amino acids
EALWVKAWRQESEGQFQETQFINFHQHLPGPCLVLXNPALNLTSFSLSEHRMQGIQEWVNRREAGSRRPLRTR

SEQ ID NO: 2727 - protein, 100 aa, Homo sapiens
  SITE (65): Xaa equals any of the naturally occurring L-amino acids
  SITE (68): Xaa equals any of the naturally occurring L-amino acids
AAESSAEALARGGNLQALQKKEIEDLYSRLGKQPPPGIVAPAAMLSSRQRRLSKGSFPTSRRNSXQRXEPPGPVNSEQKPCISPTPGPTMELVFSESDAF

SEQ ID NO: 2728 - protein, 108 aa, Homo sapiens
  SITE (31): Xaa equals any of the naturally occurring L-amino acids
  SITE (32): Xaa equals any of the naturally occurring L-amino acids
  SITE (72): Xaa equals any of the naturally occurring L-amino acids
  SITE (74): Xaa equals any of the naturally occurring L-amino acids
  SITE (97): Xaa equals any of the naturally occurring L-amino acids
TMRPRSGVLDGFSTVPETGVEGTDGGHHRPXXSASSQGGWASCSQGSHLGEGAQSPFRNQRCRLSLRLSGCXAXSWLSLPAPAVPARAQRTMGLSPXSIGPRPGQQCF

SEQ ID NO: 2729 - protein, 82 aa, Homo sapiens
  SITE (70): Xaa equals any of the naturally occurring L-amino acids
  SITE (79): Xaa equals any of the naturally occurring L-amino acids
  SITE (80): Xaa equals any of the naturally occurring L-amino acids
PYIHLPPAQTLLQTLEKEVARVPSCTASSTPVLERLSRGPSNPLTFGTCPDSLASFYNLSFSATPRWAGXTGAWGLWDXXTP

SEQ ID NO: 2730 - protein, 91 aa, Homo sapiens
AAPTFTGLGVLNPWSHGQSCAQASSFAGPETFTTAQTLLHGPGREGVLPATVHSPSLSLPGDQAQTSQGTEQSQLAPDPAEQPPGNLLTYA

SEQ ID NO: 2731 - protein, 86 aa, Homo sapiens
VHSDWTVNFAPFPFLAAHVACLGKVCIGHCSEAELLSPGCADVNLQWVPSGAIQKGQAFTCCHLWTLQTCRGGRPRALSLAAVWTE

SEQ ID NO: 2732 - protein, 191 aa, Homo sapiens
KASWMEVVQVLTKPAGNPSCMYPQGTFVIPLLVTAHRDPTQFKDPDCFNPTNFLDKGKFQGNDAFMPFASGAGRGGRGPAWTGSGVPGAHCAPVYPAKQMCLGTGLAHSGIFLFLTATLQRFCLLPVVRPGTINLTCSALAWAVSPQTSSSSQWPAEVRLHYGGLTGPQTSIPSSVNKGPKLQKKKKKKKK

SEQ ID NO: 2733 - protein, 27 aa, Homo sapiens
  SITE (2): Xaa equals any of the naturally occurring L-amino acids
PXFQIVKSLILLVLIDKWKLNSRCTWA

SEQ ID NO: 2734 - protein, 174 aa, Homo sapiens
GHEHHQGRVVGTGCVQGQREPERQVPQVPRKQLLGGAAVQGDQVLIHLLCPNPGHADGASQPHGHLPGLRSRGSVLLQCKRWVPPAHLLPGHLPRPPAAFLLPGGSEVWSDGHLHSDHVGERIDTDRGTRALLLALQKVWAFCLLQATCQGSLASRWQPLDTQGGFSNSKYNCD

SEQ ID NO: 2735 - protein, 110 aa, Homo sapiens
  SITE (99): Xaa equals any of the naturally occurring L-amino acids
AAGRTRPQSHGQEATRSLFPRGRALTCFQVPPVSALLRSPWSILSLAGPDPHSSPPAGARPPHSAVRALRSAAPPPIPLSGTQERGPPPIPPFHRQGTXERGGRVGSTVI

SEQ ID NO: 2736 - protein, 62 aa, Homo sapiens
  SITE (2): Xaa equals any of the naturally occurring L-amino acids
  SITE (23): Xaa equals any of the naturally occurring L-amino acids
  SITE (25): Xaa equals any of the naturally occurring L-amino acids
RXQKLELHRGGGRSRTSGSPGLXFXLRMATKNMRDMPAILAVKYIRQMVTGGAFAEANKGRS

SEQ ID NO: 2737 - protein, 119 aa, Homo sapiens
  SITE (103): Xaa equals any of the naturally occurring L-amino acids
QLFGGTRGLCVFREVRRGGCRERVHPEKSHPHSLARMADGTSDAQRSGNSRTVAEARLLCFSRSRLCAWGLHRPTLAAAAAALLAQEAIRMKQENRSNPGDGXCSEPRSCHCIPAWATE

SEQ ID NO: 2738 - protein, 89 aa, Homo sapiens
KAAASDCWSRSGALSGGSSASRPRTTASWSAWRSRLSPTAPAASGSSPAPSTSPSPSSLPSMNTCRVTAATVKTEHCHQPPKFYHAFCS

SEQ ID NO: 2739 - protein, 80 aa, Homo sapiens
AYSYLDKAGVSARGAAWNTCPFGVVPAERMWASWRAGPGGMPPSHPPTPIILTLACQGCEGRAFRGYPPWEARAEGVRTH

SEQ ID NO: 2740 - protein, 137 aa, Homo sapiens
NGGGVLPLTPRLTLPQHTTHTHTQSNKFLSLKCGRGGPSLSLVGGVVRGRSQGWGRGSETVWGGEVCKSSNSGANGGSSQPTRRAGREGSRGPFPKPPPRPPWVHEPPNAEAAACHPPLPKEKVSCPLPTHPHSPPK

SEQ ID NO: 2741 - protein, 135 aa, Homo sapiens
  SITE (81): Xaa equals any of the naturally occurring L-amino acids
  SITE (125): Xaa equals any of the naturally occurring L-amino acids
  SITE (135): Xaa equals any of the naturally occurring L-amino acids
PVPGSLSLGSTEAPALFHFLLHSCRLCGQLRGDESGSRRNATTSGSSWRPGSSPKTGAQIREARRSSSRGTEDWGQEEVLXTQAFMPPDPKADPSHTLRYPSPYPLVRMCWPRPDKTPCKMACLXQPWDLGPRRX

SEQ ID NO: 2742 - protein, 92 aa, Homo sapiens
  SITE (6): Xaa equals any of the naturally occurring L-amino acids
RPLRLXGYSSYRFSECKGPPFPVPHGLYEITGMSHRAQPMGLLITGALGEVAAPWLVDSRMGLGGCGRPLFEESRQIALSPCCIPTPCLQKL

SEQ ID NO: 2743 - protein, 123 aa, Homo sapiens
  SITE (10): Xaa equals any of the naturally occurring L-amino acids
  SITE (23): Xaa equals any of the naturally occurring L-amino acids
MSIVSLNYCXLHWVPERGMAAAXIPHPIPSLISSLIPSPIPSLTPSPIPSLIPIPHTHPPSHPPSPEPGSSCFNRPLGPLMPPRHSHCPLAAGHPTEPLPTPKSASNRPFAWVRRGSGWPRWG

SEQ ID NO: 2744 - protein, 73 aa, Homo sapiens
GEVFCHPCCPESPCRVSIVPRGITRTQKSTAPKVTLSVVRAAAYDVAPAHRGVLGVTRKTPHESRSREKARGW

SEQ ID NO: 2745 - protein, 61 aa, Homo sapiens
GVNHCPQQRYSSVLRKKARPGAVAHACNPNTFGGQEVDTILDNMVNPVSTKNTKISWASCL

SEQ ID NO: 2746 - protein, 87 aa, Homo sapiens
SELLTPKCFGLKLGQLGGESGCCVAEPLAFGSPVDLNHVPARLDDWQTIPLGDLLIPGEDPGGAPALWGPSPLCVSVSHEVTWLPCW

SEQ ID NO: 2747 - protein, 68 aa, Homo sapiens
  SITE (27): Xaa equals any of the naturally occurring L-amino acids
TAVAAALELVDSPGSSYCRGYKPPDRXEYRHRVPERVFRYNRGWHLVQKRGYACSYQNLTLWAENPAE

SEQ ID NO: 2748 - protein, 103 aa, Homo sapiens
  SITE (40): Xaa equals any of the naturally occurring L-amino acids
  SITE (52): Xaa equals any of the naturally occurring L-amino acids
  SITE (91): Xaa equals any of the naturally occurring L-amino acids
  SITE (103): Xaa equals any of the naturally occurring L-amino acids
AQMPSRDNVTASQRPGSRTQRPLGGSRGQPWPSSSRGQPXDADHTLPPGPIXGAEAGGAGAQLQDHGIGKAGAWGHAALHWGPLHPRRLTXCHLELSQPGSAX

SEQ ID NO: 2749 - protein, 137 aa, Homo sapiens
  SITE (129): Xaa equals any of the naturally occurring L-amino acids
GCLRPQRNGHWLEPRNEPSTLKSLGCLEDDWPKSRIPCLTGRKSQPSPRARPSSSSYFPLTESSSNPCSDGGGRSSHFLSRTPERAVCLCFSPGWRGWGRGREAGAMSVLKEGEAVGDCRGRLRENLLXGQGFPFPL

SEQ ID NO: 2750 - protein, 91 aa, Homo sapiens
  SITE (87): Xaa equals any of the naturally occurring L-amino acids
VGTLCGGERLWAGVECGTQVLGDPPGGLPRASSCGLGEPVTRAALLQKGPSDHSVGVGLGYVDSWAFPYPELDSEEPRSLVLTGFLXQKAA

SEQ ID NO: 2751 - protein, 183 aa, Homo sapiens
  SITE (35): Xaa equals any of the naturally occurring L-amino acids
  SITE (87): Xaa equals any of the naturally occurring L-amino acids
SEAGRRAVTCVTAGTAGQPTAGQPAGTPSWPQSWXGEGSVSDSGESSCLHGQGPPVSGLTFSTVFDFSSARGGKVAFPEAQVGRVSXALDSLCLSQASQQGWLSPLWRGDPRNRPPPSAIASQGPCFSGPGSVGAQGMVGLPSFWKSPEWHVGSCVKRPPRSSSSLACSSSLRPLLPPLPTFG

SEQ ID NO: 2752 - protein, 193 aa, Homo sapiens
TSGSPGLQEFGTSLAQLRGVLMSMEPRRLEPAHLAQLLLFAPDADEEQRYQAFREAPGRLSEPDQFVLQMLSVPEYKTRLRSLHFQATLQEKTEEIRGSLECLRQASLELKNSRKLAKILEFVLAMGNYLNDGQPKTNKTTGFKINFLTELNSTKTVDGKSTFLHILAKSLSQHFPELLGFAQDLPTVPLAAK

SEQ ID NO: 2753 - protein, 46 aa, Homo sapiens
QLRAPTVSPRNPTPCPEQQLKAALMFSSTRVKATESFNFKTGLFSV

SEQ ID NO: 2754 - protein, 62 aa, Homo sapiens
  SITE (12): Xaa equals any of the naturally occurring L-amino acids
TKFKSVLCCRTXQSLEYVYVCQEFFKRLGFSKTHLTIHFFFTESEQPGTMWGFTLGCAVSKG

SEQ ID NO: 2755 - protein, 77 aa, Homo sapiens
  SITE (22): Xaa equals any of the naturally occurring L-amino acids
  SITE (24): Xaa equals any of the naturally occurring L-amino acids
EFGTVKEKELALPQLVSQAGGXWXGLRQVLGLANLGEMPDDIALLVLSRNLAWNPGISPGRIQFAEQDGNLRPEVCR

SEQ ID NO: 2756 - protein, 60 aa, Homo sapiens
  SITE (38): Xaa equals any of the naturally occurring L-amino acids
IPNSSMPRYPRTSTSVRHIQKNITSPNDLNKLPGTNPXGNRDVDLFRQIQNSEETQRNSG

SEQ ID NO: 2757 - protein, 75 aa, Homo sapiens
IRQSSVSKMSLSIQSFQLQAGSTPDSPSLPLPTANLLPHPICLPSNRSLVTDLSSLDPSASFCLLFPKVRHICHW

SEQ ID NO: 2758 - protein, 29 aa, Homo sapiens
AEFEMLLGHRDALLSFVTAIRTLSSFILG

SEQ ID NO: 2759 - protein, 52 aa, Homo sapiens
  SITE (32): Xaa equals any of the naturally occurring L-amino acids
KECWPVLNMLEKSLPGHRDTATQIQHVSPMCXVEPPAKKAATLAEGDKDNDI

SEQ ID NO: 2760 - protein, 60 aa, Homo sapiens
NQASGCPEGISQWFTLMVYPLQKSYSYRLCYDLSIYRLKVWREVCYGQLTNRTFKPDLQI

SEQ ID NO: 2761 - protein, 110 aa, Homo sapiens
  SITE (57): Xaa equals any of the naturally occurring L-amino acids
  SITE (91): Xaa equals any of the naturally occurring L-amino acids
  SITE (100): Xaa equals any of the naturally occurring L-amino acids
GSTHASGFPNSMFNSDKFQFHRGYEKEKKSTARIQQRRIHFTFVLIKNIFQFMIKSXIILLKTGPNYFQPDTVQTLTFSIKSIPDSYFVKXKAHLASISXVVKIKATGLG

SEQ ID NO: 2762 - protein, 40 aa, Homo sapiens
SHSQTDQGPRSRVISNTPHTASKVFSFQLLNYLRKKKIIH

SEQ ID NO: 2763 - protein, 62 aa, Homo sapiens
  SITE (51): Xaa equals any of the naturally occurring L-amino acids
  SITE (52): Xaa equals any of the naturally occurring L-amino acids
  SITE (60): Xaa equals any of the naturally occurring L-amino acids
LIPQLRFSPGVSLTCFQCLLWAVSICDSTFPRGRFLPKAGCIYCQSWAVAXXVFEHIIKXTF

SEQ ID NO: 2764 - protein, 117 aa, Homo sapiens
  SITE (46): Xaa equals any of the naturally occurring L-amino acids
  SITE (47): Xaa equals any of the naturally occurring L-amino acids
PTRPAVPTFRRMVALGSPPALLAISKAPPPPPAVSTKPLGGAARDXXGRASNRLTDFRPHYCSSQWEPRRGAEEAGPAGKPGQRREALLPPLRLIPASAASAFPSEPCGRFRGIPSF

SEQ ID NO: 2765 - protein, 91 aa, Homo sapiens
  SITE (81): Xaa equals any of the naturally occurring L-amino acids
SFVRRSEIKATWCRPVPACLSAHLLRLFLELSLRVFNCAVTFSSLPAAITTPPYSLPSHLLDVPAQALTGGPFPLFWQMGXGQHHDGKPRL

SEQ ID NO: 2766 - protein, 68 aa, Homo sapiens
SFKTQMSVPVILALPTSFSVLPSYTLYILLLLQLSHYVIVTFLSPLFDCKQRLFFKEVTIVFISLPQL

SEQ ID NO: 2767 - protein, 113 aa, Homo sapiens
  SITE (5): Xaa equals any of the naturally occurring L-amino acids
  SITE (58): Xaa equals any of the naturally occurring L-amino acids
  SITE (96): Xaa equals any of the naturally occurring L-amino acids
  SITE (102): Xaa equals any of the naturally occurring L-amino acids
GPQRXALCAGAGALPLRRGAPRALGQVQQGGLGQALGVGTALGLLSPASCSPQRVLLXTSAPAAKATNVEAIRSQGLQVHDISRKSSSRPLLSRIXYTRVSXTSDPQSLANGK

SEQ ID NO: 2768 - protein, 41 aa, Homo sapiens
MEGMLCFSVCPLFLFLKPGRQEWKLCLKKKKKKFSEIHLYI

SEQ ID NO: 2769 - protein, 94 aa, Homo sapiens
LGWNPCPWCHHCSFITVGSSESDFMAQCLGLPKCWNCRHEPARLAYILIYIQSRLCSKTIGLEDRLVTQFMMGFTKGLVLRFEMAFVIGLVMGS

SEQ ID NO: 2770 - protein, 41 aa, Homo sapiens
  SITE (7): Xaa equals any of the naturally occurring L-amino acids
  SITE (13): Xaa equals any of the naturally occurring L-amino acids
TLWKPHXCWYRSXIPGSTHASVDQTKVTKPTLRPCSLVACE

SEQ ID NO: 2771 - protein, 60 aa, Homo sapiens
TRPFKVKSLLISVFPSAMFPALSGVQNMWTARFSKGGPCHVNATEKLGLHIEGPRELLKV

SEQ ID NO: 2772 - protein, 33 aa, Homo sapiens
  SITE (29): Xaa equals any of the naturally occurring L-amino acids
HSLNGTPMKQELNINPLCYKKKKKKKKKXKKKK

SEQ ID NO: 2773 - protein, 300 aa, Homo sapiens
  SITE (40): Xaa equals any of the naturally occurring L-amino acids
  SITE (73): Xaa equals any of the naturally occurring L-amino acids
  SITE (77): Xaa equals any of the naturally occurring L-amino acids
  SITE (194): Xaa equals any of the naturally occurring L-amino acids
  SITE (206): Xaa equals any of the naturally occurring L-amino acids
  SITE (274): Xaa equals any of the naturally occurring L-amino acids
ITPALATPASPPTESQAGPRNQGQTAGRARGGAPPHAGEXEMAQPADSESGLSLLCKITFKSRPSLAPPAASXSLAXKASLGGGGGGGLFAASGAISYAEVLKQGPLPPGAARPLGEVSRGAQEAEGGDGDGEGCSGPPSAPASQARALPPPPYTTFPGSKPKFDWVSAPDGPERHFRFNGAGGGIGAPRRRAXALSGPWGSPPPXPEQIHSAPGPRRPAPALLAPLRSSSQHPPMASPCARGLQACRSYHRCHRPHRRPHCSHQRSSQRRCRXLPRSPRVWATRSQPWLPPQPLLCPQP

SEQ ID NO: 2774 - protein, 61 aa, Homo sapiens
  SITE (2): Xaa equals any of the naturally occurring L-amino acids
LXTPPGTGPQFPGRPTRPPVLKKHYGNHIYQIAFSLLPAIIIIIIIYIYISLNDLFLKYLN

SEQ ID NO: 2775 - protein, 64 aa, Homo sapiens
  SITE (35): Xaa equals any of the naturally occurring L-amino acids
  SITE (39): Xaa equals any of the naturally occurring L-amino acids
  SITE (57): Xaa equals any of the naturally occurring L-amino acids
  SITE (59): Xaa equals any of the naturally occurring L-amino acids
KKCFICEICDAIALFVTIISCNKQLGWAKNSSMRXPRWXIIQPASRKRFRSPTFHRXRXWNRIS

SEQ ID NO: 2776 - protein, 44 aa, Homo sapiens
CEQWKFKGTPSPALLNLGTQPKKDKKLEDSIATQLRELPEKNSN

SEQ ID NO: 2777 - protein, 122 aa, Homo sapiens
NYCLFCFVLNNTETVLPLKSLVSSHTNPGLPGSEVPPSLPALSHLLNPNQKHPWAFCSRVCPCKLSVFEVCGPPSDLNGCTSLLQFGSHSTSAFPSCHRFFPLGFHVWGLRATSASPTSMGR

SEQ ID NO: 2778 - protein, 106 aa, Homo sapiens
  SITE (50): Xaa equals any of the naturally occurring L-amino acids
GGKVRASAVAKCPLPLKAHLRLRFRTARGQRQVAKQGGRRTLPPSLRMPXGPELHLASQFVNEACRALVFGGCVEKSSVSRNPEVPFESSAYRISASARGKELRLI

SEQ ID NO: 2779 - protein, 90 aa, Homo sapiens
  SITE (35): Xaa equals any of the naturally occurring L-amino acids
DPRAGGSSSRRPGKRFRSPTFHRRRRWNRNLVMAXWASLGRSFRTPESRSEELVKKAIEGDALRNRERRYRKARGSGQPIRRQALQQYHG

SEQ ID NO: 2780 - protein, 103 aa, Homo sapiens
  SITE (3): Xaa equals any of the naturally occurring L-amino acids
  SITE (98): Xaa equals any of the naturally occurring L-amino acids
ELXLRCDPGSVTASKRNEGHLSHRPPPGVGKATDRSSCRAALKALDSAVVEITGTRKTCRSSNSYLVGWRPEAKNNRNTLPAPIRWMGNECNSLGKIXDFQIT

SEQ ID NO: 2781 - protein, 104 aa, Homo sapiens
AQSFAASAMAEVEETLKRIQSHKGVIGTMVVNAEGIPIRTTLDNSTTVQYAGLLHHLTMKAKSTVRDIDPQNDLTFLRIRSKKHEIMVAPDKEYLLIVIQNPCE

SEQ ID NO: 2782 - protein, 107 aa, Homo sapiens
RAPPPATLRMMTNECALFVWGMCPPLEDRRASHSRRGGCGCGSQSPGCGKSELMCQAWLAFNFKKLLLGRARWLMPVIPALWEAEVGGSRGQEIETILANTVKPCLY

SEQ ID NO: 2783 - protein, 71 aa, Homo sapiens
  SITE (52): Xaa equals any of the naturally occurring L-amino acids
GAGAGPCGRVEARPKPGLSRVPALRQRSACSRSSASSAWCPWGCRAPSPSTXTCTATVCPKVPTESGDPVR

SEQ ID NO: 2784 - protein, 43 aa, Homo sapiens
  SITE (21): Xaa equals any of the naturally occurring L-amino acids
  SITE (37): Xaa equals any of the naturally occurring L-amino acids
GRPGTRGSMEPRAGCRLPVRXSRSCNGALVVTVRPLXPTPVGS

SEQ ID NO: 2785 - protein, 151 aa, Homo sapiens
GRGAPGSAVGGGPRAGDRSGQLAPESWTSPGPSSTTPTPSPDPPAGASVCRGSEGVGLLGMAVPPSAPQPRASFHLRRHTPCPQCSWGMEEKAAASASCREPPGPPRAAAVAYFGISVDPDDILPGALRLIQELRPLLEDPSLRTRAMRSQ

SEQ ID NO: 2786 - protein, 125 aa, Homo sapiens
QASLRQSQFKSMNHLTKSGIIKDKALLPKGNYHLVKNYAFHLLSYRLQVSPRSSSQALGEYSCEIYLQLESSYSNQKLLLLSLQYCICTVCIPLGPYCYFCFPLLHRFCVALFLQRGVVEPWLYE

SEQ ID NO: 2787 - protein, 59 aa, Homo sapiens
RPWRTTDQQPLTFTPLDGGRITRQRGTMGRRQNGCLYSCSKMWKHWFPRHLHCLPALGA

SEQ ID NO: 2788 - protein, 22 aa, Homo sapiens
LVLNTFLRYYAKENKNCFIEVS

SEQ ID NO: 2789 - protein, 128 aa, Homo sapiens
ITLLLSVSIFTLSPETGFPAWPSVPIPLPMTAQWLHRAWSSKEDGLKMSDLCEEPSCSKSSHPSGPDLWFSLIYCSYNPEALDLFGGSQKGISCLPINNQRYVYICLSINMYGLFICSFFQQMQLSFY

SEQ ID NO: 2790 - protein, 67 aa, Homo sapiens
  SITE (9): Xaa equals any of the naturally occurring L-amino acids
  SITE (63): Xaa equals any of the naturally occurring L-amino acids
LNFPRSLIXLLVVVLLFIFLIICMHEHPLSISHSHVFIQSFVYSYPLHGLMIHTLCTFLLADXPFSY

SEQ ID NO: 2791 - protein, 157 aa, Homo sapiens
VVLAATTTVIPPGIGRYTVSSDSWSQLCCPDLLKPGVQAPSTSCQFIQNSIPHLEGLSEADLPNPWISGKLRRLERAKDLSLSKEEAKDLEGREGCNQNLRHLRLPKLPSKVPSRAWNTLSDRGKSPILPQCCPSKWTPKSWPSLPAQISPSSCSPN

SEQ ID NO: 2792 - protein, 168 aa, Homo sapiens
AGFPLPQPACRLCLLCPRPSWLLLTGPVFPTGWFPAKFVEVLDERSKEYSIAGDDSVTEGVTDLVRGTLCPALKALFEHGLKKPSLLGGACHPWLFIEEAAGREVERDFASVYSRLVLCKTFRLDEDGKVLTPEELLYRAVQSVNVTHDAVHAQMDVKLRSLICVGLK

SEQ ID NO: 2793 - protein, 109 aa, Homo sapiens
  SITE (20): Xaa equals any of the naturally occurring L-amino acids
  SITE (102): Xaa equals any of the naturally occurring L-amino acids
  SITE (103): Xaa equals any of the naturally occurring L-amino acids
FPSTARLEGLGGRSSSSAPXEGCRDGSSPLGILVGGDGCVKYEGWIRETKAALESGRRFWKAPWRRWHLSGAGKGKVVVRAALWSPCFTPQPRPSNSLGQVXXFLYVSV

SEQ ID NO: 2794 - protein, 92 aa, Homo sapiens
FTTIHFINQNCIACDSFGFQSSQKYYFVACTVCLEATNYILNMVLLCLTQRETLYRMYVMGWGNRVFTALLGDGTQSMSQNISVLNYPTKEI

SEQ ID NO: 2795 - protein, 91 aa, Homo sapiens
GSVPATPASAFCGARTTSVSVSARRHGAVGFELMLFLSTLLFQCFIELVSTAEKPRLKEGLIHEQDTVAQFGPQKEPVRQQIHRMFLLRVK

SEQ ID NO: 2796 - protein, 81 aa, Homo sapiens
  SITE (3): Xaa equals any of the naturally occurring L-amino acids
  SITE (7): Xaa equals any of the naturally occurring L-amino acids
  SITE (58): Xaa equals any of the naturally occurring L-amino acids
PLXQSFXVILSVLGHRKQTLFFSCPSFTCPRQDSNLSWTFQWLVLRPFPERSHPIPRXKECLRYKAFIKTQADRVQGALGY

SEQ ID NO: 2797 - protein, 73 aa, Homo sapiens
KYCPAKQIIDLFSKLLIFWKVYIEYPQISSALLLISYFHETFSPNNLSSLFNQCFTTLLSLKKYLFLHLTMWK

SEQ ID NO: 2798 - protein, 90 aa, Homo sapiens
  SITE (12): Xaa equals any of the naturally occurring L-amino acids
  SITE (89): Xaa equals any of the naturally occurring L-amino acids
SKLSPGLGSPIXGLSKLTPDRKPSRGRLPSKTKKEFICSFAGRHFTKSYNLLIHERTHTDERPYTCDICHKAFPALPFTTHLFHPKQGXI

SEQ ID NO: 2799 - protein, 120 aa, Homo sapiens
  SITE (62): Xaa equals any of the naturally occurring L-amino acids
  SITE (67): Xaa equals any of the naturally occurring L-amino acids
  SITE (74): Xaa equals any of the naturally occurring L-amino acids
  SITE (95): Xaa equals any of the naturally occurring L-amino acids
  SITE (102): Xaa equals any of the naturally occurring L-amino acids
  SITE (120): Xaa equals any of the naturally occurring L-amino acids
DFVLVYEDESRKETNKKGTNEKQRVSFYAIFLSFYFLYCNMKKLLFCISNKVKLMLKYHTQXSFIFXLLMFSQXILTKRFLNMNQKLPQALNLIXFHSWKQXFFPGIGTFYCTGGVYLRX

SEQ ID NO: 2800 - protein, 40 aa, Homo sapiens
MLPPLSMALYNHIPSAVKIEKKMQIEMCIIGTHRNTEPVT

SEQ ID NO: 2801 - protein, 36 aa, Homo sapiens
  SITE (29): Xaa equals any of the naturally occurring L-amino acids
MITTICFKVSLWKYSYSVHRLCCHVCSCXNIVRYTS

SEQ ID NO: 2802 - protein, 51 aa, Homo sapiens
  SITE (6): Xaa equals any of the naturally occurring L-amino acids
  SITE (11): Xaa equals any of the naturally occurring L-amino acids
  SITE (24): Xaa equals any of the naturally occurring L-amino acids
CGTPDXSPLVXLLWPPVLRVVCRXPSVLTSKPGTVEIGHCQVLGVFVAIGK

SEQ ID NO: 2803 - protein, 50 aa, Homo sapiens
  SITE (20): Xaa equals any of the naturally occurring L-amino acids
  SITE (24): Xaa equals any of the naturally occurring L-amino acids
NEEPWSNFIQTDCISSTGEXKSEXFVFYIYFLNKLLKVSSFTLKFEKHCH

SEQ ID NO: 2804 - protein, 78 aa, Homo sapiens
  SITE (12): Xaa equals any of the naturally occurring L-amino acids
  SITE (15): Xaa equals any of the naturally occurring L-amino acids
  SITE (21): Xaa equals any of the naturally occurring L-amino acids
  SITE (27): Xaa equals any of the naturally occurring L-amino acids
  SITE (36): Xaa equals any of the naturally occurring L-amino acids
  SITE (43): Xaa equals any of the naturally occurring L-amino acids
  SITE (47): Xaa equals any of the naturally occurring L-amino acids
  SITE (56): Xaa equals any of the naturally occurring L-amino acids
  SITE (57): Xaa equals any of the naturally occurring L-amino acids
  SITE (75): Xaa equals any of the naturally occurring L-amino acids
FCHFSVEKTNLXTLXQNDRDXSVIKLXYFDSQPLLXVFNLVTXFKLXKICLLCWFXXLDWEFPPYLSFFWGGPWXWMV

SEQ ID NO: 2805 - protein, 125 aa, Homo sapiens
  SITE (99): Xaa equals any of the naturally occurring L-amino acids
  SITE (108): Xaa equals any of the naturally occurring L-amino acids
  SITE (122): Xaa equals any of the naturally occurring L-amino acids
  SITE (125): Xaa equals any of the naturally occurring L-amino acids
TKHPALEELPSVPKASVSVDLSDWLVGLLRSQLQASSLGFRLKLFLSQPPVSQELWPLKILGTCLGSHKHFSQSESAQSMGFLPFVKPENQRREHGIVXLLKAGKVWXSKHCYLLVRARVLXIFX

SEQ ID NO: 2806 - protein, 117 aa, Homo sapiens
  SITE (30): Xaa equals any of the naturally occurring L-amino acids
  SITE (33): Xaa equals any of the naturally occurring L-amino acids
  SITE (36): Xaa equals any of the naturally occurring L-amino acids
  SITE (41): Xaa equals any of the naturally occurring L-amino acids
  SITE (43): Xaa equals any of the naturally occurring L-amino acids
  SITE (50): Xaa equals any of the naturally occurring L-amino acids
  SITE (85): Xaa equals any of the naturally occurring L-amino acids
  SITE (112): Xaa equals any of the naturally occurring L-amino acids
VIMTSSLIFQKGFGRYNIGTLTGLTKGDEXHHXNCXTQGQXSXYFAYVLXLQIFHQETKNLQNFSFPKSQEFLSVQTICYHSTYXPYLWHVCPNLQVPVFYTRVRLGPFQVXGNGEG

SEQ ID NO: 2807 - protein, 46 aa, Homo sapiens
  SITE (16): Xaa equals any of the naturally occurring L-amino acids
YRHIVENSKNLEMYTXTSPQFQHSEPYEGYFLVFLEIKLSNSFYFI

SEQ ID NO: 2808 - protein, 77 aa, Homo sapiens
  SITE (56): Xaa equals any of the naturally occurring L-amino acids
NVKYRCLFILKCLGISGAKMMYFLDKSRQEKAIAIATRLDETIKDKDVKTLIKVSXALLDGSFGNCSSQYEEYRMAC

SEQ ID NO: 2809 - protein, 49 aa, Homo sapiens
  SITE (39): Xaa equals any of the naturally occurring L-amino acids
VGFRSTSSTQRYVRETQRYAARRDKGTLREDTKVRCEKXKGTLQKHKGT

SEQ ID NO: 2810 - protein, 53 aa, Homo sapiens
LSSSSFSSCFFFSSISSFLEETSGCKEEGKCLGSYHSSSIRQCVPSVWAMIKP

SEQ ID NO: 2811 - protein, 50 aa, Homo sapiens
ACPVCCGYGWVGMPALCAVGMGGWGCLPCVLWWLAFAEDDFKCPLKSQPF

SEQ ID NO: 2812 - protein, 82 aa, Homo sapiens
CFFMKHQHLFSYIHQLGMIVFSLSKQASAPRPPGSRVAVSGPRPETTAQGHSCPSSWEHREEANVWLVRSKAAPNDSSGWPD

SEQ ID NO: 2813 - protein, 110 aa, Homo sapiens
  SITE (1): Xaa equals any of the naturally occurring L-amino acids
XLIKGTKLELHRGGGRSRTSGSPGLQEFGTRTGASPRAWGWCPRGSRGQVPGFQTPTPDRRRTLGVQASPPQLRCGSKSGEGTLSGLGCRLWGPVRLLLPDGSQGFLCAH

SEQ ID NO: 2814 - protein, 38 aa, Homo sapiens
HLRPSLTQIPTCGTQASIDIVTPGGPNSSLGTTAPLPK

SEQ ID NO: 2815 - protein, 39 aa, Homo sapiens
  SITE (28): Xaa equals any of the naturally occurring L-amino acids
GDILPSSLMQSEGARGESQPPLCIISPXDDDGLVTAARR

SEQ ID NO: 2816 - protein, 67 aa, Homo sapiens
LRGAPTLNLGVSRGILKKVKAKPQSISSLGISRTCVVRRCQRQEEKSIPNRRDSKERRVSQTTFAQT

SEQ ID NO: 2817 - protein, 49 aa, Homo sapiens
  SITE (38): Xaa equals any of the naturally occurring L-amino acids
GRAGWLHRAPSGVWRACWADKCFLHFKVGRFVWAESWXAGGICLIVCLK

SEQ ID NO: 2818 - protein, 92 aa, Homo sapiens
  SITE (85): Xaa equals any of the naturally occurring L-amino acids
SILVSNKLPSEMMLLVWRQQGAVLPMGLSVAFSGPRVFGKIALLTPCLNFEVLSTEHIGLQGKIGIGGDGLARGPAHGRPSDRGXPERTATG

SEQ ID NO: 2819 - protein, 76 aa, Homo sapiens
GLLVLPAGTSARDVAGARNEESRETGPTPGASPCCPWLRGSTRFNWHSAPSMVLLYHCLPGPADALPHTPPPACSC

SEQ ID NO: 2820 - protein, 47 aa, Homo sapiens
LGQLEELVVVKKKWKSWQRAWKGKELLVGGEWNIQVETFYGHLKMQT

SEQ ID NO: 2821 - protein, 47 aa, Homo sapiens
VASLRSRAALRCCKGELRAGQNFPVSFDRRKWLGTTYFFGPETACHY

SEQ ID NO: 2822 - protein, 68 aa, Homo sapiens
GKRQQSSPTEAEFLTHAKFYISWGPCASRLEVLVGPGPWRGLDDQGVRGLGPGSAWGILGRLEAHSPY

SEQ ID NO: 2823 - protein, 92 aa, Homo sapiens
  SITE (73): Xaa equals any of the naturally occurring L-amino acids
RPWLSLSRSALGGTRGLFPVVSLWGVHSTCLRVVERLTSGRQVALEDVFQGSRGREEWGTATVTLPCFNYCGXTWTGYVQGMSNCWRLSGTL

SEQ ID NO: 2824 - protein, 117 aa, Homo sapiens
  SITE (85): Xaa equals any of the naturally occurring L-amino acids
  SITE (114): Xaa equals any of the naturally occurring L-amino acids
AIGSYYQLFAAAVGNVEWLRFCLNQSLREIPTDDKGFTAIHFAAQWGKLACLQVLVEEYKFPVDLLTNNSQTPLHLVIHRDNTTXALPCIYYLLEKGADLNAQTCNGSTPLHLXARD

SEQ ID NO: 2825 - protein, 65 aa, Homo sapiens
  SITE (62): Xaa equals any of the naturally occurring L-amino acids
WEVSNVQLMAFTCRPSFAKFRILMRFKFYIESNFTFDFSLVKKKLLYSKNNVSKSHFYFKGXRDF

SEQ ID NO: 2826 - protein, 81 aa, Homo sapiens
  SITE (34): Xaa equals any of the naturally occurring L-amino acids
  SITE (37): Xaa equals any of the naturally occurring L-amino acids
  SITE (47): Xaa equals any of the naturally occurring L-amino acids
DSHCWRTVFPLALWAGETSVEHSTFDFQIGCKAXNLXFQSRRYNLSXTKSKMIFIMPPGNFLVCYSEWSTDNFLLALIITE

SEQ ID NO: 2827 - protein, 110 aa, Homo sapiens
EQRRRLAELKQKAAAEAQCQWDALHGAAPFPAGPSGFPPLMHHSILHHLPAGRERGEEGEHAYDTLSLESSDSMETSISTGGNSACSPDNMSRYTRRLGPQPPSATASAP

SEQ ID NO: 2828 - protein, 84 aa, Homo sapiens
VDHQWMVASTHSLVIFFSRAAHVRRRMDAESHRSVGQNSPSHPPGVPPDYKHLDFKAHVAHWRKHGLWRRQTESHYLLLSVLLT

SEQ ID NO: 2829 - protein, 108 aa, Homo sapiens
  SITE (93): Xaa equals any of the naturally occurring L-amino acids
  SITE (106): Xaa equals any of the naturally occurring L-amino acids
KNRAGPEAEKRLRRGPEEDGPWGPWDRRGARSQGKGRRARPTSPELESSDDSYVSAGEEPLEAPVFEIPLQNVVVAPGADVLLKCIITANPPXQVSWHKDGSALRXEG

SEQ ID NO: 2830 - protein, 84 aa, Homo sapiens
RLCNHCTQENQLLGEGDDCWDFANYLNSPGPRRRRSRPGPPAGCGAPLPEMASGRAESILEPSSLASEAGWAYLCGEETDLLMG

SEQ ID NO: 2831 - protein, 87 aa, Homo sapiens
GEERDRKTPGQFFLWREPWVGLSRGYSVCFASSIPCPSGGLGGLLEDRRPASRLGRLFYRPGGYRPPVRGGPEEDKFVARASWGQDS

SEQ ID NO: 2832 - protein, 41 aa, Homo sapiens
HEEVIELGSFHLQNSIPMIIYNCGEGEMANIKHQLYSGTST

SEQ ID NO: 2833 - protein, 61 aa, Homo sapiens
  SITE (28): Xaa equals any of the naturally occurring L-amino acids
  SITE (36): Xaa equals any of the naturally occurring L-amino acids
  SITE (50): Xaa equals any of the naturally occurring L-amino acids
VKRKKLFRDIVLRKENSFLTHQHGNDSXAEGEVVCXLADLEKDDFACKEXKDEPNPSQWCH

SEQ ID NO: 2834 - protein, 65 aa, Homo sapiens
AGHHPRCPATPSSPRCPLRAPLTRPHPSALHIPIPKPPKSQGKMAPVPSWPCGCPHQLPQQPQQP

SEQ ID NO: 2835 - protein, 68 aa, Homo sapiens
ARLSCRLGFERRLKAALLCDAERWLLDVPDRHVFHRWNPYLSKPPKPSSSSRTYLNVRPQKAELCAFT

SEQ ID NO: 2836 - protein, 183 aa, Homo sapiens
  SITE (153): Xaa equals any of the naturally occurring L-amino acids
TPFLKHFCSPLPESLRMLPGCIFLMILLIPQVKEKFILGVEGQQLVRPKKLPLIQKRDTGHTHDDDILKTYEEELLYEIKLNRKTLVLHLLRSREFLGSNYSETFYSMKGEAFTRHPQIMDHCFYQGSIVHEYDSAASISTCNGLRGFFRINXQRYLIEPVKYSDEGEHLVFKYNLRVPYGAN

SEQ ID NO: 2837 - protein, 38 aa, Homo sapiens
SLDARASWPSNQLCDLRQVIPALCFLICSMGMIIGLYS

SEQ ID NO: 2838 - protein, 88 aa, Homo sapiens
  SITE (62): Xaa equals any of the naturally occurring L-amino acids
  SITE (79): Xaa equals any of the naturally occurring L-amino acids
RLSFYCSGRKQSAPDGEDLDKLQGKLVRLTDQGEIPDDNPFIKESGARAEIWSYGIRNPQGXAMNPWSNALWLNEHGPXGWVMKLISR

SEQ ID NO: 2839 - protein, 58 aa, Homo sapiens
RVCLGRESSVCWAVLAYSGAGHGNTQDSGMKHKCFQSPHAKKATRTGESNFNILFNPV

SEQ ID NO: 2840 - protein, 42 aa, Homo sapiens
  SITE (17): Xaa equals any of the naturally occurring L-amino acids
TQLHSFHTFFLLYFNFXYLSSLTKVYLQIDHKNLKILTITLQ

SEQ ID NO: 2841 - protein, 37 aa, Homo sapiens
HNEFLSLNINMRNIRGTAQDDLHFCWPCFFFTVFPLV

SEQ ID NO: 2842 - protein, 25 aa, Homo sapiens
HTTGTRPRTPALLQQDKFLGRWFSA

SEQ ID NO: 2843 - protein, 79 aa, Homo sapiens
  SITE (51): Xaa equals any of the naturally occurring L-amino acids
NKKKFKKLSYRLGVVAHTHNLSTLGKLSQEGHLRPGSLKPDWGNTVRTPPXTKYFKISQVVVVHACSPSYFRRSEVGGF

SEQ ID NO: 2844 - protein, 100 aa, Homo sapiens
  SITE (41): Xaa equals any of the naturally occurring L-amino acids
  SITE (63): Xaa equals any of the naturally occurring L-amino acids
QAQPLGPRQSEVRETLGSRSAQHGSPEAAPAGSVPRRRRDXRGQKQPAVLHGTPKKRRHFCSXAPPSSAPRDPSLPGSLPGSLGSPPWRFQLFPNQETDS

SEQ ID NO: 2845 - protein, 51 aa, Homo sapiens
ALKDVCPRSYITRYKPHESLNPPGEVFHPGELLLFQRTLNKKETIFHVIGH

SEQ ID NO: 2846 - protein, 37 aa, Homo sapiens
  SITE (22): Xaa equals any of the naturally occurring L-amino acids
  SITE (32): Xaa equals any of the naturally occurring L-amino acids
IPRFAFLEFLKKLTEKSEGYKXFRKFTPSERXYSQLL

SEQ ID NO: 2847 - protein, 55 aa, Homo sapiens
  SITE (9): Xaa equals any of the naturally occurring L-amino acids
AATTAAAGXNQLVGLSWGMPPCQIWRTTPRVHYPQSLYRRSFPWGCLPVKGTSHK

SEQ ID NO: 2848 - protein, 60 aa, Homo sapiens
TLLVLLLLSLSQLSGIPYPVFLGGVIISAHLTIIKFNNKYRVCYDRIFLYPQEYALPYCL

SEQ ID NO: 2849 - protein, 86 aa, Homo sapiens
  SITE (21): Xaa equals any of the naturally occurring L-amino acids
  SITE (58): Xaa equals any of the naturally occurring L-amino acids
ENKIYLMDWQSFTLAQLVSEXLFVFPRTLLGPRDRKMNKTQCLRLSHPQIGEEHRWFXERQGNVASLTQQRLHWAQRMGNEVPWVT

SEQ ID NO: 2850 - protein, 172 aa, Homo sapiens
HEAQCRPGRMGGLLLAAFLALVSVPRAQAVWLGRLDPEQLLGPWYVLAVASREKGFAMEKDMKNVVGVVVTLTPENNLRTLSSQHGLGGCDQSVMDLIKRNSGWVFENPSIGVLELWVLATNFRDYAIIFTQLEFGDEPFNTVELYSLTETASQEAMGLFTKWSRSLGFLSQ

SEQ ID NO: 2851 - protein, 46 aa, Homo sapiens
  SITE (4): Xaa equals any of the naturally occurring L-amino acids
KRNXWVTEYKEFKVIRESANCPLTIALPYLPTGKKTAASFPHSHPH

SEQ ID NO: 2852 - protein, 84 aa, Homo sapiens
  SITE (78): Xaa equals any of the naturally occurring L-amino acids
QHRLVLPVLSFTETKSYSVCFFGPDFFTQHCFRGSSILSIAVVHAVSLLSGIPLCDYTITMSAIHSVGGHLGHFQSGXLQIYWV

SEQ ID NO: 2853 - protein, 67 aa, Homo sapiens
  SITE (2): Xaa equals any of the naturally occurring L-amino acids
  SITE (18): Xaa equals any of the naturally occurring L-amino acids
RXLGCSPSFTWEVVGPCXPWPLPMPREKWVCLGGTFLHGQRQVIVSPALELSVHSLGFHLEEPDPWT

SEQ ID NO: 2854 - protein, 46 aa, Homo sapiens
  SITE (46): Xaa equals any of the naturally occurring L-amino acids
ELWSTARVANVLGEDTCKCQGHIDFFPVFLPQTNKQLSKGKSNNKX

SEQ ID NO: 2855 - protein, 40 aa, Homo sapiens
FRFSVKEIQNNQLSYLELTKIKNNQFLLLFSIFPPFTSLG

SEQ ID NO: 2856 - protein, 53 aa, Homo sapiens
  SITE (15): Xaa equals any of the naturally occurring L-amino acids
  SITE (47): Xaa equals any of the naturally occurring L-amino acids
ICLDFGETVFINLKXILLSGWAWWLTPVIPALWESEVGGSRRSRDCXPSWPTW

SEQ ID NO: 2857 - protein, 40 aa, Homo sapiens
  SITE (8): Xaa equals any of the naturally occurring L-amino acids
RCILNKWXFIKNESCLLQSKICHSVILKGKFPILKACQYI

SEQ ID NO: 2858 - protein, 35 aa, Homo sapiens
EEVVVRQILLVVYLIFTLVLINMMAIFIQCGNMLS

SEQ ID NO: 2859 - protein, 67 aa, Homo sapiens
  SITE (65): Xaa equals any of the naturally occurring L-amino acids
LCWPCRKRCDASQNLFHLYAIVHALRNAKMYNKSFLKCVLIGLCEEQIFWNHGMIHFLQSGTIMXLT

SEQ ID NO: 2860 - protein, 63 aa, Homo sapiens
  SITE (32): Xaa equals any of the naturally occurring L-amino acids
  SITE (49): Xaa equals any of the naturally occurring L-amino acids
YKFKCRLKDQTIETCLRGKFWVQLHNYRWDIXVYVLEWSKLLDTQLLPXPVAQFAKRVLVMPK

SEQ ID NO: 2861 - protein, 58 aa, Homo sapiens
  SITE (35): Xaa equals any of the naturally occurring L-amino acids
ANDPLRDYAALIIQDGGSCRMTRLRLALRAVANAXYPSRSLPVTTFKLVGRAGSTCDN

SEQ ID NO: 2862 - protein, 148 aa, Homo sapiens
  SITE (57): Xaa equals any of the naturally occurring L-amino acids
  SITE (74): Xaa equals any of the naturally occurring L-amino acids
  SITE (92): Xaa equals any of the naturally occurring L-amino acids
  SITE (99): Xaa equals any of the naturally occurring L-amino acids
  SITE (105): Xaa equals any of the naturally occurring L-amino acids
  SITE (141): Xaa equals any of the naturally occurring L-amino acids
  SITE (143): Xaa equals any of the naturally occurring L-amino acids
  SITE (144): Xaa equals any of the naturally occurring L-amino acids
  SITE (146): Xaa equals any of the naturally occurring L-amino acids
SCGEMSVFLLGPKREQDGEGRGGAATVPSVLPGCRVPALGTSLLSGVSSRSCSLACXTSTQRGCWRLTEKGPHXRWPARGGRCCYCCCCCCXWGPWQGXGHRRIXLSHKGIGEPCRRHEDARAIVVTINSWAPHTFCNLKXIXXAXLA

SEQ ID NO: 2863 - protein, 87 aa, Homo sapiens
  SITE (29): Xaa equals any of the naturally occurring L-amino acids
EFIVNRFPSSLPGQVVWDREEQRPQRATXWRYLRIPSASRPTQRSPGLGGSSPSAKGDPPQGRAWAPAFMGLGCRSAWLVRARAFWG

SEQ ID NO: 2864 - protein, 40 aa, Homo sapiens
  SITE (25): Xaa equals any of the naturally occurring L-amino acids
RFHVIKSEVCLTQYWELKQHSHFIXKYDESLFKKIKINAI

SEQ ID NO: 2865 - protein, 33 aa, Homo sapiens
IILCWHLRDIIFVLLFCVNHIHCTLCVYFCLNK

SEQ ID NO: 2866 - protein, 153 aa, Homo sapiens
QLHLPGQLLRQSVVSVTLSSMRNSSGNSVKRMSMGEILSGSPASSPPSTEIMWSLIAWRMKATSSGAQPQRTWIRMESGVSVPTPEFPRWSLAFLVTFRSTIKTRIILTALTKDQRRTLCGVQLLTTTTKTTPGCIADAEERRNIFRGRLPPY

SEQ ID NO: 2867 - protein, 176 aa, Homo sapiens
TVRENSLFLTSPPTPWPALEGHREIHVLDTDYEGYAILRVSLMWRGRNFRVLKYFTRSLEDKDRLGFWKFRELTADTGLYLAARPGRCAELLKEIEKALRELGALRKTRQRGQKSRRVALIEAPWGLQRPHGPEPLHFCVAGADLMEFLPQTTRFGAPAHPCPSWAPCPPGHLHLL

SEQ ID NO: 2868 - protein, 53 aa, Homo sapiens
  SITE (52): Xaa equals any of the naturally occurring L-amino acids
ITHQKVTAMHPTNEEGVDDMASLTELHGGSIMYNLFQRYKRNQIYTYIGSIXG

SEQ ID NO: 2869 - protein, 62 aa, Homo sapiens
  SITE (58): Xaa equals any of the naturally occurring L-amino acids
GSGSNCIPPDKLSLRTPEPLYSLPTDNTYLLTITSTDNGRIFLAGKDGCLYEVAYQAXSRVV

SEQ ID NO: 2870 - protein, 117 aa, Homo sapiens
  SITE (117): Xaa equals any of the naturally occurring L-amino acids
NLSPGRTTWRPRRLPSPPRGSEKPRRGASQGSGQGRPQKCLRKRPKTKGRKARKTKAPRCPRSPFEGFPQAAQEGEGEATQGPPRSPREKATLRATKKAQGRKPPKGHQESPKGESX

SEQ ID NO: 2871 - protein, 57 aa, Homo sapiens
  SITE (10): Xaa equals any of the naturally occurring L-amino acids
  SITE (34): Xaa equals any of the naturally occurring L-amino acids
IPTSPIGKFXAPRGPRIKLNPPEAEVASEPEIHXPLYLPAPGDQSETVPKKKLIIKC

SEQ ID NO: 2872 - protein, 150 aa, Homo sapiens
  SITE (36): Xaa equals any of the naturally occurring L-amino acids
PQGPTAEMKAKSNLEKSLHEKPIPSCRLPRTQKKVXQKQRNSWWKRLRKLRMKTEEEARTHTEIEMFLRKEQQKLEERLEFWMEKYDKDTEMKQNELNALKATKASDLAHLQDLAKMIREYEQVIIEDRIGKGEEQEEGKTGSLGIKERY

SEQ ID NO: 2873 - protein, 29 aa, Homo sapiens
APGPQAILIINLNRWGKSCLHPIQRIQWC

SEQ ID NO: 2874 - protein, 71 aa, Homo sapiens
  SITE (44): Xaa equals any of the naturally occurring L-amino acids
TVKFLRRLKVRGTKAGEISLSPEEGEADGSQQPALFLRVIFKFXNCITGGPTFCFYQEFFFCSKTLVMGIF

SEQ ID NO: 2875 - protein, 100 aa, Homo sapiens
  SITE (52): Xaa equals any of the naturally occurring L-amino acids
KSSPDPARHYGSPPEGERRGKRSVPKVNPRSLGPTSLPTATSHQPHARARPXPLQLTAQQMLGQNASPHLTKGLQPAGWEMNQILTPPPPCPAHLLGQYQ

SEQ ID NO: 2876 - protein, 82 aa, Homo sapiens
  SITE (21): Xaa equals any of the naturally occurring L-amino acids
  SITE (22): Xaa equals any of the naturally occurring L-amino acids
  SITE (55): Xaa equals any of the naturally occurring L-amino acids
APGSPLHPVCPSTSQTLPGSXXTGLLNPLDSPHHMRQDEESEFREGIVVDRPTRXGHGSFVNCGMKKEVKIDKNLEPGLRVT

SEQ ID NO: 2877 - protein, 116 aa, Homo sapiens
  SITE (89): Xaa equals any of the naturally occurring L-amino acids
  SITE (92): Xaa equals any of the naturally occurring L-amino acids
NYRGQGSSWGSGGGDAVGGVNTVNSETSPGMFNFDTFWKNFKSKLGFINWDAINKNQVPPPSTRALLYFSRLWEDFKQNTPFLNWKAIXEGXGRVITAETCRQSHFRNLHLQPACV

SEQ ID NO: 2878 - protein, 68 aa, Homo sapiens
  SITE (41): Xaa equals any of the naturally occurring L-amino acids
  SITE (46): Xaa equals any of the naturally occurring L-amino acids
  SITE (48): Xaa equals any of the naturally occurring L-amino acids
WNVPIPRLKICFKKRGNMNKDPTTLLAQVLFTLNFLNLDNXFQSAXEXHFAKTSPGTRLQCFGKVLIV

SEQ ID NO: 2879 - protein, 33 aa, Homo sapiens
KYVSHANISIYKWRTLTLLLFSYKIPNFVIILS

SEQ ID NO: 2880 - protein, 54 aa, Homo sapiens
TFETQPNVISVKSSLSLPSSNLPSPRVYLPFCAHLSYSSMLFYNCDSPGSLGAI

SEQ ID NO: 2881 - protein, 96 aa, Homo sapiens
  SITE (21): Xaa equals any of the naturally occurring L-amino acids
AVCSLAAGLRVGRLRRLLPLXFSRCGHESGCTAVIHPHLLKMHPDLSPHLHTEECNVLINLLKECHKNYVENRTKSREHGIAMRKKLFNPPEESEK

SEQ ID NO: 2882 - protein, 67 aa, Homo sapiens
  SITE (22): Xaa equals any of the naturally occurring L-amino acids
RSRGFSCVQTPCHFREVTQACXISLWQQVGGLPQGRRWPEMCFRSLTHHSLHTRREHHSWSILRMEI

SEQ ID NO: 2883 - protein, 48 aa, Homo sapiens
  SITE (42): Xaa equals any of the naturally occurring L-amino acids
IIITKSNILYTTISQWGKNKSYVLWVKCCNRLGLSNLLEKIXAVFSFP

SEQ ID NO: 2884 - protein, 40 aa, Homo sapiens
LFLFTNHNDSGKPGCKHQHCHQLRICDQECHLTVTGRRQK

SEQ ID NO: 2885 - protein, 104 aa, Homo sapiens
  SITE (84): Xaa equals any of the naturally occurring L-amino acids
SADLFDDIAKEMDIATEITKKSQDILLKWGTSLAESHPSESDFSLRSLSEDFIQPSQKLSLQAYLTLGIQEHALQHLIFNQIQXIILKIVKTLFHVHSQLQFSG

SEQ ID NO: 2886 - protein, 54 aa, Homo sapiens
  SITE (52): Xaa equals any of the naturally occurring L-amino acids
  SITE (53): Xaa equals any of the naturally occurring L-amino acids
LALASQSAGITGVGHRAWPLSIFSKHIFNTWDHSLYTVSYSTLSYHFPCVEXXS

SEQ ID NO: 2887 - protein, 56 aa, Homo sapiens
  SITE (5): Xaa equals any of the naturally occurring L-amino acids
  SITE (7): Xaa equals any of the naturally occurring L-amino acids
  SITE (17): Xaa equals any of the naturally occurring L-amino acids
  SITE (22): Xaa equals any of the naturally occurring L-amino acids
VVGEXMXSCCLGDGVGXSLISXLDPEVSQKILTKNPMPTYIPSLNQGTGFGAGILP

SEQ ID NO: 2888 - protein, 40 aa, Homo sapiens
KAIPQTASHLSLKSGGRPIVFNRPTGAWYFPPILRKGRTE

SEQ ID NO: 2889 - protein, 57 aa, Homo sapiens
  SITE (9): Xaa equals any of the naturally occurring L-amino acids
ITATAPCRXNSPIGLPPARLHMLTSPGHGPSQNLVLDPASCPPLKYVGNTPLFPLYS

SEQ ID NO: 2890 - protein, 46 aa, Homo sapiens
  SITE (10): Xaa equals any of the naturally occurring L-amino acids
LPSPQCCCVXNLCFSNCGTQASSISITWNLTCTFIQPQANLLNQKL

SEQ ID NO: 2891 - protein, 59 aa, Homo sapiens
KSPWFSTMPLDREFPELQRRLVPLGRALDVFILMVHNPPGQKSCPTAQELRIGIPLFQE

SEQ ID NO: 2892 - protein, 103 aa, Homo sapiens
FGRGSSGLRVPCGTSWALAKAVLIPRDRAGKVSSGPRVPCGTSWASVKAVMTPRMCQESGPLLLRGPEGAAVIQEGRLGMKGLEFLSASISLMQIFSYSFLLS

SEQ ID NO: 2893 - protein, 41 aa, Homo sapiens
FGTSQTELTEDYVLEAQAIQRQLAHRQYCIAEYRKLCSLLY

SEQ ID NO: 2894 - protein, 98 aa, Homo sapiens
  SITE (98): Xaa equals any of the naturally occurring L-amino acids
VTCLSLYVETNFTMITDLCNISSLNFHTILKCLLENLHLFVPRCSSSIKPWAYFSVLLRPNFVLVGTILYNIHLFCKFILPNLEGFIKGYSISTGPSX

SEQ ID NO: 2895 - protein, 55 aa, Homo sapiens
TQCIFISILGTGRLFFLKGGKLRPKAGRMYVHIIVDRISFALYVYRFFIIFILRY

SEQ ID NO: 2896 - protein, 236 aa, Homo sapiens
NHSPDSRKRMDPSHPSQESITTSGVMGRYPRGKPYQTNAKKSLTLLHLFYYSFFFPHSMADHLIINVTRSSSPQTITFDACLVIPCGDLQSQKQLSDSEKYLCPFKIKGSPYQDPCSLTNAGKQVCHSWNDVVWTTEYQGWTSSTGGCMSLKPYIHFTKESTPHNCQYNQCNPVQISILIPTSTDPKPTLSCLYGMGAEIAGAHLIGYFEICFITPSPPTFLLHYPPMFCSSSTQR

SEQ ID NO: 2897 - protein, 28 aa, Homo sapiens
  SITE (23): Xaa equals any of the naturally occurring L-amino acids
ARNILFVNYEASMYFCTALMKKXSYLLD

SEQ ID NO: 2898 - protein, 57 aa, Homo sapiens
SPKGRFVMHCELEMFFSLQLPCFKKRIFDSTAKAQETRHSIKYTNKTGTKELKTFNP

SEQ ID NO: 2899 - protein, 81 aa, Homo sapiens
KKLVCIMLFYPRYVAQEITNLMRVMTHFKPPMITVFKIQLRTGPFLGDTRKVIARTEERGVPKNVTLKFDTCATIDSKQHG

SEQ ID NO: 2900 - protein, 45 aa, Homo sapiens
LTHTWRDKNNLVYYQIDILKPIYYILRMLVRNFICYPFRLLIFFI

SEQ ID NO: 2901 - protein, 86 aa, Homo sapiens
  SITE (67): Xaa equals any of the naturally occurring L-amino acids
SLCQVFAVYSAPLTGGFLHTPGSLKMPQYQGSTDNPTFLPWIMQEVGWLPRCLLFSLCHLRCLLNKXWVLSVASAGNQDFQTGHII

SEQ ID NO: 2902 - protein, 115 aa, Homo sapiens
  SITE (56): Xaa equals any of the naturally occurring L-amino acids
  SITE (91): Xaa equals any of the naturally occurring L-amino acids
YPQDPPGGASRRLLDDLELCPGEKTAPVWALSAEEEAAMHFSLAFFLHGSSVFLQXTCCHEFLCMRHISSCLYAEVPSSFHWLVDRRERSXVPYIVRQCRGRRSSAEAWRRWAST

SEQ ID NO: 2903 - protein, 69 aa, Homo sapiens
  SITE (25): Xaa equals any of the naturally occurring L-amino acids
  SITE (44): Xaa equals any of the naturally occurring L-amino acids
  SITE (51): Xaa equals any of the naturally occurring L-amino acids
  SITE (52): Xaa equals any of the naturally occurring L-amino acids
  SITE (53): Xaa equals any of the naturally occurring L-amino acids
TAHSGCCIEKRMWWTDIEAWKPDRXIAITQKRGDGSLDLLEAVXCPTLQLXXXEKGPERLILITNGPMM

SEQ ID NO: 2904 - protein, 53 aa, Homo sapiens
  SITE (36): Xaa equals any of the naturally occurring L-amino acids
  SITE (50): Xaa equals any of the naturally occurring L-amino acids
NSARGSTRGHTQGRSIMFVGSVGEALVISQISSDTXGHTDGRNLCMQGSXTRP

SEQ ID NO: 2905 - protein, 43 aa, Homo sapiens
EVVLVLFFSVLPPDNYFRSVLDQVKTFLRRLKYTILLYYNRAF

SEQ ID NO: 2906 - protein, 35 aa, Homo sapiens
LKESHSSLYMCLKFMFFFYQNIHLDIKLNPNVATG

SEQ ID NO: 2907 - protein, 60 aa, Homo sapiens
  SITE (13): Xaa equals any of the naturally occurring L-amino acids
  SITE (23): Xaa equals any of the naturally occurring L-amino acids
  SITE (50): Xaa equals any of the naturally occurring L-amino acids
  SITE (60): Xaa equals any of the naturally occurring L-amino acids
TSQSLPTILNPCXQCVAKPTPWXKTTSTAIQRKWDDDLICHICLQALLDXLDTPCGNTYX

SEQ ID NO: 2908 - protein, 69 aa, Homo sapiens
  SITE (21): Xaa equals any of the naturally occurring L-amino acids
IFKFQLTWTQTMVTKSLNRLXEPLEAFIQRCFGESLFQSTPIRQLLKNNNPQKQVDLFVFLEPSRKGPS

SEQ ID NO: 2909 - protein, 34 aa, Homo sapiens
HRSDLVPFIVHPTRRYVVLICLVTCDTSLITWFR

SEQ ID NO: 2910 - protein, 70 aa, Homo sapiens
  SITE (56): Xaa equals any of the naturally occurring L-amino acids
  SITE (67): Xaa equals any of the naturally occurring L-amino acids
CRKVLKHNTKESTDTFENYNITNTRVSIVYISLLPIHRYPPFGILCPSVFWVLWGXGVVWIALWGFXLLF

SEQ ID NO: 2911 - protein, 91 aa, Homo sapiens
  SITE (56): Xaa equals any of the naturally occurring L-amino acids
  SITE (65): Xaa equals any of the naturally occurring L-amino acids
  SITE (76): Xaa equals any of the naturally occurring L-amino acids
  SITE (82): Xaa equals any of the naturally occurring L-amino acids
RENEQIKEDMEEIRTEMNKRGKENCSENILDSMPDIRSALQRDAAAAYAHPEYEEXFLQEETVSXQINSIELLQTXPLVLPXGGEVTAGPP

SEQ ID NO: 2912 - protein, 57 aa, Homo sapiens
  SITE (35): Xaa equals any of the naturally occurring L-amino acids
THLYIKCNPFRKRFWISSPLKDRKHSGCPSYSHVXHLGLGVFFFKNQAGLLAHPVLV

SEQ ID NO: 2913 - protein, 94 aa, Homo sapiens
  SITE (60): Xaa equals any of the naturally occurring L-amino acids
  SITE (83): Xaa equals any of the naturally occurring L-amino acids
NLRSSRRVEDTWTLTQTPRWAVPRDPAREGIPSCLRFSVLLWLEDLNPTPSPSSGDRAFXRAGDLAVLRTVEQGGRGGLGWWXRGNRVRCVKQS

SEQ ID NO: 2914 - protein, 181 aa, Homo sapiens
  SITE (8): Xaa equals any of the naturally occurring L-amino acids
  SITE (24): Xaa equals any of the naturally occurring L-amino acids
  SITE (97): Xaa equals any of the naturally occurring L-amino acids
  SITE (120): Xaa equals any of the naturally occurring L-amino acids
  SITE (130): Xaa equals any of the naturally occurring L-amino acids
  SITE (169): Xaa equals any of the naturally occurring L-amino acids
GRAQSLLXDITPEINPLPKIEVSXSVEYEAGHIPSPVIPQESSVEIDNETEQKSESFSSIEKPSITYETNKVNELMDNIIKEDVNSMQIFTKLSETXVPPINTATVPDNEDGEAKMNIAXTAKQTLISDXDSSSLPEVKEEEQSPEDALLRGLQRTATDFYAEMQNSTXLGYANGNLDMDQ

SEQ ID NO: 2915 - protein, 76 aa, Homo sapiens
  SITE (63): Xaa equals any of the naturally occurring L-amino acids
CIFLSIYAYFPLAFQKPLVRNFIIPVSWVRWLLLAPGLVKEFTYSISASEGLRLQLLLRQCYXISGLRVSLFFKNE

SEQ ID NO: 2916 - protein, 123 aa, Homo sapiens
HLLPGQLLWVPGNPIGLGLAPAKNKCYSCPVSSEWMLVILVWSPDVRQQVVQKAPEEVSCQSQGQRRRHREPTARDFHLQRATHDEEGGFLGALSPPDTRTQDLLAWKVNSSEFRDDASLGGR

SEQ ID NO: 2917 - protein, 240 aa, Homo sapiens
  SITE (220): Xaa equals any of the naturally occurring L-amino acids
  SITE (236): Xaa equals any of the naturally occurring L-amino acids
RNTFAKQESVEERLSQLQSENTLLRQQLDDAHKKANSQEKTSSTIQDQFHSAAKNLQAESEKQILSLQEKNKELMDEYNHLKERMDQCEKEKAGRKIDLTEAQETVPSRCLHLDAENEVLQLQQTLFSMKAIQKQCETLQKNKKQLKQEVVNLKSYMERNMLERGKAEWHKLLIEERARKEIEEKLNEAILTLQKQAAVSHEQLVQLREDNTTSIKTQMXLTIKDLESEIFRIKTXQAAL

SEQ ID NO: 2918 - protein, 58 aa, Homo sapiens
  SITE (21): Xaa equals any of the naturally occurring L-amino acids
  SITE (22): Xaa equals any of the naturally occurring L-amino acids
LIYPVLMFVMIVLSHQEKIQXXYNKLNKIFISIHKLCFNYLLYVRHYKMTTWTDGYLF

SEQ ID NO: 2919 - protein, 66 aa, Homo sapiens
WRGWRLSVNDEGWDPMCKEDHTLLRIWGPGLVTQGSAATTVQGKHNLGTRLPRCFYSILIFTESRT

SEQ ID NO: 2920 - protein, 84 aa, Homo sapiens
DGAMNKTMRPSHKIVYPLVGGDRQCTHTKQTDQKGGRRPGAVAHACNPSTLGGQGGGGGGRSPEVRSSETSLGQLGEDPSLLKS

SEQ ID NO: 2921 - protein, 42 aa, Homo sapiens
  SITE (20): Xaa equals any of the naturally occurring L-amino acids
NVKRVLIMNDNDDDFGGCNXKALSMKETCQLEIQVDNEQLNL

SEQ ID NO: 2922 - protein, 21 aa, Homo sapiens
RIMSGGSPDYNSRETWRPKGN

SEQ ID NO: 2923 - protein, 51 aa, Homo sapiens
WSLFSSFTCSIPLSPTYSWLLSAKLSGLSSTFSPSLLGISIWVCLWCIGVK

SEQ ID NO: 2924 - protein, 193 aa, Homo sapiens
  SITE (8): Xaa equals any of the naturally occurring L-amino acids
  SITE (37): Xaa equals any of the naturally occurring L-amino acids
  SITE (47): Xaa equals any of the naturally occurring L-amino acids
  SITE (155): Xaa equals any of the naturally occurring L-amino acids
  SITE (163): Xaa equals any of the naturally occurring L-amino acids
  SITE (173): Xaa equals any of the naturally occurring L-amino acids
  SITE (180): Xaa equals any of the naturally occurring L-amino acids
  SITE (187): Xaa equals any of the naturally occurring L-amino acids
QSWTSPFXFSRPTSMHCPGRGPQDLRLDAFAGPCYSXTSRLHPQGPXSCHIHMNTWNVNRAGCESLAVKVFAYPMASIEWRKDGLDIQLPGDDPHISVQFRGGPQRFEVTGWLQIQAVRPSDEGTYRCLARNALGQVEAPASLTVLTPDQLNSTXIPQLRSLXLVPEEEAESXENDDYYXVQNSGPXGLGNRL

SEQ ID NO: 2925 - protein, 187 aa, Homo sapiens
  SITE (13): Xaa equals any of the naturally occurring L-amino acids
  SITE (65): Xaa equals any of the naturally occurring L-amino acids
  SITE (187): Xaa equals any of the naturally occurring L-amino acids
KIGSLEWYYEACXSPLQRFGSAKVIRSLHGRLQGGAGPELISEERSGDSDQTDEDGEPGSEAQAXAQPFGSKKKRLLSVHDFDFEGDSDDSTQPQGHSLHLSSVPEARDSPQSLTDESCSEKAAPHKAEGLEEADTGASGCHSHPEEQPTSISPSRHGALAELCPPGGSHRMALGTAAALGSNVIRX

SEQ ID NO: 2926 - protein, 56 aa, Homo sapiens
GMSPSSKRRGKVSPFLGWEPGGRQWAGLLERSAWEGLPGVWGMFPWVRPGAAHVSS

SEQ ID NO: 2927 - protein, 33 aa, Homo sapiens
  SITE (1): Xaa equals any of the naturally occurring L-amino acids
XLSENTPSLFQTLCLCLGHTNMNKNTVSAFLEL

SEQ ID NO: 2928 - protein, 97 aa, Homo sapiens
RKQRGGPRCVVRPRDSLSTKSVKLSALPGASAGQFHSLLGGSGPAWSSCPACHHRSQARGKKRSPVASDVTWAQPSLIVTEPFNTEYLDWLNCSPRK

SEQ ID NO: 2929 - protein, 53 aa, Homo sapiens
  SITE (32): Xaa equals any of the naturally occurring L-amino acids
  SITE (43): Xaa equals any of the naturally occurring L-amino acids
QCGALFPPLGLSGEGVIFSRQRIAGGVRGAPXRSCEPLLKGCXQFMGDPPGEI

SEQ ID NO: 2930 - protein, 50 aa, Homo sapiens
  SITE (4): Xaa equals any of the naturally occurring L-amino acids
  SITE (47): Xaa equals any of the naturally occurring L-amino acids
LYLXSAYLYQCTLCIHPSHGDEVGGGVGQGNIDMRFSHIKTNFTVRXYLA

SEQ ID NO: 2931 - protein, 113 aa, Homo sapiens
  SITE (4): Xaa equals any of the naturally occurring L-amino acids
  SITE (39): Xaa equals any of the naturally occurring L-amino acids
  SITE (97): Xaa equals any of the naturally occurring L-amino acids
  SITE (105): Xaa equals any of the naturally occurring L-amino acids
KPCXLRTGAENLLKWPQTQRCGTSAAGAELRQLRPADAXGRAGGAEHLGGRLSEHRGGIYDSPDSSWPEGNERRRLCSRPQGFYPGNITVKMAIYMXDEIADLMXLRTSLSDA

SEQ ID NO: 2932 - protein, 62 aa, Homo sapiens
  SITE (43): Xaa equals any of the naturally occurring L-amino acids
  SITE (44): Xaa equals any of the naturally occurring L-amino acids
  SITE (59): Xaa equals any of the naturally occurring L-amino acids
PRNFLMIFNLKSQLNRDSSVHGPAAGTTTFSPWLCSAKPGIGXXVALWGPTWSRIGSIXWAT

SEQ ID NO: 2933 - protein, 146 aa, Homo sapiens
  SITE (128): Xaa equals any of the naturally occurring L-amino acids
PPSPRDRVTAIQTGWCWTREERSLKPYTTSATSSRALRRPWAPKRTPPGSAGTSWTVSRRWWMGTYWVDPNLGCSSDTIEVSCNFTHGGQTCLKPITASKVEFAISRVQMNFLHLLSSEVTQHITIHXLNMTVWQEGTGQTPPSRP

SEQ ID NO: 2934 - protein, 46 aa, Homo sapiens
  SITE (39): Xaa equals any of the naturally occurring L-amino acids
  SITE (42): Xaa equals any of the naturally occurring L-amino acids
  SITE (46): Xaa equals any of the naturally occurring L-amino acids
YTYLMDEATLLVGSRAKVSSPGSLISGFIITLLVITILXIVXNTYX

SEQ ID NO: 2935 - protein, 59 aa, Homo sapiens
  SITE (10): Xaa equals any of the naturally occurring L-amino acids
  SITE (48): Xaa equals any of the naturally occurring L-amino acids
  SITE (58): Xaa equals any of the naturally occurring L-amino acids
LRKLPIGWRXGPVPNSPYSESYYNSLAVVLQRRDWENPGVTQLNRLAXHPPFASWRNXE

SEQ ID NO: 2936 - protein, 50 aa, Homo sapiens
  SITE (47): Xaa equals any of the naturally occurring L-amino acids
AFSSRKPKQPDMVLSGPMATWPWPGSDLWLSPCPLPHHRLPPFPAGXPTK

SEQ ID NO: 2937 - protein, 121 aa, Homo sapiens
  SITE (118): Xaa equals any of the naturally occurring L-amino acids
AATGGSVLNVAALLASGTQVTPQIAMAAQMAALQAKALAETGIAVPSYYNPAAVNPMKFAEQEKKRKMLWQGKKEGVSSLILLFCRLFLISNCLEKQIWVEKYYFRLNFVRNWGGPKXGLG

SEQ ID NO: 2938 - protein, 45 aa, Homo sapiens
  SITE (26): Xaa equals any of the naturally occurring L-amino acids
AHLCMDEWPTLEPRLLLPGLVVNPPXSGECSVQLWGPGCCFSVWQ

SEQ ID NO: 2939 - protein, 55 aa, Homo sapiens
VQINERHKERGHLETLYAGMRVNKQDCKASVRQDTAGVGLLLTCHLLADLSWDRR

SEQ ID NO: 2940 - protein, 63 aa, Homo sapiens
  SITE (20): Xaa equals any of the naturally occurring L-amino acids
KFNKLMFYISLTQQLQYLLXTYYVPSTETKHKKYLGDFIFPWWDPQEKKNFKNCWGPITSKAV

SEQ ID NO: 2941 - protein, 35 aa, Homo sapiens
  SITE (25): Xaa equals any of the naturally occurring L-amino acids
KISHIGKLRDFLLEHRKDYINAYSXTMSEYGRMTD

SEQ ID NO: 2942 - protein, 84 aa, Homo sapiens
VYVLPSVRPPVAALPNFLLHSISPLSLAFSSTCLSIFHSQPPSAITRPPFTPPTKATCPPAPHFQVLVCISFLYCCPLSHPQTH

SEQ ID NO: 2943 - protein, 71 aa, Homo sapiens
  SITE (46): Xaa equals any of the naturally occurring L-amino acids
KRSHTIAQAGLKLPSSSNPPASVSQSVRITGVSHCTRPPSSIFKLXSFFLFKFSVHVPPKSCNETKTVFCF

SEQ ID NO: 2944 - protein, 123 aa, Homo sapiens
  SITE (122): Xaa equals any of the naturally occurring L-amino acids
IYLIYMLEGVSNEFDHFGISLPLKICLHLGWDEGLVEGKVVRLGQGIGKSICSSCQLFEEAPTQMSTVPSGLPLPILMHLCLLPVCMAHLCPASPCYFGATPGSGKFCRLITYSHSSPQLAXS

SEQ ID NO: 2945 - protein, 97 aa, Homo sapiens
  SITE (38): Xaa equals any of the naturally occurring L-amino acids
  SITE (57): Xaa equals any of the naturally occurring L-amino acids
  SITE (66): Xaa equals any of the naturally occurring L-amino acids
  SITE (86): Xaa equals any of the naturally occurring L-amino acids
  SITE (89): Xaa equals any of the naturally occurring L-amino acids
KGKSCLASASGLRTADAFPAFAVDRSLGCCSPATCSVXCRCPEGESWPLVATARFPXDFRSVPWSXRGGNVCAGVTPPLHIHWPEXPWXRWRSRPLS

SEQ ID NO: 2946 - protein, 87 aa, Homo sapiens
SSDNQITPHQLINIWLYPISAVWSSVIVSNVKLPIHSMIQQALKIYRTLLFSTCDHFTFSTKVTCQCYNFVILTCSLQRQWIPILVS

SEQ ID NO: 2947 - protein, 83 aa, Homo sapiens
ESIVSTNIFISLLGRSQIYSIPFCFTHNKCMNMYCFINLFFRAHGLDIDSVDSHLLVRKLIGGYMEMQNSVESQNIYLDGILF

SEQ ID NO: 2948 - protein, 64 aa, Homo sapiens
  SITE (50): Xaa equals any of the naturally occurring L-amino acids
  SITE (56): Xaa equals any of the naturally occurring L-amino acids
  SITE (61): Xaa equals any of the naturally occurring L-amino acids
NVTVQISKCSNKLNSSNAWKDTTKPIFIELGQDKSMLICMAIGKLQRFTXFLPLSXVVTIXWQG

SEQ ID NO: 2949 - protein, 234 aa, Homo sapiens
TRECHQLAYADEAKKRSNPYVKTYLLPDKSRQGKRKTSIKRDTVNPLYDETLRYEIPESLLAQRTLQFSVWHHGRFGRNTFLGEAEIQMDSWKLDKKLDHCLPLHGKISAESPTGLPSHKGELVVSLKYIPASKTPVGGDRKKSKGGEGGELQVWIKEAKNLTAAKAGGTSDSFVKGYLLPMRNKASKRKTPVMKKTLNPHYNHTFVYNGVRLEDLQHMCLELTVWDPGAPGQQ

SEQ ID NO: 2950 - protein, 76 aa, Homo sapiens
  SITE (53): Xaa equals any of the naturally occurring L-amino acids
IVTVSSILLTLNIQYFLNKQILLPCLESSEFKVASWMDHDPKMSFNFVFTVIXCTTWRRKDILTTLLQVHIRKPLF

SEQ ID NO: 2951 - protein, 102 aa, Homo sapiens
PNLFMCHALGLKSSEQREFVMAAGTANTMHLLIKYQKLLWTIPKFIVNQVRKQNTENHKKDKRAMKKLLKKMAYDREKYEKQDKSTNDWGCPDSQERRSFFV

SEQ ID NO: 2952 - protein, 69 aa, Homo sapiens
  SITE (65): Xaa equals any of the naturally occurring L-amino acids
  SITE (67): Xaa equals any of the naturally occurring L-amino acids
  SITE (69): Xaa equals any of the naturally occurring L-amino acids
NPDLLWKIILIRKAFQNSWFNTILPELISTCFQVLHNQCWLIILDLIYSSLEEVIYSSLEEVIKXGXEX

SEQ ID NO: 2953 - protein, 69 aa, Homo sapiens
  SITE (33): Xaa equals any of the naturally occurring L-amino acids
  SITE (34): Xaa equals any of the naturally occurring L-amino acids
  SITE (36): Xaa equals any of the naturally occurring L-amino acids
GGALALARFHRGYAAAPDVTPTVLGVRGVLGVXXVXQKCALPRYGLKAGEMCAFAEQVALRPLKEVTYT

SEQ ID NO: 2954 - protein, 70 aa, Homo sapiens
PGRRAARPAPDPPGSLGTRQPGSGSTMEEPQRARSHTVTTTASSFAENFSTSSSSFAYDREFLRTLPGFL

SEQ ID NO: 2955 - protein, 79 aa, Homo sapiens
SDAGFKKIHGCSMKNNSRLSFTFSPMIYFKIMLYMTGAVFYSFQCTGLTCISSTLSELLDCVLSLFLSQRKRGMITKSK

SEQ ID NO: 2956 - protein, 117 aa, Homo sapiens
RCLWETRSLQVRAVTLQGGIGSCPGPLGLPSGLESPRHCPPSWGPLIWAVTVSSVPSPTPELSSILKSPLLLVRCWAMAISSVPGPTPELWSTLGSLPLSWCWAVAISSVPSPTPEL

SEQ ID NO: 2957 - protein, 221 aa, Homo sapiens
  SITE (44): Xaa equals any of the naturally occurring L-amino acids
  SITE (71): Xaa equals any of the naturally occurring L-amino acids
  SITE (219): Xaa equals any of the naturally occurring L-amino acids
HAESENFAFWQDMKWKNKFWGKSLEIVPVGTVNVSLPRFGDHFXWNKVTSCIHNVLSGQRWIEHYGEVLIXNTQDSSCHCKITFCKAKYWSSNVHEVQGAVLSRSGRVLHRLFGKWHEGLYRGPTPGGQCIWKPNSMPPDHERNFGFTQFALELNELTAELKRSLPSTDTRLRPDQRYLEEGNIQAAEAQKRRIEQLQRDRRKVMEENTSYTKLASSAXDR

SEQ ID NO: 2958 - protein, 35 aa, Homo sapiens
VTLLSCAKVPFLSGSTIFNLDLKKSHLRSSLFFSY

SEQ ID NO: 2959 - protein, 206 aa, Homo sapiens
  SITE (38): Xaa equals any of the naturally occurring L-amino acids
  SITE (161): Xaa equals any of the naturally occurring L-amino acids
  SITE (190): Xaa equals any of the naturally occurring L-amino acids
  SITE (206): Xaa equals any of the naturally occurring L-amino acids
QPSGPKGLEPPEEEKNPYKEVYTDMWVEPEAAAYAPPXPAKKPRKSTAEKPKVKEIIDERTRERLVYEVRQKCRNIEDICISCGSLNVTLEHPLFVGGMCQNCKNCFLECAYQYDDDGYQSYCTICCGGREVLMCGNNNCCRCFCVECVDLLVGPGAGKQXLRKDPGTATCAAQGYLRLLRRQRMASGSXVFVYHDRNWTSRVTTX

SEQ ID NO: 2960 - protein, 272 aa, Homo sapiens
  SITE (36): Xaa equals any of the naturally occurring L-amino acids
EERRGGLGDLRFSRSPVQSPVPKTQPDACAPVGGLXRRRELQLVALKARRGEQLLRSETAGDVGRAKEMDETVAEFIKRTILKIPMNELTTILKAWDFLSENQLQTVNFRQRKESVVQHLIHLCEEKRASISDAALLDIIYMQFHQHQKVWDVFQMSKGPGEDVDLFDMKQFKNSFKKILQRALKNVTVSFRETEENAVWIRIAWGTQYTKPNQYKPTYVVYYSQTPYAFTSSSMLRRNTPLLGQELEATGKIYLRQEEIILDITEMKKACN

SEQ ID NO: 2961 - protein, 83 aa, Homo sapiens
  SITE (61): Xaa equals any of the naturally occurring L-amino acids
  SITE (73): Xaa equals any of the naturally occurring L-amino acids
NIASEPANLLLLKNISAMGLYCGQYKDMNFPVFSKSLSSVLQYCQQGCIQLYVRMVFKLDXVNDAFLHVIQGXSVGKVLLALK

SEQ ID NO: 2962 - protein, 68 aa, Homo sapiens
  SITE (64): Xaa equals any of the naturally occurring L-amino acids
HKADTKSLHKSGKNQRLNLHPVIFSTQSFCGHARVSSGFPAPLMKDKWCFHCSLCSRKEGLVLXVSGV

SEQ ID NO: 2963 - protein, 101 aa, Homo sapiens
  SITE (1): Xaa equals any of the naturally occurring L-amino acids
  SITE (34): Xaa equals any of the naturally occurring L-amino acids
  SITE (43): Xaa equals any of the naturally occurring L-amino acids
  SITE (67): Xaa equals any of the naturally occurring L-amino acids
  SITE (87): Xaa equals any of the naturally occurring L-amino acids
XWPWEWGTAGGLPEGFSAVASGAGGRGRGTGAGXRGRGTSRRXRPRDKGSGMPGHPSLGPLWVKGTXKDSKFPWEGKILILLSSPWXQFKREIPVGFHFGF

SEQ ID NO: 2964 - protein, 99 aa, Homo sapiens
  SITE (3): Xaa equals any of the naturally occurring L-amino acids
  SITE (33): Xaa equals any of the naturally occurring L-amino acids
  SITE (44): Xaa equals any of the naturally occurring L-amino acids
  SITE (46): Xaa equals any of the naturally occurring L-amino acids
  SITE (55): Xaa equals any of the naturally occurring L-amino acids
  SITE (56): Xaa equals any of the naturally occurring L-amino acids
  SITE (79): Xaa equals any of the naturally occurring L-amino acids
GRXPDSPQHGKSFYKENGEPSALSQSSHGEASXPLHISIWIHSXCXPRGCGTRGXXALTSLTRPPGPICCLRWGSKTRXSLRSAARTVNWLKRRVRGKF

SEQ ID NO: 2965 - protein, 152 aa, Homo sapiens
  SITE (150): Xaa equals any of the naturally occurring L-amino acids
KVLPFVLVIQSKVIGLKVFPEAASQGLLVFLADLTLPPVRLIRNIKDGFTGQDLPSKLQRKILFNSVEKLFSCVKFNIKICCSWLCNLLDVRVLWDFQQLYLLLLCLGNEGIFNVISSRAADWDRNDLGVGETGEISLCRSQRSCACTVXEK

SEQ ID NO: 2966 - protein, 50 aa, Homo sapiens
  SITE (21): Xaa equals any of the naturally occurring L-amino acids
  SITE (39): Xaa equals any of the naturally occurring L-amino acids
  SITE (48): Xaa equals any of the naturally occurring L-amino acids
RKKKPLLLTARQPQRRPPSCXGSVWGQSPVLAAQAPEWXGQGKVSVSXKR

SEQ ID NO: 2967 - protein, 67 aa, Homo sapiens
  SITE (37): Xaa equals any of the naturally occurring L-amino acids
  SITE (39): Xaa equals any of the naturally occurring L-amino acids
  SITE (42): Xaa equals any of the naturally occurring L-amino acids
  SITE (44): Xaa equals any of the naturally occurring L-amino acids
DSMLSPPSFPLIICSQQVALCSYSKRSPNSLGSLCPXGXVSXGXIRGDCWEAGCHGNAEASAEIPSC

SEQ ID NO: 2968 - protein, 50 aa, Homo sapiens
FSIMHIIQTVVVSKRVFPPHVQNMMDFMKINILNSRKYDLYGSLKDFPIH

SEQ ID NO: 2969 - protein, 134 aa, Homo sapiens
EAASWGHRRPGFAVRGQDAHSFKIQTQIVGHLVLGFSVVAVPFCLSSLLCLLAAWNLPLFLNEDLWNTYHTADAAQAKVLIHRSSLNSRNTINAHCFILTLSWEGDREVGGQTSCVPRPKGITGGIISAPHPSF

SEQ ID NO: 2970 - protein, 253 aa, Homo sapiens
  SITE (162): Xaa equals any of the naturally occurring L-amino acids
  SITE (195): Xaa equals any of the naturally occurring L-amino acids
  SITE (206): Xaa equals any of the naturally occurring L-amino acids
KVRLQVPVRNSRVDPRVRSIHQCLPSNWTGTCTIGYVTPDIFIAPGNLSLPIPIYGNSPLPRVRRAIHFIPLLAGLGILAGTGTGIAGITKASLTYSQLSKEIANNIDTMAKALTTMQEQIDSLAAVVLQNRRGLDMLTAAQGGICLALDEKCCFWVNQSGXVQDNIRQLLNQASSLRERATQGWLNWEGTWKWXSWVLPLTGPLXSLLLLLLFGPCLLNLITQFVSSRLQAIKLQTNLSAGRHPRNIQESPF

SEQ ID NO: 2971 - protein, 73 aa, Homo sapiens
  SITE (52): Xaa equals any of the naturally occurring L-amino acids
  SITE (61): Xaa equals any of the naturally occurring L-amino acids
AQGICAVLQSPQAEKELLKCLWSETRFHMRHTYDEGLHLQKVTLFRDPHFLXSGRKSLLWXIPFPSSRAHLIA

SEQ ID NO: 2972 - protein, 79 aa, Homo sapiens
  SITE (5): Xaa equals any of the naturally occurring L-amino acids
  SITE (13): Xaa equals any of the naturally occurring L-amino acids
  SITE (21): Xaa equals any of the naturally occurring L-amino acids
GPPPXLKIQNCWXCGAHLCPXIREAEAGDRLTPRGGGCSEPRSRHCIPAWATERDSVSKKKKKKTDKKTQSLLSLGFCF

SEQ ID NO: 2973 - protein, 72 aa, Homo sapiens
  SITE (71): Xaa equals any of the naturally occurring L-amino acids
GKAFIWKLALTNHQNTHAGEKIYKCKNVKKLNLIHQKIHTGTKLYAYDHREANSVSSLLKGHQDSRMGKSXL

SEQ ID NO: 2974 - protein, 52 aa, Homo sapiens
PKYLLLFVSLRYFQNDLLLFSTSILKEFKKISMFLKSKITTALFILTCECTF

SEQ ID NO: 2975 - protein, 332 aa, Homo sapiens
ISDLLVGIFCMPITLLDNIIAGWPFGNTMCKISGLVQGISVAASVFTLVAIAVDRFQCVVYPFKPKLTIKTAFVIIMIIWVLAITIMSPSAVMLHVQEEKYYRVRLNSQNKTSPVYWCREDWPNQEMRKIYTTVLFANIYLAPLSLIVIMYGRIGISLFRAAVPHTGRKNQEQWHVVSRKKQKIIKMLLIVALLFILSWLPLWTLMMLSDYADLSPNELQIINIYIYPFAHWLAFGNSSVNPIIYGFFNENFRRGFQEAFQLQLCQKRAKPMEAYALKAKSHVLINTSNQLVQESTFQNPHGETLLYRKSAEKPQQELVMEELKETTNSSEI

SEQ ID NO: 2976 - protein, 143 aa, Homo sapiens
  SITE (105): Xaa equals any of the naturally occurring L-amino acids
PLCLLVLFKGTRGRVQAQFSGDEKRVGSQPHTAQQYRSHKRAGVSSEENSPKPSASLDGFFFFFSLTAGPGSTDQCPVARLEENSPVAVAALNQWGLLRLAGSQXLPCREGNYSLCSYLAHQIICYGTKQIFQTRLLVGGLCL

SEQ ID NO: 2977 - protein, 129 aa, Homo sapiens
  SITE (118): Xaa equals any of the naturally occurring L-amino acids
VAGITGTHHHDQLIFVFLVETGFHHVGQDGLNLLTSGDLPSSASQSAGITGVSHRTRPVLSCFDNLDPGSLWVGKSAPSLLLWGQLHLGPAFCLSACRQCWVAVPKRTAVPRAKKSSXFQKSQAFWGPT

SEQ ID NO: 2978 - protein, 53 aa, Homo sapiens
  SITE (53): Xaa equals any of the naturally occurring L-amino acids
NHLIYICRTTGHLIGHSGASLKPVAVFIRFPRFIQYVTGIKSNPSGSILKKSX

SEQ ID NO: 2979 - protein, 64 aa, Homo sapiens
  SITE (40): Xaa equals any of the naturally occurring L-amino acids
CFTKIGQWGVNTQVLEDIKREQIIAKAKASKPTTPPENRXRISIPLYKNYKQMHPFLSQEKICL

SEQ ID NO: 2980 - protein, 50 aa, Homo sapiens
EVGGQRFPNIYCSSTMCLAPRRCESKHSWMWLLLPSSVERTGIKQPYRER

SEQ ID NO: 2981 - protein, 84 aa, Homo sapiens
  SITE (74): Xaa equals any of the naturally occurring L-amino acids
LISQCLKRGKQWLLLTPPTPSPATFPDTSGLLTKPFQNLQSHYLSRWESQGDEARVVGHREEEKALIEEEEYPXQSHHHVQPPH

SEQ ID NO: 2982 - protein, 97 aa, Homo sapiens
  SITE (14): Xaa equals any of the naturally occurring L-amino acids
LKAGDPQRGWQLLXSGQVSFAGPLDGPALTGAAPPSCPGTPQSPRSHCCLLLAAASLESCDQAAKSLWAAGSASPKTEVQRLDLGLSPPASKPGLQV

SEQ ID NO: 2983 - protein, 49 aa, Homo sapiens
IILSELFSKLKKMTWLLVLINSIHNLHLLRCLIFNPHNVRVLLSLFSGR

SEQ ID NO: 2984 - protein, 72 aa, Homo sapiens
  SITE (46): Xaa equals any of the naturally occurring L-amino acids
  SITE (69): Xaa equals any of the naturally occurring L-amino acids
  SITE (70): Xaa equals any of the naturally occurring L-amino acids
LHLNEGYRLVRTDEYKPDSHIHPHPHSPPPGLQYYILCPLLLRGWXKRMGRVKFQTAFNGLTKIHLYFXXIF

SEQ ID NO: 2985 - protein, 27 aa, Homo sapiens
  SITE (23): Xaa equals any of the naturally occurring L-amino acids
GTESGESVGRRSRRFYGSCILRXELDR

SEQ ID NO: 2986 - protein, 87 aa, Homo sapiens
  SITE (87): Xaa equals any of the naturally occurring L-amino acids
KEKKKKKEKEKEKKEKEREKEKREREKREKEKEKHKHEKIKVEPVALAPSPVIPRLTLRVGAGQDKIVISKWSLPPRPSRRPRRTSX

SEQ ID NO: 2987 - protein, 57 aa, Homo sapiens
EWRLAGRLPRFKFWFYPSPAMLVRRLLNFNFLFCDMGNSHKNAFLIIVVKIRNKITY

SEQ ID NO: 2988 - protein, 75 aa, Homo sapiens
  SITE (65): Xaa equals any of the naturally occurring L-amino acids
SYHLCITPSTFFPSVCIGPITIPSFHTTSSMETQSLAPPKKKKSSRPEVFQNSDAFRFWNIRIYXVRYPRDGTQG

SEQ ID NO: 2989 - protein, 89 aa, Homo sapiens
VYIRKRQFCSLLLKLNTEHFCDPRCVCLCVFFPTLTNSPTLACWAIIKFSPGMIYLERESNSTDEGLSPTRLYPTSDLIISPSLHLQYI

SEQ ID NO: 2990 - protein, 61 aa, Homo sapiens
  SITE (50): Xaa equals any of the naturally occurring L-amino acids
  SITE (52): Xaa equals any of the naturally occurring L-amino acids
  SITE (60): Xaa equals any of the naturally occurring L-amino acids
KMGFLSNKHPNDQFCHSWGNLCIPDDQSFCLDLPSLKIPWKNQHVRFLGXEXNLGKWRFXQ

SEQ ID NO: 2991 - protein, 245 aa, Homo sapiens
WSRIKSCHLCHSLTMEEMKKTAIRLPKGKQKPIKTEWNSRCVLFTYFQGDISSVVDEHFSRALSNIKSPQELTPSSQSEGVMLKNDDSMSPNQWRYSSPWTKPQPEVPVTNRAANCNLHVPGPMAVNQFSPSLARRASVRPGELWHFSSLAGTSSLEPGYSHPFPARHLVPEPQPDGKREPLLSLLQQDRCLARPQESAARRMATLGQIAGRTGLLFQPASRLSSLLRNYYCIFVGFCQLPAFPN

SEQ ID NO: 2992 - protein, 86 aa, Homo sapiens
  SITE (44): Xaa equals any of the naturally occurring L-amino acids
  SITE (54): Xaa equals any of the naturally occurring L-amino acids
AMGRTWIGWTLRGKSSAFGRRWPTTLELPLRVYSCFVPAWENVXSKGTSSPRMXPPGPIWLSFPTISKLRPGILLPCHFSPDSVGT

SEQ ID NO: 2993 - protein, 41 aa, Homo sapiens
  SITE (2): Xaa equals any of the naturally occurring L-amino acids
  SITE (26): Xaa equals any of the naturally occurring L-amino acids
  SITE (31): Xaa equals any of the naturally occurring L-amino acids
  SITE (32): Xaa equals any of the naturally occurring L-amino acids
  SITE (34): Xaa equals any of the naturally occurring L-amino acids
  SITE (35): Xaa equals any of the naturally occurring L-amino acids
  SITE (36): Xaa equals any of the naturally occurring L-amino acids
YXQCTNNYVYSNLIILNSIFSCTVNXVLHVXXIXXXLFRKI

SEQ ID NO: 2994 - protein, 46 aa, Homo sapiens
SNNGQELFLKFKLHVQNGQRMASKVNTKKAKQKYIGISYANCRKKR

SEQ ID NO: 2995 - protein, 63 aa, Homo sapiens
  SITE (19): Xaa equals any of the naturally occurring L-amino acids
  SITE (30): Xaa equals any of the naturally occurring L-amino acids
LVRKVKLCLKSWGKPKGMXRSGPCMTSSRXFRKKFRTKEGGQNSVLSFPHLRSTCQRIHLVGL

SEQ ID NO: 2996 - protein, 72 aa, Homo sapiens
NHLAIDTNFPCEGKSKLFNVAKLAILVSHLGPAGSLACYSKSITFLWETFRRKIWVYKLIHLLHIFDFKMMT

SEQ ID NO: 2997 - protein, 51 aa, Homo sapiens
  SITE (11): Xaa equals any of the naturally occurring L-amino acids
ARLHLKKKETXCAPNFSLLLFEKIFLFVRVFLYLKCSLIKLLDGKQKKKVV

SEQ ID NO: 2998 - protein, 154 aa, Homo sapiens
GQDNPIGFLAYIMFWLVLTSSCPPYIAMSSIDDYKNRARSQLRISGLSPSAYWFGQALVDVSLYFLVFVFIYLMSYISNFEDMLLTIIHIIQIPCAVGYSFSLIFMTYVISFIFRKGRKNSGIWSFCFYVALYSLWLDLRSVSSKVIFHLSSLF

SEQ ID NO: 2999 - protein, 234 aa, Homo sapiens
  SITE (199): Xaa equals any of the naturally occurring L-amino acids
  SITE (205): Xaa equals any of the naturally occurring L-amino acids
  SITE (230): Xaa equals any of the naturally occurring L-amino acids
ASGHLTHSRSSSKGSVEEIMSQPKQKELAGSVRQKMLLDYSVYMGRCVPQESRSPQRSPLQSAESSPTAGKKLPEVPPSEEEEQEAWVNALLGRIFWDFLGEKYWSDLVSKKIQMKLSKIKLPYFMNELTLTELDMGVAVPKILQAFKPYVDHQGLWIDLEMSYNGSFLMTLETKMNLTKLGKEPLVEALKVGEIGKEXCRPPGXQNSAADSDEESSALLLPGRRLPPKXQRGR

SEQ ID NO: 3000 - protein, 49 aa, Homo sapiens
SRLVQVHVGPGALGNISSTASYILGCGALGPLPATGPLPIFLFFNNSPY

SEQ ID NO: 3001 - protein, 93 aa, Homo sapiens
  SITE (64): Xaa equals any of the naturally occurring L-amino acids
  SITE (67): Xaa equals any of the naturally occurring L-amino acids
  SITE (81): Xaa equals any of the naturally occurring L-amino acids
KEAAARCYTTSNNRVSALDQVGSRLHRAAAKVARVYACTNGCKHGHRPVVHYPCRVANQQNTIXALXHLCSLYGCPLAIEXDRGTHFTGQQVQ

SEQ ID NO: 3002 - protein, 17 aa, Homo sapiens
PPSPPTYSRSCGLSPRC

SEQ ID NO: 3003 - protein, 52 aa, Homo sapiens
KIPTLFAKNNNDKICEHTHNKRRYMFGQMHVKWWSTSLVIREMQIKVQLYAS

SEQ ID NO: 3004 - protein, 186 aa, Homo sapiens
LEPPASDPELQPAERPLPSPGSGEGAPVFLTGPRSQWVLRGAEVVLTCRAGGLPEPTLYWEKDGMALDEVWDSSHFALQPGRAEDGPGASLALRILAARLPDSGVYVCHARNAPRPRAGGALLQVHQPPESPPADPDEGPRAGGGALKCAPKTFWVNEGKHSQVPLLRDGQARARDRMALGGPPAA

SEQ ID NO: 3005 - protein, 134 aa, Homo sapiens
VTLVERCVNLPIVWMGGEPFAQRWPGLTHSHTGSQQSLDSARSPLGPHTLLHDALGMRTAWPSLSKLQAQCSLFACLPASLPAWGGPRLLWVPTLLPHPPPFTSLFISVSSAMCHPKPSHLPCFPGSSSKPPVV

SEQ ID NO: 3006 - protein, 96 aa, Homo sapiens
RGEAGPNLAWASRGPGLAAAVARLAWPTGCSVIAASSRPTGRRASASPTAGTCTATPASAKTDADIQAFFMSIDSLCKKYSRETSQVSCEGCGLVP

SEQ ID NO: 3007 - protein, 170 aa, Homo sapiens
  SITE (15): Xaa equals any of the naturally occurring L-amino acids
YRSGIPGSTHASGKXLTPEELLYRAVQSVNVTHDAVHAQMDVKLRSLICVGLNEQVLHLWLEVLCSSLPTVEKWYQPWSFLRSPGWVQIKCELRVLCCFAFSLSQDWELPAKREVGGVGLVGPALMELPKPFAGWLRWEPKCWCQRLGTTPAMPKACEVRGCPVCRRSSP

SEQ ID NO: 3008 - protein, 64 aa, Homo sapiens
FIDLNHDHPGVPDSHTRHPRNQTSLDLLVCCSSTMGSAPTSTAPPRSASALPRSHTPPWHLSAP

SEQ ID NO: 3009 - protein, 96 aa, Homo sapiens
  SITE (2): Xaa equals any of the naturally occurring L-amino acids
  SITE (75): Xaa equals any of the naturally occurring L-amino acids
  SITE (87): Xaa equals any of the naturally occurring L-amino acids
LXQDQRSDLLTVTKLVSGREPGIECELSLFSFVRVAKSTCLWLLRKTVVPAGHGAQPVIPALWEAKAGRSLEAGXRDQPGQHGETQXLPKIQKLAG

SEQ ID NO: 3010 - protein, 88 aa, Homo sapiens
  SITE (49): Xaa equals any of the naturally occurring L-amino acids
  SITE (55): Xaa equals any of the naturally occurring L-amino acids
  SITE (63): Xaa equals any of the naturally occurring L-amino acids
  SITE (71): Xaa equals any of the naturally occurring L-amino acids
PGVVVCICAPNYSASQVAGITGACHHAQLIFAFLVETRFHHIGQAGVEXLDLREXNLLKLPKXWNYRREPXGLAFFFFKKWETGALVY

SEQ ID NO: 3011 - protein, 70 aa, Homo sapiens
LASTLLEKQFQDQNMLNKQEIYTNLILKWTAFLSLALSHVALNTHMLKKSYTDTCMHLINYPISGAFNKF

SEQ ID NO: 3012 - protein, 62 aa, Homo sapiens
  SITE (5): Xaa equals any of the naturally occurring L-amino acids
  SITE (8): Xaa equals any of the naturally occurring L-amino acids
PRWAXGLXPGVRDQPGQHGEISPLQKIQKLTRHGVARLWYRLLQRLRQENCVRSEVRSYSEL

SEQ ID NO: 3013 - protein, 119 aa, Homo sapiens
GEAFALEMLGVGSEELTQGRDGSLLIDLTWTHRGGKTCGDHHRGHGPTSVIWETGLGRGGDFPKSPSIHDRGRAWELGTQGSSKRSRSLCYPQIHKLRITCIHFPPPWTLCFELFCLPD

SEQ ID NO: 3014 - protein, 67 aa, Homo sapiens
  SITE (51): Xaa equals any of the naturally occurring L-amino acids
  SITE (53): Xaa equals any of the naturally occurring L-amino acids
  SITE (56): Xaa equals any of the naturally occurring L-amino acids
GEAFALEMLGVGSEELTQGRDGSLLIDLTWTHRGGKTCGDHHRGHGPTSVXNXNWXAAKNRALGRGG

SEQ ID NO: 3015 - protein, 83 aa, Homo sapiens
  SITE (12): Xaa equals any of the naturally occurring L-amino acids
SALKNLTWFFSXFKNHCTKEEMSTLKTIIKRQRQGERDSLQAMLEKKEVLGAHKERRKAGRQNGLHLPVTRVNTGHSSLHSVL

SEQ ID NO: 3016 - protein, 76 aa, Homo sapiens
  SITE (70): Xaa equals any of the naturally occurring L-amino acids
  SITE (74): Xaa equals any of the naturally occurring L-amino acids
  SITE (75): Xaa equals any of the naturally occurring L-amino acids
  SITE (76): Xaa equals any of the naturally occurring L-amino acids
GVSLNNSFPRISPESRLVTLRRAVLCPDWGGSKGQGAGQGLKGALIQTREATTHQPAGFRIKAPTEKKNXLLFXXX

SEQ ID NO: 3017 - protein, 98 aa, Homo sapiens
NQITKYTLSILNYLFCFIDFYVFLYTYIIVLITVDLLEIWESNLRISILSFYQVVLAVLGPLHFPITFGIRLSIFPQNKACWDFEQDCMESINQFSEN

SEQ ID NO: 3018 - protein, 125 aa, Homo sapiens; identical to SEQ ID NO: 2786

SEQ ID NO: 3019 - protein, 124 aa, Homo sapiens
  SITE (1): Xaa equals any of the naturally occurring L-amino acids
XGGVNLFANDGSFLELFKRKMEEEQRQRQEEPPPGPQRPDQSAAAAGPGDPKRKGGPGSTLSFVGKRRGGNKLALKTGIVAKKQKTEDEVLTSKGDAWAKYMAEVKKYKAHQCGDDDKTRPLVK

SEQ ID NO: 3020 - protein, 23 aa, Homo sapiens
HVIHTKEYSLICIEIKHNKIKKK

SEQ ID NO: 3021 - protein, 70 aa, Homo sapiens
  SITE (8): Xaa equals any of the naturally occurring L-amino acids
  SITE (28): Xaa equals any of the naturally occurring L-amino acids
  SITE (35): Xaa equals any of the naturally occurring L-amino acids
  SITE (38): Xaa equals any of the naturally occurring L-amino acids
  SITE (47): Xaa equals any of the naturally occurring L-amino acids
  SITE (51): Xaa equals any of the naturally occurring L-amino acids
TFSFILSXKFDQLAKLNTPIKIFLHMKXLPIKILXLGXDGNIVPKWXHFAXLRTALPNSGIKGFEDGKKK

SEQ ID NO: 3022 - protein, 71 aa, Homo sapiens
KNPPVFLNDAPPTPPQPKAKASWTSSYAKEQACLRPLEESAPAWRHFLARWETVQSPWPTGSNSSLCASYR

SEQ ID NO: 3023 - protein, 61 aa, Homo sapiens
  SITE (26): Xaa equals any of the naturally occurring L-amino acids
  SITE (58): Xaa equals any of the naturally occurring L-amino acids
QAILSLESEQVPLMSAHWCLKNTFKXGAVAGNDWLIWDITRSRYFLDMFVYYTPKKGXNCC

SEQ ID NO: 3024 - protein, 47 aa, Homo sapiens
NVAYITSRVLKGPTNIVSLSVNSGRNVSFTLKVILQHVSNIGPQKFH

SEQ ID NO: 3025 - protein, 49 aa, Homo sapiens
  SITE (2): Xaa equals any of the naturally occurring L-amino acids
  SITE (39): Xaa equals any of the naturally occurring L-amino acids
  SITE (47): Xaa equals any of the naturally occurring L-amino acids
LXKESLPWTSCVMPRVYRVEVKIFVAFVFYIKKKDVQTXRQILEQRXNL

SEQ ID NO: 3026 - protein, 63 aa, Homo sapiens
  SITE (34): Xaa equals any of the naturally occurring L-amino acids
HNVFRVHPDCSMYQNFIPFKGGIILSIYTYHILXIHSSMYGHLGCFYALSVVNNATVNTCVQF

SEQ ID NO: 3027 - protein, 77 aa, Homo sapiens
  SITE (40): Xaa equals any of the naturally occurring L-amino acids
  SITE (58): Xaa equals any of the naturally occurring L-amino acids
  SITE (70): Xaa equals any of the naturally occurring L-amino acids
VMQAGSSLAGLCSLGGLVSMPRVAQACQKPPLQWALPVSXADTLQRVPGSGSYLGWSXKPGWDMRPYILXVVLSLDS

SEQ ID NO: 3028 - protein, 92 aa, Homo sapiens
  SITE (2): Xaa equals any of the naturally occurring L-amino acids
  SITE (26): Xaa equals any of the naturally occurring L-amino acids
  SITE (86): Xaa equals any of the naturally occurring L-amino acids
SXQVIILLSRECCSSLSYLMLFCSSXPRWGGMWDSGQDRGVECRVLTLCSLFLTLLSGASFLVLLVAECRIDLQCSWLQVMNSWSXLLHFSH

SEQ ID NO: 3029 - protein, 47 aa, Homo sapiens
  SITE (28): Xaa equals any of the naturally occurring L-amino acids
ALLNSPVPTSVFTYAVYLWDEFPEMELXLLGQRVNRCNFLRYFHKKC

SEQ ID NO: 3030 - protein, 68 aa, Homo sapiens
RSWQEAIVHPSSQNLSSSKPCYHRQKCFGALNKLEGQSMLQDCNSKARPGAVLELRVKDFVLWLGFPA

SEQ ID NO: 3031 - protein, 84 aa, Homo sapiens
FIQIALVLPNVFYCSRISYDIMLSNLITFWLQTFILTSKELSCLLRFLLARAVAQTFFGFDAYFDSFEEFWSDILWDAPQLGFV

SEQ ID NO: 3032 - protein, 53 aa, Homo sapiens
  SITE (47): Xaa equals any of the naturally occurring L-amino acids
ENTLLNKNSLSKCSEFSSSPFSHQIFKVVMILRKLCISFYLSLKCFXKLKNTC

SEQ ID NO: 3033 - protein, 46 aa, Homo sapiens
APEVKKRDLICLSLRGREQYTTTCFQDCVLNTHALNHSEHEEMETL

SEQ ID NO: 3034 - protein, 72 aa, Homo sapiens
  SITE (24): Xaa equals any of the naturally occurring L-amino acids
  SITE (29): Xaa equals any of the naturally occurring L-amino acids
  SITE (60): Xaa equals any of the naturally occurring L-amino acids
AQQSFHLTMLHLFCRTWKPFKIFXLQGSXMIKLGPFWTQMLPTSTHTNWLKIMKVFVCLXLIGKEVLPFELC

SEQ ID NO: 3035 - protein, 34 aa, Homo sapiens
  SITE (16): Xaa equals any of the naturally occurring L-amino acids
  SITE (19): Xaa equals any of the naturally occurring L-amino acids
  SITE (25): Xaa equals any of the naturally occurring L-amino acids
KETLRLIADFSSETMXNQXFSEWDXFSKGWKKDF

SEQ ID NO: 3036 - protein, 52 aa, Homo sapiens
GLPLKTTKEATERDLWTFWKMVRPQVDYGSSALEAEPPLWLPHIFWFLLSGT

SEQ ID NO: 3037 - protein, 46 aa, Homo sapiens
  SITE (35): Xaa equals any of the naturally occurring L-amino acids
  SITE (41): Xaa equals any of the naturally occurring L-amino acids
AGTSRSEGKRSSVLTRTEFQIEMFQTIEGEKWPGXSINLSXFHGCF

SEQ ID NO: 3038 - protein, 58 aa, Homo sapiens
  SITE (49): Xaa equals any of the naturally occurring L-amino acids
  SITE (51): Xaa equals any of the naturally occurring L-amino acids
  SITE (56): Xaa equals any of the naturally occurring L-amino acids
FIENVNILVCLTFSVRVNRNMYIKAHRKLHKNWFRFFEGCFFFPSCVFXAXSMSVXHR

SEQ ID NO: 3039 - protein, 33 aa, Homo sapiens
  SITE (30): Xaa equals any of the naturally occurring L-amino acids
FKNVILSKHMVHMCRKHPEPCITSKVQNPXIFS

SEQ ID NO: 3040 - protein, 99 aa, Homo sapiens
  SITE (73): Xaa equals any of the naturally occurring L-amino acids
  SITE (80): Xaa equals any of the naturally occurring L-amino acids
  SITE (85): Xaa equals any of the naturally occurring L-amino acids
FFYCHIPHIVLSFLLQNHHALQEGPTKSNHADARKGVGSALKTQKSHSAGNKDMPCPVGSRFLQEMKGFQGFXGGTNGLXCQRNXFILWVWASKLLYEG

SEQ ID NO: 3041 - protein, 56 aa, Homo sapiens
  SITE (22): Xaa equals any of the naturally occurring L-amino acids
  SITE (33): Xaa equals any of the naturally occurring L-amino acids
PPPPLQHELLCLKRQRAMPQQXRPSPWSPWPHXQLHGTPARQTAVLLAWLCYLQAL

SEQ ID NO: 3042 - protein, 55 aa, Homo sapiens
  SITE (46): Xaa equals any of the naturally occurring L-amino acids
  SITE (53): Xaa equals any of the naturally occurring L-amino acids
CHHAQLIFVFLVETGFCHVGQAGLELLTPSEPPALASPSAGNYRRXHAHPAEXLF

SEQ ID NO: 3043 - protein, 74 aa, Homo sapiens
  SITE (20): Xaa equals any of the naturally occurring L-amino acids
  SITE (56): Xaa equals any of the naturally occurring L-amino acids
  SITE (58): Xaa equals any of the naturally occurring L-amino acids
CGLLSVTVKELSQEKPAASXLPPSKPSELWGDSSPPGLYPACRSHSSLTRACVCRXLXLRVGGKARGRVGCDTR

SEQ ID NO: 3044 - protein, 91 aa, Homo sapiens
  SITE (60): Xaa equals any of the naturally occurring L-amino acids
QPCEVSTINSPFTVEETDIRESLNNSPKVKDSEQHPCDSRVMNPWKIFQISWDICPRNLXDGGKINCISGTRRYTYLEKTFDFLGFGPLPS

SEQ ID NO: 3045 - protein, 60 aa, Homo sapiens
WGKLIFLAASRIFRGESLLSHVGTLYTQHAHSLPGELGIASWNQRSIFSLLKSQMLIAPL

SEQ ID NO: 3046 - protein, 61 aa, Homo sapiens
AEVTLHGYQPLIIEQSLGELHKESRLNWLHIQQQSPLSTMVFGVTNSGYKSKGSFICFSGQ

SEQ ID NO: 3047 - protein, 95 aa, Homo sapiens
  SITE (88): Xaa equals any of the naturally occurring L-amino acids
PFNDPGVCSVERRGLWEAGWCFRLQSDQGLGAMEERYKEIKAGAFVIMGTGWLLREIGQWSYLGKVSSLCRPPAQPPHQMQPLKKIFXIALLRWY

SEQ ID NO: 3048 - protein, 41 aa, Homo sapiens
  SITE (19): Xaa equals any of the naturally occurring L-amino acids
  SITE (36): Xaa equals any of the naturally occurring L-amino acids
EHPFTPNPSTLYYLEIPPXLYPGLFATFQVGIISVXFGRNI

SEQ ID NO: 3049 - protein, 52 aa, Homo sapiens
AFHSHSLVLGRNCTSICNQPFCSCALRFLLCFYQFIWNKLEKEQLLSRNETI

SEQ ID NO: 3050 - protein, 68 aa, Homo sapiens
SLMSSTFIVLFLTLDYYNQPPTKSAIFSNKSAPVKKEVAQNTPICSLEGLLSALVCEVESQCSYSICV

SEQ ID NO: 3051 - protein, 74 aa, Homo sapiens
  SITE (20): Xaa equals any of the naturally occurring L-amino acids
LNKIKFEAKEAKIKKIKASXQKDQAANEGPEQSSEVNELNQIPSHKALTLTHDNVVTVSPYALTHVAGPYNHWV

SEQ ID NO: 3052 - protein, 63 aa, Homo sapiens
  SITE (31): Xaa equals any of the naturally occurring L-amino acids
  SITE (54): Xaa equals any of the naturally occurring L-amino acids
  SITE (56): Xaa equals any of the naturally occurring L-amino acids
QKGREGSQVDLMVRRSMKDPGFHCLSVLPSXVLASPKAAFPLGQDDCQSNLSNXFXLYLVGEY

SEQ ID NO: 3053 - protein, 56 aa, Homo sapiens
GHEVIYIRVWGDLTQILIHVLKTFYFKGWKRLHSSFNTLVICSSVLTYDKFPSRID

SEQ ID NO: 3054 - protein, 65 aa, Homo sapiens
  SITE (3): Xaa equals any of the naturally occurring L-amino acids
GTXHEAMINSFPSPTIPVAVSMSLVLNWDDLGLSSQSAKAEGSVLNSPGREWLPSTLLMPRDAWQ

SEQ ID NO: 3055 - protein, 58 aa, Homo sapiens
NNSCSGLMSLACLLSLASQGNHLFPRFRALRCLVSSRMTAAGADTNIKKSPAMDEAWG

SEQ ID NO: 3056 - protein, 61 aa, Homo sapiens
  SITE (32): Xaa equals any of the naturally occurring L-amino acids
  SITE (51): Xaa equals any of the naturally occurring L-amino acids
HEVPYVAIVSLPEVCFWRRVLTSVPSVAALTXDLDVCSEVFQLSIHDHGCXVHSPGCSSEI

SEQ ID NO: 3057 - protein, 68 aa, Homo sapiens
  SITE (46): Xaa equals any of the naturally occurring L-amino acids
  SITE (51): Xaa equals any of the naturally occurring L-amino acids
LSQDHKQSNTSGRKVPSLLKCKASAAGVVAMQSVPANGTAGFCNLXQAHCXMPHPFHSATCGGSAGRM

SEQ ID NO: 3058 - protein, 36 aa, Homo sapiens
EVGPLGGDEVMRAPPSRNGIKCPYEKIPEPLVVHEP

SEQ ID NO: 3059 - protein, 63 aa, Homo sapiens
  SITE (13): Xaa equals any of the naturally occurring L-amino acids
  SITE (15): Xaa equals any of the naturally occurring L-amino acids
RGEGRSGSQPAPXRXARRGEALAGAGDPELRLDLELMTTRLLPFPPVGRRPELVMSLAFLFVS

SEQ ID NO: 3060 - protein, 55 aa, Homo sapiens
  SITE (32): Xaa equals any of the naturally occurring L-amino acids
KNIYNVQGSYKHSHKINNREPTLQMENRTLLXLLSPVCPELIPSLLLEVTTILTF

SEQ ID NO: 3061 - protein, 39 aa, Homo sapiens
  SITE (25): Xaa equals any of the naturally occurring L-amino acids
INVFRSHRHYCFCRSIVVKSQLHRXFFNLTKCVCDISFF

SEQ ID NO: 3062 - protein, 70 aa, Homo sapiens
  SITE (37): Xaa equals any of the naturally occurring L-amino acids
  SITE (54): Xaa equals any of the naturally occurring L-amino acids
  SITE (65): Xaa equals any of the naturally occurring L-amino acids
ELTHYHKNSKGEIHPHGPIIFTKPLFQPWGLQLNMRXGWGKRKSKPYQRFESIXQSLLAKKSLHXDGFTR

SEQ ID NO: 3063 - protein, 43 aa, Homo sapiens
SKHRTCNILGVFEMTLSPVMTGIETQLVILKILSIGKGKSKGS

SEQ ID NO: 3064 - protein, 67 aa, Homo sapiens
  SITE (60): Xaa equals any of the naturally occurring L-amino acids
RRFSADLQSYLSSFLLSFLPFLSFLSFSFSLSLLSFLPFFLLTGELLEPGRRRLRDRDHXIALQPGQ

SEQ ID NO: 3065 - protein, 64 aa, Homo sapiens
IQRHLNGNLIIFQVDIIKLWDLYLFCAINSFGGLTRFMDPFSECFKIKKQTALQRIVTLLYIVQ

SEQ ID NO: 3066 - protein, 37 aa, Homo sapiens
NSSDETLWFVRHDSPGALGREFGQDKKKSEFSPQRVE

SEQ ID NO: 3067 - protein, 101 aa, Homo sapiens
  SITE (78): Xaa equals any of the naturally occurring L-amino acids
  SITE (82): Xaa equals any of the naturally occurring L-amino acids
  SITE (83): Xaa equals any of the naturally occurring L-amino acids
RRSLVMQAKNKDALQPIKEDRTGKAQDDAFWLQSLITDAFHDKGFQKIKEYFQQKESHFPQKYNRLLLYRLDRSINKXLDKXXFQSVSLLLNVFSDSSWMA

SEQ ID NO: 3068 - protein, 47 aa, Homo sapiens
LYEFKLSFRPFARQSFPRQGELQHKNLKMEEMEKKIYQLNMRLVSHA

SEQ ID NO: 3069 - protein, 80 aa, Homo sapiens
PNYLLMPPSPNTITLGIRSLTCESFGVEKTNIQLITGKVENLKNLYFVYERSLMRQNFKFNANFESIFIFSTVLFYFLNF

SEQ ID NO: 3070 - protein, 114 aa, Homo sapiens
  SITE (58): Xaa equals any of the naturally occurring L-amino acids
  SITE (78): Xaa equals any of the naturally occurring L-amino acids
  SITE (79): Xaa equals any of the naturally occurring L-amino acids
  SITE (89): Xaa equals any of the naturally occurring L-amino acids
QKLLGAPPSVLFVLPCGFSLAVEFIPAKCRMMPEVLLQQLMHTSMPTVTLLNLFFIPXNCRAWSLCSLRINCAQWAFXXFSLFAFSGRXGCVSCASIWPVVHVLNSYLHSLSPF

SEQ ID NO: 3071 - protein, 104 aa, Homo sapiens
  SITE (91): Xaa equals any of the naturally occurring L-amino acids
  SITE (95): Xaa equals any of the naturally occurring L-amino acids
NLEEKHFLRLHLENRVEDLWRKFQDVLKNYTDATEDRKAAFETLQVKDEKSSKEIEVQMKKIQKLQDAITISKGKIMIHSRESEDENRYIXNDKXIGPCTTAKT

SEQ ID NO: 3072 - protein, 30 aa, Homo sapiens
IYLHFKKKQLVVVDSLRKVPDQDRGKSVNR

SEQ ID NO: 3073 - protein, 60 aa, Homo sapiens
  SITE (4): Xaa equals any of the naturally occurring L-amino acids
  SITE (6): Xaa equals any of the naturally occurring L-amino acids
  SITE (34): Xaa equals any of the naturally occurring L-amino acids
  SITE (50): Xaa equals any of the naturally occurring L-amino acids
  SITE (57): Xaa equals any of the naturally occurring L-amino acids
RQVXHXKYDANFLGNSWQNRSINCVKTILWLEIXAHKLWKPLGLVHGKLXGKNGPLXNTL

SEQ ID NO: 3074 - protein, 68 aa, Homo sapiens
  SITE (60): Xaa equals any of the naturally occurring L-amino acids
  SITE (67): Xaa equals any of the naturally occurring L-amino acids
PLATSDLLTISISFAFSRMLYSQNQCVAFSEWLLSLSNMHLSFFHIFLWLDRCLFVLLSXHSFVWDXP

SEQ ID NO: 3075 - protein, 77 aa, Homo sapiens
AVAAIARHHRLDGLNNRNLFFHSSGGQKSKIKVSTGLVSFEASLLACRRPPSQCVFVWLFFLILVHAHAWHLTFLFS

SEQ ID NO: 3076 - protein, 90 aa, Homo sapiens
  SITE (6): Xaa equals any of the naturally occurring L-amino acids
  SITE (34): Xaa equals any of the naturally occurring L-amino acids
  SITE (39): Xaa equals any of the naturally occurring L-amino acids
  SITE (59): Xaa equals any of the naturally occurring L-amino acids
  SITE (65): Xaa equals any of the naturally occurring L-amino acids
IITILXSWVNDWYLGLVCHPVRLLTPLLPLSSLXYSFSXFILCLKFTPLFPTADMLAAXILGLQXTLFSPPLKIFHILPKIPEFGFPGTT

SEQ ID NO: 3077 - protein, 104 aa, Homo sapiens
SLNPRFLYPCAYSFSEISYGLSFYSFNIPRIDFIIYFLWLHVVFLVIAIYTYMHKYIYTYVNVCWEYVFTHIHIPQGHVSSLSIFKFWNCFVCLLYHGINGKEG

SEQ ID NO: 3078 - protein, 61 aa, Homo sapiens
  SITE (3): Xaa equals any of the naturally occurring L-amino acids
TGXYYFWVCLFYLTEIYEVISTPSYKIYFLSSGFLCITFLGPCLAHRIGLKYCWWPYIPAS

SEQ ID NO: 3079 - protein, 119 aa, Homo sapiens
  SITE (62): Xaa equals any of the naturally occurring L-amino acids
  SITE (63): Xaa equals any of the naturally occurring L-amino acids
DTPYISSASSYTGQSQLYAAQHQASSPTSSPATSFPPPPSSGASFQHGGPGAPPSSSAYALXXGTTGTLPAASELPASQRTGLRLKGIWFGPLLYLFMNRWVDGGVLFLTVCKLGNVRC

SEQ ID NO: 3080 - protein, 35 aa, Homo sapiens
  SITE (2): Xaa equals any of the naturally occurring L-amino acids
  SITE (28): Xaa equals any of the naturally occurring L-amino acids
SXQKGLSLAAAAPECLSTPVPGAGPSPXAPVNLVL

SEQ ID NO: 3081 - protein, 56 aa, Homo sapiens
  SITE (12): Xaa equals any of the naturally occurring L-amino acids
VSYIFVKILKDXFVLDLLFFLNCFLNCWHLSCFNHALRLSCLALLGAESSDHYLFF

SEQ ID NO: 3082 - protein, 119 aa, Homo sapiens
  SITE (82): Xaa equals any of the naturally occurring L-amino acids
  SITE (96): Xaa equals any of the naturally occurring L-amino acids
  SITE (102): Xaa equals any of the naturally occurring L-amino acids
GTSRAQPNFYIKDTLMVINFLLSRAWLMEQSRLSIFLINLVNEFSLVPSVQKVLVMKKAKQIQIHLSEIAAHWYLFQKFDYXISCSEVGKTFSFGXKILYRXLCLLVIPSNPIYRGIVL

SEQ ID NO: 3083 - protein, 50 aa, Homo sapiens
  SITE (21): Xaa equals any of the naturally occurring L-amino acids
  SITE (42): Xaa equals any of the naturally occurring L-amino acids
ESNWIFLKLKQKEAGKYENQXTQFIPQYTQLEMKPRIIDTHXNVRSEKGS

SEQ ID NO: 3084 - protein, 48 aa, Homo sapiens
  SITE (19): Xaa equals any of the naturally occurring L-amino acids
KAMGKIFLCENLYFVSLPXTVQVPAFHSEVSYSMTLFIMTSVFVYSFE

SEQ ID NO: 3085 - protein, 94 aa, Homo sapiens
AASEVCRVMSFVKFGKFSAIASLIFQPHTFSHLPWNPYDTDVRSLFIVPQVPKALSILFSHAFSIHFSEWEISVLSSSSLVLSSVLSILPVIPL

SEQ ID NO: 3086 - protein, 55 aa, Homo sapiens
  SITE (28): Xaa equals any of the naturally occurring L-amino acids
  SITE (30): Xaa equals any of the naturally occurring L-amino acids
  SITE (42): Xaa equals any of the naturally occurring L-amino acids
CYRLFKKVLTLYGLKIQICLPSIILSLXLXTEGKWKHITYLXQLLVSDTQHLWVI

SEQ ID NO: 3087 - protein, 59 aa, Homo sapiens
IQLTSYWIWNVIRKKYAQRTVTYPHIDVPTQPHFIASPDPFQIQLNYFGPQSPRLPGTC

SEQ ID NO: 3088 - protein, 91 aa, Homo sapiens
  SITE (55): Xaa equals any of the naturally occurring L-amino acids
  SITE (56): Xaa equals any of the naturally occurring L-amino acids
  SITE (62): Xaa equals any of the naturally occurring L-amino acids
TFKKICQSYVKHFRGLFCFLPALSPIHTTSPMSTFKEKPSHIVSLKGSFIINVTXXVHRYIXCLFKMTRDQICQIFLSDFYQGHPRYVSSV

SEQ ID NO: 3089 - protein, 133 aa, Homo sapiens
  SITE (53): Xaa equals any of the naturally occurring L-amino acids
  SITE (95): Xaa equals any of the naturally occurring L-amino acids
APQVDHRDCRGATRPHALRRRSVATSAAHPTPPHSTGPAAAPRRQAATWGSPXGSAPRGPPSSAFSHCRRLLAAPNPANGGRGGRKAGRPKPRRXRFRAPGLLRPGRRETCPAVLEGGEGSPVALPTLQSCWS

SEQ ID NO: 3090 - protein, 82 aa, Homo sapiens
  SITE (79): Xaa equals any of the naturally occurring L-amino acids
PPSTRLASSNLIFLDCRSWSPSGLSCHWEGFEGRPGLGVPAIAWGPGALRVPRGGLSQVDHVLKLLGLAFSAGWTHHLXFVI

SEQ ID NO: 3091 - protein, 80 aa, Homo sapiens
  SITE (1): Xaa equals any of the naturally occurring L-amino acids
XEQKLELHRGGGRSRTSGSPGLQEFGTRSDAVISQRTPRIARSRQKLVGARKDPPLEPSQGAWLCQRLDFGLLASRTEKE

SEQ ID NO: 3092 - protein, 92 aa, Homo sapiens
  SITE (27): Xaa equals any of the naturally occurring L-amino acids
  SITE (50): Xaa equals any of the naturally occurring L-amino acids
  SITE (79): Xaa equals any of the naturally occurring L-amino acids
  SITE (85): Xaa equals any of the naturally occurring L-amino acids
  SITE (92): Xaa equals any of the naturally occurring L-amino acids
LGPQMCTTMLFCRDASFVEMGSFCIGXDGLEHLASSNPPSLASQSVMIIXVSHCAQPSFETGLLLESYSACSLPELPHXSKLGRXLPPTGFX

SEQ ID NO: 3093 - protein, 47 aa, Homo sapiens
LVPNRHEFGTSSGVRLWAASPWATSGPGIYQLVSASSSRVQGSGGDP

SEQ ID NO: 3094 - protein, 65 aa, Homo sapiens
  SITE (41): Xaa equals any of the naturally occurring L-amino acids
PFILFVWMHSPSLRIGIKFYQGFLLLPALPLFPPDFLSLLXLFWSVFQVRYFPTISSEPWLSIHI

SEQ ID NO: 3095 - protein, 54 aa, Homo sapiens
KFISCLYKIHNDSCQLAGCSLPSGNPGTQALFILWLSHLTHVASSTALLLSAQS

SEQ ID NO: 3096 - protein, 41 aa, Homo sapiens
  SITE (11): Xaa equals any of the naturally occurring L-amino acids
  SITE (40): Xaa equals any of the naturally occurring L-amino acids
KGSNQQCPYSXIKNLNFNISSDFCHRNLNQVFWYSIFKFXE

SEQ ID NO: 3097 - protein, 126 aa, Homo sapiens
  SITE (103): Xaa equals any of the naturally occurring L-amino acids
  SITE (117): Xaa equals any of the naturally occurring L-amino acids
  SITE (123): Xaa equals any of the naturally occurring L-amino acids
LCCPGWSALAQSFTAHCSLHLLGSSDPPTPASRVAGKTAAHHHTQLNFLIFSRDGVSLYYLGFLTWKIELLELLGSSDPPLGLPKRWDYRCEPPDLGLKSTYXFSISFLKVRRVKTXISIKSXKLS

SEQ ID NO: 3098 - protein, 48 aa, Homo sapiens
  SITE (46): Xaa equals any of the naturally occurring L-amino acids
  SITE (47): Xaa equals any of the naturally occurring L-amino acids
HSLHLAGLCRMTQIWCPYCPMWFPFLFFFPHFDSAHSLVVCWERVXXK

SEQ ID NO: 3099 - protein, 49 aa, Homo sapiens
  SITE (11): Xaa equals any of the naturally occurring L-amino acids
  SITE (43): Xaa equals any of the naturally occurring L-amino acids
VSLFEVYSLVXFSIFRVMQPLPLPNFRTFSSFFSFLHIKIFKXLFNDNI

SEQ ID NO: 3100 - protein, 53 aa, Homo sapiens
GQQSFLSRVERETHVLPRPCSVCSVGRVVGTHLAQIDASLAVGEGPVRFVYGS

SEQ ID NO: 3101 - protein, 67 aa, Homo sapiens
LKPIVLVAQLPVQKDLSSFFSFMACMLQLNKGERALFRSSIGMSKIPARLNWSSEFCLMSMKHNKGF

SEQ ID NO: 3102 - protein, 89 aa, Homo sapiens
  SITE (7): Xaa equals any of the naturally occurring L-amino acids
  SITE (78): Xaa equals any of the naturally occurring L-amino acids
  SITE (81): Xaa equals any of the naturally occurring L-amino acids
NVLFCMXTSCTPMYDVLRRVHHHSWDIPAKNAYPQSDHEETLGKPQFGTACKIIGLYSSKVPRSRKTKTEELSQVKGXQEXTTTRCGGI

SEQ ID NO: 3103 - protein, 50 aa, Homo sapiens
  SITE (6): Xaa equals any of the naturally occurring L-amino acids
  SITE (16): Xaa equals any of the naturally occurring L-amino acids
  SITE (24): Xaa equals any of the naturally occurring L-amino acids
  SITE (45): Xaa equals any of the naturally occurring L-amino acids
  SITE (46): Xaa equals any of the naturally occurring L-amino acids
LEGILXIIKSNFSTMXLKSKHPHXLNTSSDKKLTILQSIHRVKAXXYLSS

SEQ ID NO: 3104 - protein, 42 aa, Homo sapiens
  SITE (27): Xaa equals any of the naturally occurring L-amino acids
TTSQDKQHSENSSLLPLIFNLEILWLXMVSFFGALMETLTQL

SEQ ID NO: 3105 - protein, 78 aa, Homo sapiens
  SITE (17): Xaa equals any of the naturally occurring L-amino acids
  SITE (22): Xaa equals any of the naturally occurring L-amino acids
  SITE (30): Xaa equals any of the naturally occurring L-amino acids
  SITE (43): Xaa equals any of the naturally occurring L-amino acids
  SITE (44): Xaa equals any of the naturally occurring L-amino acids
  SITE (48): Xaa equals any of the naturally occurring L-amino acids
  SITE (50): Xaa equals any of the naturally occurring L-amino acids
  SITE (57): Xaa equals any of the naturally occurring L-amino acids
  SITE (74): Xaa equals any of the naturally occurring L-amino acids
ELHYILCKLFLFNLCLXNKWTXFKYYWRLXNMHTKFSFSLGIXXIGRXSXSLHLVVXETNISNSHFRGNRWKGXARGG

SEQ ID NO: 3106 - protein, 117 aa, Homo sapiens
  SITE (117): Xaa equals any of the naturally occurring L-amino acids
LHRAGLSYEARHVVSPEQIATSDKMQHFKRTGTGTPVKRVRKAIEKSETTSEHTCQLCGGWFDTKIGLSNHVRGHLKRLGKTKWDAHKSPICVLNEMMQNEEKYEKILKALNSRRIX

SEQ ID NO: 3107 - protein, 92 aa, Homo sapiens
  SITE (39): Xaa equals any of the naturally occurring L-amino acids
FLVEMGFHRHHVGQPGLKLLTSGDPPALASQSAGITGMXHRTWPHLIYIIKQVQALPDFILTFCFLLLHYLSPWVGSSPLSLFYSFLSFLPH

SEQ ID NO: 3108 - protein, 55 aa, Homo sapiens
CSTCKCVAYAIMFIHSSVHTVFIRSDISPHFCLTPVSQKSDGISYSLQFYLADIY

SEQ ID NO: 3109 - protein, 69 aa, Homo sapiens
  SITE (43): Xaa equals any of the naturally occurring L-amino acids
  SITE (60): Xaa equals any of the naturally occurring L-amino acids
  SITE (61): Xaa equals any of the naturally occurring L-amino acids
LSIMHELLLWFRMISVSAVLSSPFCFHHIGISLLINNCGKEKXNALIEDCINQYTTFHWXXSLVAFLKR

SEQ ID NO: 3110 - protein, 46 aa, Homo sapiens [sequence omitted]

SEQ ID NO: 3111 - protein, 132 aa, Homo sapiens
  SITE (75): Xaa equals any of the naturally occurring L-amino acids
  SITE (94): Xaa equals any of the naturally occurring L-amino acids
  SITE (102): Xaa equals any of the naturally occurring L-amino acids
  SITE (106): Xaa equals any of the naturally occurring L-amino acids
  SITE (112): Xaa equals any of the naturally occurring L-amino acids
  SITE (121): Xaa equals any of the naturally occurring L-amino acids
  SITE (123): Xaa equals any of the naturally occurring L-amino acids
SYFPPFRTPLVRNCPCERPYLRGGEQRPPCWRRRTTGIPRTRGAGYLSIFCLFSHCFISVWTHACLLDASGYKAXLFYFPGVVLLQLCHTQLDXHTLLAYEXPVYXGRKLEXKRSGDAATXLXLLLLLAGYS

SEQ ID NO: 3112 - protein, 81 aa, Homo sapiens
  SITE (46): Xaa equals any of the naturally occurring L-amino acids
  SITE (53): Xaa equals any of the naturally occurring L-amino acids
  SITE (55): Xaa equals any of the naturally occurring L-amino acids
EKRRKSKPVYLVYLFFLRRKKFIFTRCFKLGFLTRNQKTTGGNIRXRTMSLFXYXFSLPTPTMDNQLRQPTRKHLQPDGYK

SEQ ID NO: 3113 - protein, 68 aa, Homo sapiens
  SITE (37): Xaa equals any of the naturally occurring L-amino acids
VILRSHTIYCIWNLQSNEDALEMASYLSDLLEYFNIXLLICFLRGTMTWVESVAGCFHFQRFDFGQVA

SEQ ID NO: 3114 - protein, 82 aa, Homo sapiens
  SITE (42): Xaa equals any of the naturally occurring L-amino acids
  SITE (75): Xaa equals any of the naturally occurring L-amino acids
  SITE (78): Xaa equals any of the naturally occurring L-amino acids
  SITE (82): Xaa equals any of the naturally occurring L-amino acids
TVHFFPDSLYGTASLFASEGQGLQDLLLWSPRNHIQTSQQGXMAFQFAYDPLRQGSFSQYTLCFSQGDLPLSSLXVLXVPDX

SEQ ID NO: 3115 - protein, 57 aa, Homo sapiens
CFCLMCSPNFLSSRLFQINFTCFNLGLKQRKRISSAHLFFFKWKNKVQRLSLIPHNI

SEQ ID NO: 3116 - protein, 53 aa, Homo sapiens
  SITE (40): Xaa equals any of the naturally occurring L-amino acids
AAYSDIQHKALPSICPVILACLPHSIRQRPVAAQKAQYAXLILKFKFAFEYAV

SEQ ID NO: 3117 - protein, 76 aa, Homo sapiens
  SITE (74): Xaa equals any of the naturally occurring L-amino acids
SSSPVPSQSIKTGRGGCFFRYPKSQQKIMRHMKKQRNMAQLMEQNKSPEFDPRETEINELSDKEFKMIILKKLXML

SEQ ID NO: 3118 - protein, 63 aa, Homo sapiens
  SITE (10): Xaa equals any of the naturally occurring L-amino acids
  SITE (18): Xaa equals any of the naturally occurring L-amino acids
  SITE (29): Xaa equals any of the naturally occurring L-amino acids
  SITE (46): Xaa equals any of the naturally occurring L-amino acids
  SITE (50): Xaa equals any of the naturally occurring L-amino acids
  SITE (58): Xaa equals any of the naturally occurring L-amino acids
SQQSGFRAMXFNPKVNTXLIIISLIPPHXGLDIPGTLLNHFYLNSXKFLXPTLLRALXVAGFG

SEQ ID NO: 3119 - protein, 72 aa, Homo sapiens
  SITE (28): Xaa equals any of the naturally occurring L-amino acids
  SITE (45): Xaa equals any of the naturally occurring L-amino acids
TKTKENQHLPPTPPTSTPTLIHGGNSRXIFCFNLKIYNIKGNCVXLFYCLKSHFKYSLEQMIFSKYSLEQRK

SEQ ID NO: 3120 - protein, 62 aa, Homo sapiens
  SITE (23): Xaa equals any of the naturally occurring L-amino acids
  SITE (54): Xaa equals any of the naturally occurring L-amino acids
  SITE (61): Xaa equals any of the naturally occurring L-amino acids
NTCLEKCIHIIWIVKRWLILNLXISFLHGKLFLTRCTVKHLQDEKFGILHQENXVSLDFLXI

SEQ ID NO: 3121 - protein, 46 aa, Homo sapiens
LGEAALSRVVTDVPDVCLPVYRCNFSNLKAGYLRISCMCIIFLLCN

SEQ ID NO: 3122 - protein, 47 aa, Homo sapiens
  SITE (19): Xaa equals any of the naturally occurring L-amino acids
TTAVTLHQLFAQLLFDTAXFAASSSPDLASKASTKSSHIPCFSLPTC

SEQ ID NO: 3123 - protein, 77 aa, Homo sapiens
DATILKFLFPRVASFTALVVSLEFCPTASKFSDHISEMPSDLRLIPPCMGPLSRPSQAVGEMSVCFSLRVSSTVSSI

SEQ ID NO: 3124 - protein, 100 aa, Homo sapiens
  SITE (97): Xaa equals any of the naturally occurring L-amino acids
SESFFLGLSVISGTCYHPRLSTLGNVISRRTLAQPMPSVSRLNMFRGRGTARPASPSHTWGHVFSGTQTPKAHGKCPCKLSPDFLIFLLGPQTLNTXMRA

SEQ ID NO: 3125 - protein, 57 aa, Homo sapiens
  SITE (18): Xaa equals any of the naturally occurring L-amino acids
VIEQIVHFYQDFPLPLPXSVFSLFLARRKHLGHRPFIHNGVYFPKQISLDYFNSRAI

SEQ ID NO: 3126 - protein, 44 aa, Homo sapiens
LTFHMIIFSTISEIQELKESQKSSTLFLWGSRRPRKLFYLELYN

SEQ ID NO: 3127 - protein, 83 aa, Homo sapiens
  SITE (80): Xaa equals any of the naturally occurring L-amino acids
HYELSGFKQHKFIFLQFWKPKIKISTGLFFLKSSRKSLFPCLFQFLEATYISWLMAPYSYHPILLLKSLHLLGKSASLLXESL

SEQ ID NO: 3128 - protein, 85 aa, Homo sapiens
  SITE (29): Xaa equals any of the naturally occurring L-amino acids
  SITE (51): Xaa equals any of the naturally occurring L-amino acids
  SITE (61): Xaa equals any of the naturally occurring L-amino acids
  SITE (66): Xaa equals any of the naturally occurring L-amino acids
  SITE (80): Xaa equals any of the naturally occurring L-amino acids
  SITE (83): Xaa equals any of the naturally occurring L-amino acids
GHGSLKPLGPAWPGMAMSRPSCQLRHEAXAGPLCQVTPLSGCASACLKLGXKSSSSKTRSXKAIPXTKGNSLATLKVFKXGWXHA

SEQ ID NO: 3129 - protein, 100 aa, Homo sapiens
VFPSPHFSSEVTEAQSDKETCPRPHTGWCSSRDLNPRSLTLEPKLLTMTSYLIHCFTGETDHLTDILSVSNLTTLSPVVCTEPGAVLRNGDLAVNKIESP

SEQ ID NO: 3130 - protein, 47 aa, Homo sapiens
GFTHLHSPGREREMKTVRGETPQKCNSTPTPSLHIYQEMEFIISFLF

SEQ ID NO: 3131 - protein, 53 aa, Homo sapiens
GILLQLYLSYSHLRAPTPLVQPSFHQSFLEPCQFFVSLPCLLSLPESRHSCVP

SEQ ID NO: 3132 - protein, 76 aa, Homo sapiens
  SITE (12): Xaa equals any of the naturally occurring L-amino acids
RHVAVHLLYMWXTKERWSCHVEHAWPPSLFLLAQLQAFTHASFQLAYLCLQLNFTGCSLVEKKLFWGCFLVKGKPY

SEQ ID NO: 3133 - protein, 80 aa, Homo sapiens
  SITE (27): Xaa equals any of the naturally occurring L-amino acids
  SITE (72): Xaa equals any of the naturally occurring L-amino acids
SSSNIHIKLCRYHILFCEKSQVSHWQXTPVHRELECKGKDSHLDQREPAFLHTPLGGYLVPFPRPPASAFCXCVCVRAHK

SEQ ID NO: 3134 - protein, 62 aa, Homo sapiens
  SITE (41): Xaa equals any of the naturally occurring L-amino acids
  SITE (45): Xaa equals any of the naturally occurring L-amino acids
  SITE (46): Xaa equals any of the naturally occurring L-amino acids
  SITE (49): Xaa equals any of the naturally occurring L-amino acids
  SITE (50): Xaa equals any of the naturally occurring L-amino acids
DLRTTHDEINLSSLQSSAVSYLGGNSVMGSLCIACLHQIGXLVGXXSTXXPKGCFRGCPVQG

SEQ ID NO: 3135 - protein, 74 aa, Homo sapiens
  SITE (55): Xaa equals any of the naturally occurring L-amino acids
  SITE (56): Xaa equals any of the naturally occurring L-amino acids
TKSASRVIPKHQMLSNTVIPIIIFIIFLFVSNYKTSTCLFWTNWKVQTNRNMKTXXIIVILRTFFSPRFSTRLM

SEQ ID NO: 3136 - protein, 77 aa, Homo sapiens
SFWYQMRTQHTQIHTDTYKDVYTASYICRKREGSKNSCDEGLKPNIFVIILYIYILFFFYLGEARKHTLLFFVSFLF

SEQ ID NO: 3137 - protein, 63 aa, Homo sapiens
  SITE (48): Xaa equals any of the naturally occurring L-amino acids
  SITE (60): Xaa equals any of the naturally occurring L-amino acids
  SITE (62): Xaa equals any of the naturally occurring L-amino acids
  SITE (63): Xaa equals any of the naturally occurring L-amino acids
YSKRRNSGRDYNSCLGNWSQDCTTASQPGRQSKQDSLRKKKKPKNRIXMTFLNFPYSQVXPXX

SEQ ID NO: 3138 - protein, 48 aa, Homo sapiens
TPSEHNILKCIRGRVWWLTPVIPALWEAKVGGSPEVRSLRPAWPISWA

SEQ ID NO: 3139 - protein, 58 aa, Homo sapiens
  SITE (51): Xaa equals any of the naturally occurring L-amino acids
  SITE (52): Xaa equals any of the naturally occurring L-amino acids
  SITE (53): Xaa equals any of the naturally occurring L-amino acids
CLQQCIVIGKQITDFLAFICVITSPPSATREVFQNFPCNYIKLARASQHLXXXNLSGR

SEQ ID NO: 3140 - protein, 65 aa, Homo sapiens
  SITE (27): Xaa equals any of the naturally occurring L-amino acids
  SITE (38): Xaa equals any of the naturally occurring L-amino acids
  SITE (43): Xaa equals any of the naturally occurring L-amino acids
  SITE (50): Xaa equals any of the naturally occurring L-amino acids
QICRPCFRHIPIHIHVCIHIHVHIYIXIPIYIHMYYCXCLYMXLILSMRXSLMLTYVFLRAFSTS

SEQ ID NO: 3141 - protein, 43 aa, Homo sapiens
  SITE (33): Xaa equals any of the naturally occurring L-amino acids
  SITE (38): Xaa equals any of the naturally occurring L-amino acids
TKSYRSTSIFIGFMEMIWSPSHERVCLKKKALXFMNLXVSFKL

SEQ ID NO: 3142 - protein, 103 aa, Homo sapiens
EQRRPHWVFTAAFKQDDSQPPSPWLAASRDSETLQANGLSILLLLSVFWCFVNPSGNDPDAPCPSKGIGTCHCAPKSLSSWPWLFSCMGSCVSRYQVVAPFQP

SEQ ID NO: 3143 - protein, 25 aa, Homo sapiens
  SITE (24): Xaa equals any of the naturally occurring L-amino acids
MPSSLCVVLKHDILSANKKQYFVXI

SEQ ID NO: 3144 - protein, 78 aa, Homo sapiens
  SITE (8): Xaa equals any of the naturally occurring L-amino acids
  SITE (62): Xaa equals any of the naturally occurring L-amino acids
  SITE (75): Xaa equals any of the naturally occurring L-amino acids
  SITE (76): Xaa equals any of the naturally occurring L-amino acids
SVGWIMGXFNLIVPFEQFEFWLLWACTIFTIKNKGFLVYVHYLYFFLGFFPEFSCTLVWCDXWELNGIIMLLLWXXIG

SEQ ID NO: 3145 - protein, 61 aa, Homo sapiens
GGPELSLHFLLPCGVLGLNIYHEMPWPCIFFLLLDNRILNCFDLVIKVWETSLHIFSFNLY

SEQ ID NO: 3146 - protein, 49 aa, Homo sapiens
IYSRVHIQVSELVFMMCGISEVICHQLLLVLSFSHLCHPSDFDGPPCLA

SEQ ID NO: 3147 - protein, 45 aa, Homo sapiens
  SITE (9): Xaa equals any of the naturally occurring L-amino acids
  SITE (13): Xaa equals any of the naturally occurring L-amino acids
IIYQWFISXKKVXISQMPVRFFSDLQVDHASLELLMLDGSSFQKH

SEQ ID NO: 3148 - protein, 55 aa, Homo sapiens
  SITE (54): Xaa equals any of the naturally occurring L-amino acids
PGVSQLRLRIIITRRMFQIFMRKLSLQGFGFSLSEVGPNHQHLKICSGDSVEQXG

SEQ ID NO: 3149 - protein, 44 aa, Homo sapiens
  SITE (37): Xaa equals any of the naturally occurring L-amino acids
  SITE (39): Xaa equals any of the naturally occurring L-amino acids
SAGLFQVFEANRRCNLNHSSQKIALSKYTILILKLGXGXPGSNC

SEQ ID NO: 3150 - protein, 94 aa, Homo sapiens
TSMINSMCFTQSIRLLFRLLGCFGNFDGAFWRVAWEAKKELRAITALTKTIEQQEVQCSPLASPLLYSFNTGEVCELWYTLNFQLRGHWPFSLS

SEQ ID NO: 3151 - protein, 49 aa, Homo sapiens
  SITE (46): Xaa equals any of the naturally occurring L-amino acids
ASVRGGAARNNPVRPQPGRGGGRCGSRTQTAAARASRLPPEPGGPXPGP

SEQ ID NO: 3152 - protein, 86 aa, Homo sapiens
  SITE (80): Xaa equals any of the naturally occurring L-amino acids
REQKLELHRGGGRSRTSGSPGLQEFGTSRAVEVFKGLYSPYKYSCAQKSMTFNSKWPLTFKKPCGYPSADLGEVLAIICXFIRCHH

SEQ ID NO: 3153 - protein, 50 aa, Homo sapiens
REQKLELHRGGGRSRTSGSPGLQEFGTSKEEERNIIIIIENAWGQLHWKT

SEQ ID NO: 3154 - protein, 51 aa, Homo sapiens
  SITE (15): Xaa equals any of the naturally occurring L-amino acids
RSRSQVSHLLWTELXPPDNSYIETLTPNVTEFGDGVSKDRIKVKGDHKVGG

SEQ ID NO: 3155 - protein, 58 aa, Homo sapiens
  SITE (24): Xaa equals any of the naturally occurring L-amino acids
  SITE (41): Xaa equals any of the naturally occurring L-amino acids
  SITE (42): Xaa equals any of the naturally occurring L-amino acids
  SITE (43): Xaa equals any of the naturally occurring L-amino acids
  SITE (57): Xaa equals any of the naturally occurring L-amino acids
KALNKFQLKLIQFQLSFPITGDAXKGKKKNWVGYLILGSYXXXSKIIKVSPDDAVLXT

SEQ ID NO: 3156 - protein, 81 aa, Homo sapiens
VISPMPWSASAHEQKARAFKDSPLWFLSLRNHSANCSSLPEVIVSYVLSNFLVVYNGRASLVVVASSWPEAEVEISFNSHC

SEQ ID NO: 3157 - protein, 89 aa, Homo sapiens
  SITE (62): Xaa equals any of the naturally occurring L-amino acids
EAISTYLHLDRVTGDQHTPPSPQQQEESTHTFISTGGRGISTHLHLHRGTGARLPTPLGDTXWACVKSHGSKLWSLSIGTALYYLSWKI

SEQ ID NO: 3158 - protein, 117 aa, Homo sapiens
  SITE (52): Xaa equals any of the naturally occurring L-amino acids
QSGAHEPDTQTATEEILPRDPSKVGSGPTHGPPPSQVHPYQTTGYSPYEILXSQPPPIIGQIKGDLRELRDLTLRKQMQGLGIAMQDVYGWVRERMPITWQTQHTPLNPGTLFGSRN

SEQ ID NO: 3159 - protein, 99 aa, Homo sapiens
  SITE (45): Xaa equals any of the naturally occurring L-amino acids
  SITE (48): Xaa equals any of the naturally occurring L-amino acids
  SITE (84): Xaa equals any of the naturally occurring L-amino acids
  SITE (99): Xaa equals any of the naturally occurring L-amino acids
RENQLSPDCELSITLRNAVFVFLPPGDKRQSLGTGFPSPKNLLGXSGXLTSSTDAFPWPLQGPGWNKCVRGKTGLPSSMGSIPXSQPSMGRNSWHPANX

SEQ ID NO: 3160 - protein, 101 aa, Homo sapiens
LVPNSARASASLVAGITGMCHHAWLIFVFLVEMGFLHVGQAGLKLPTSGDLPASASQSAGITGVSHRAGLNSIFLSTEFGFTPRKYFAQVSKHWTHLVPLR

SEQ ID NO: 3161 - protein, 78 aa, Homo sapiens
  SITE (53): Xaa equals any of the naturally occurring L-amino acids
  SITE (55): Xaa equals any of the naturally occurring L-amino acids
  SITE (58): Xaa equals any of the naturally occurring L-amino acids
  SITE (64): Xaa equals any of the naturally occurring L-amino acids
  SITE (71): Xaa equals any of the naturally occurring L-amino acids
TLAYNYWFKSLFAIHLGMFLGMELLGWFCNSLWLASSGTAILVFTEPAIIYIXTXNGXHVNFSXSLATLAXFFLFYPT

SEQ ID NO: 3162 - protein, 54 aa, Homo sapiens
  SITE (38): Xaa equals any of the naturally occurring L-amino acids
  SITE (40): Xaa equals any of the naturally occurring L-amino acids
NLHLCPQNESSLTGLVNQRQLQCSGGWVWVYMWEWTPXRXVEVPSPFPLACKYL

SEQ ID NO: 3163 - protein, 78 aa, Homo sapiens
  SITE (47): Xaa equals any of the naturally occurring L-amino acids
  SITE (65): Xaa equals any of the naturally occurring L-amino acids
  SITE (71): Xaa equals any of the naturally occurring L-amino acids
SSEPQVPFPLTRGCDALIQPLCPVWELFPTVKPVYCPSLDHVVGADXFTTRSAIFLWLQCPGFHXKACLPXPYFGWPN

SEQ ID NO: 3164 - protein, 112 aa, Homo sapiens
  SITE (100): Xaa equals any of the naturally occurring L-amino acids
  SITE (101): Xaa equals any of the naturally occurring L-amino acids
SKPPPALPWSLLIGLPASILVLSREIFNKKQVKITSEKMTTYKRHNFLTEYQIVHNGEKVYECKECRKTFIRAQHLVNTLRIHTGEKPYKCKECGRPLDXXHILFDITNFTP

SEQ ID NO: 3165 - protein, 39 aa, Homo sapiens
  SITE (16): Xaa equals any of the naturally occurring L-amino acids
  SITE (27): Xaa equals any of the naturally occurring L-amino acids
  SITE (29): Xaa equals any of the naturally occurring L-amino acids
KTMFISLYNPEMIILXFTVFAHVNILXIXKIGLFILKKF

SEQ ID NO: 3166 - protein, 43 aa, Homo sapiens
VLIINPSAFAQNGRVSLSLPPLNHGAHFCSLLINVLCGHFFSE

SEQ ID NO: 3167 - protein, 77 aa, Homo sapiens
  SITE (60): Xaa equals any of the naturally occurring L-amino acids
  SITE (61): Xaa equals any of the naturally occurring L-amino acids
  SITE (64): Xaa equals any of the naturally occurring L-amino acids
VKNRRWKINSVQNTRWKRAAERMPKSRKVQRGQGTSSDTELDLALLGICIHSARTIPPLXXGPXLNVFWVLAANLGL

SEQ ID NO: 3168 - protein, 91 aa, Homo sapiens
VLQSCTAFIERYGIVDGIYRLSGVASNIQRLRHEFDSEHVPDLTKERMFRTSILWVPYVSCTSGNSQTLCLPTSCMRNFLMQFQQQQINKG

SEQ ID NO: 3169 - protein, 50 aa, Homo sapiens
  SITE (33): Xaa equals any of the naturally occurring L-amino acids
KVPCEIRSSRLIPHCPFRPIMNSDQFHLRIVHXFFVTALTSWQMLRYVLR

SEQ ID NO: 3170 - protein, 63 aa, Homo sapiens
SLKGNQINYIADKRKCIHCYNLLQWHIKFCHIFYITHIFVFVVQLVFDGLLFHIPNLWVSSFY

SEQ ID NO: 3171 - protein, 35 aa, Homo sapiens
  SITE (21): Xaa equals any of the naturally occurring L-amino acids
  SITE (29): Xaa equals any of the naturally occurring L-amino acids
  SITE (33): Xaa equals any of the naturally occurring L-amino acids
YVFKSNFFVCILHPFSLEVIXVAALNNTXHLKXLI

SEQ ID NO: 3172 - protein, 40 aa, Homo sapiens
  SITE (27): Xaa equals any of the naturally occurring L-amino acids
  SITE (36): Xaa equals any of the naturally occurring L-amino acids
RGSFEEELLLSTFPSLFNFYNFSFLNXFSMFWLNCXTWTF

SEQ ID NO: 3173 - protein, 55 aa, Homo sapiens
  SITE (22): Xaa equals any of the naturally occurring L-amino acids
  SITE (23): Xaa equals any of the naturally occurring L-amino acids
  SITE (49): Xaa equals any of the naturally occurring L-amino acids
MVSTKTLKEWGTWLMNSFRQIXXLYKLITCQPSIKKSQDSEAVPAMGRXRHLSHH

SEQ ID NO: 3174 - protein, 39 aa, Homo sapiens
  SITE (8): Xaa equals any of the naturally occurring L-amino acids
  SITE (31): Xaa equals any of the naturally occurring L-amino acids
DDFLNKIXDTKILNEIQKKKRKEKIDKFPSXKIKTDNNK

SEQ ID NO: 3175 - protein, 113 aa, Homo sapiens
LGGHSPPVLCQLLHSISLSRDKVQALFHFTVFGEILTHSPGICACPSASPVGHSVDSAPGSRSSPLEAPRIPVSTGLVLGFYPSPFWPAPAWNCLERHGMGKDRWNPDHNRSF

SEQ ID NO: 3176 - protein, 49 aa, Homo sapiens
  SITE (38): Xaa equals any of the naturally occurring L-amino acids
AREKLKARKPDEKLCSTSMYGAVKIQIRMLTVGPEGTXGDVLKEVRNRR

SEQ ID NO: 3177 - protein, 65 aa, Homo sapiens
DRLSGREDCREAGTQGHRPKLLSVGEICHFTFYCKQQDKTGSHLHFWNFPQVNIQLHRLQVLLHK

SEQ ID NO: 3178 - protein, 72 aa, Homo sapiens
  SITE (51): Xaa equals any of the naturally occurring L-amino acids
  SITE (52): Xaa equals any of the naturally occurring L-amino acids
GWPWFYMTGVLMRTDEDTGTCRGDICKPRRGQRRSHANFLMRRLLMALERXXIHSVFQLSGHGALFTAAQLT

SEQ ID NO: 3179 - protein, 87 aa, Homo sapiens
  SITE (47): Xaa equals any of the naturally occurring L-amino acids
  SITE (49): Xaa equals any of the naturally occurring L-amino acids
  SITE (50): Xaa equals any of the naturally occurring L-amino acids
  SITE (77): Xaa equals any of the naturally occurring L-amino acids
  SITE (81): Xaa equals any of the naturally occurring L-amino acids
IIIIVQVEYPLSEILGTRKCFKFQDFCFLGTFENLQKRYPKGIRPKXKXXNLIYESHNIPLYQIGPGKGNLNTHNFXKNFXGPWETI

SEQ ID NO: 3180 - protein, 59 aa, Homo sapiens
  SITE (17): Xaa equals any of the naturally occurring L-amino acids
  SITE (20): Xaa equals any of the naturally occurring L-amino acids
  SITE (22): Xaa equals any of the naturally occurring L-amino acids
KKCTMKEFEFCVLCFVXLFXLXWFGFPGKDTKPCELISEISGPSLPTASHGTFAYMSLL

SEQ ID NO: 3181 - protein, 65 aa, Homo sapiens
  SITE (55): Xaa equals any of the naturally occurring L-amino acids
SAKPLGNPHLRWLELSLCSASSFLTLWHIDSKYLISLNSEVVSIKWKLQALGFFXLAFGLENGYR

SEQ ID NO: 3182 - protein, 79 aa, Homo sapiens
  SITE (74): Xaa equals any of the naturally occurring L-amino acids
  SITE (75): Xaa equals any of the naturally occurring L-amino acids
TRSLSAKHLPSSLLHPRKLHYHLLSSQTKSVSVIFPHIPHRHIIKQVGFMFDVYPLWGHYPLPPLLPLSLAKAXXIIVS

SEQ ID NO: 3183 - protein, 77 aa, Homo sapiens
  SITE (36): Xaa equals any of the naturally occurring L-amino acids
  SITE (38): Xaa equals any of the naturally occurring L-amino acids
ETLSYMFSILILATTFYFQWHKIMVSLVYWDGFPLXPXLMGSFLISGSLCATVVFFCASERQLHKLKILVREPYRSV

SEQ ID NO: 3184 - protein, 34 aa, Homo sapiens
SYDFMLPIIQYHQALFYSCNIDKTVSISFKPLQN

SEQ ID NO: 3185 - protein, 59 aa, Homo sapiens
  SITE (2): Xaa equals any of the naturally occurring L-amino acids
  SITE (12): Xaa equals any of the naturally occurring L-amino acids
  SITE (58): Xaa equals any of the naturally occurring L-amino acids
WXFQLTVLYQDXAHCKSKEHPSLMGYIRMRIMHRWSSAYDGIMSSKDTVSWKHLKPKXI

SEQ ID NO: 3186 - protein, 56 aa, Homo sapiens
KNLKSSYFCSFNKHFFCSVLRFLLDMKWILPSFLRSFHSDIFLFILYPYAGIVYSF

SEQ ID NO: 3187 - protein, 82 aa, Homo sapiens
  SITE (27): Xaa equals any of the naturally occurring L-amino acids
  SITE (68): Xaa equals any of the naturally occurring L-amino acids
  SITE (79): Xaa equals any of the naturally occurring L-amino acids
TFQIKAPKVPLVFSFQNSFSLSINIWXTCKNVLTCVGMKLRLSVIYSSQKEGSEIIAYFFLIFSFFLXWRYRINPHPFXKYK

SEQ ID NO: 3188 - protein, 118 aa, Homo sapiens
KSLQFHNLKSADRSELIKTTENIDVSMDVKPSWTTRDVALTVHRAFRMIGLFSHGFLAGCAVWNIVVIYVLAGDQLSNLSNLLQQYKTLAYPFQSLLYLLLALSTISAFDRIDFAKYQ

SEQ ID NO: 3189 - protein, 43 aa, Homo sapiens
IGLSCSAKSSQYNSCCRLQLFCLSYISFGPLYLSYKIETPVRC

SEQ ID NO: 3190 - protein, 55 aa, Homo sapiens
  SITE (45): Xaa equals any of the naturally occurring L-amino acids
PFSPVSSPSGGQKVSGRMNHYLQNNSLCRKREEGVWWGISSYAMXSKIQTKFLET

SEQ ID NO: 3191 - protein, 105 aa, Homo sapiens
  SITE (21): Xaa equals any of the naturally occurring L-amino acids
  SITE (91): Xaa equals any of the naturally occurring L-amino acids
RAYLRIANTCKSIGRSKRRRXAILETEKQPLSESRTGGEVNPKRREDRPRGEGPAPASGGQRSTKSGLLKSVPMRDIAPEVKPGRTRGVRXDFRSRGVHRTFGGV

SEQ ID NO: 3192 - protein, 143 aa, Homo sapiens
  SITE (1): Xaa equals any of the naturally occurring L-amino acids
  SITE (13): Xaa equals any of the naturally occurring L-amino acids
  SITE (17): Xaa equals any of the naturally occurring L-amino acids
  SITE (22): Xaa equals any of the naturally occurring L-amino acids
  SITE (24): Xaa equals any of the naturally occurring L-amino acids
  SITE (115): Xaa equals any of the naturally occurring L-amino acids
XPERPLSRAICPXGHCXAHQIXRXLGTASLRGPAPLRLCPVSCLGQGHGTQPQVGVTRAHNSNPTPDPSVIPREASVRCFHLVKLVRAKGKEIRGTAGKRRSFFCTPGVASSTDXVRRSIDLTEPPLQGCLSQTAPDDFCTAK

SEQ ID NO: 3193 - protein, 50 aa, Homo sapiens
HFHCFIFVFLLLSLIFLVQEKSCVGITELIDLTPCASKYINSPPGTDLSL

SEQ ID NO: 3194 - protein, 63 aa, Homo sapiens
  SITE (57): Xaa equals any of the naturally occurring L-amino acids
  SITE (59): Xaa equals any of the naturally occurring L-amino acids
PRLTPDARGEAAPLAGGCCGIPGAGHLGRPLTPCAYPVPPGKPEFRPLEKRSGCREXAXCPAG

SEQ ID NO: 3195 - protein, 73 aa, Homo sapiens
  SITE (65): Xaa equals any of the naturally occurring L-amino acids
EEEEEEELVDPLTTVREQCEQLEKCVKARERLEMCDQRVSSRSQTEEDCTEELFDFLHAKGPLRXPQTLQQLE

SEQ ID NO: 3196 - protein, 97 aa, Homo sapiens
  SITE (83): Xaa equals any of the naturally occurring L-amino acids
HASGGHFGAQVRRLVEEVTDDKTMPKLERKRLQVERAPHSSPGAKLVKLADKLYNLRDLNRCTPEGWSEHRVQEYFEWAAQVXEGASGNKPTAGRCS

SEQ ID NO: 3197 - protein, 46 aa, Homo sapiens
KMVVAFKMETFSPWFASILSVFSVSIAQMGQRERSKKARCPRDAGG

SEQ ID NO: 3198 - protein, 95 aa, Homo sapiens
  SITE (16): Xaa equals any of the naturally occurring L-amino acids
  SITE (89): Xaa equals any of the naturally occurring L-amino acids
ASGTRFRTCGQPNRRXLARFKERVGYREGPTVETKRIQPQLPEEDGDHSDKEDEQPQVVVLKKGDLSVEEVMKIKAEIRLPKQMKNRLXLMEDLC

SEQ ID NO: 3199 - protein, 133 aa, Homo sapiens
  SITE (30): Xaa equals any of the naturally occurring L-amino acids
STHASALSLRNTRCRREEGEGKKVAPAPAXVKKQEAKKVVNPLFEKRPKNFGIGQDIQPKRDLTRFVKWPRYIRLQRQRDPLQAAEGAARHQPVHAGAGPPDGHAAAEVAHKYRPETKQEKKQRLFARAEKKA

SEQ ID NO: 3200 - protein, 52 aa, Homo sapiens
DPRVRNTLSRPSGKQKPGLPGRGPHGTPAVPAKASAHPGGPQSFTVSSQLST

SEQ ID NO: 3201 - protein, 58 aa, Homo sapiens
  SITE (54): Xaa equals any of the naturally occurring L-amino acids
  SITE (58): Xaa equals any of the naturally occurring L-amino acids
VCTLLENSLCYLMELVFSDFTLPSYLLPVQHLYREVGNPISVPPGSWMSTGFVXVLVX

SEQ ID NO: 3202 - protein, 70 aa, Homo sapiens
FGYIFKSYLLRGAWVAQWVKPLPSAQVMISGSWDRVPHRAFCSAGEPASSSLSLCLPLCLLVISLCQINK

SEQ ID NO: 3203 - protein, 148 aa, Homo sapiens
  SITE (97): Xaa equals any of the naturally occurring L-amino acids
  SITE (116): Xaa equals any of the naturally occurring L-amino acids
  SITE (118): Xaa equals any of the naturally occurring L-amino acids
  SITE (121): Xaa equals any of the naturally occurring L-amino acids
  SITE (130): Xaa equals any of the naturally occurring L-amino acids
  SITE (135): Xaa equals any of the naturally occurring L-amino acids
  SITE (137): Xaa equals any of the naturally occurring L-amino acids
  SITE (145): Xaa equals any of the naturally occurring L-amino acids
DPRVRSTLSVQIPRHPKCILQNPHGLRFYISVSALKNPHTHRHPCRHPDRHAHTRRHTQPHTHSHAHASMHTHSHAHASMHTRFHTHAHPHTRTHTXTRGSPAPCSLCSVHRLFPXLXHWXRFSCSVLPXWILGXGXGWEKGGSXFGC

SEQ ID NO: 3204 - protein, 129 aa, Homo sapiens
  SITE (81): Xaa equals any of the naturally occurring L-amino acids
  SITE (125): Xaa equals any of the naturally occurring L-amino acids
STHASAAVESGSRLPAAAQAPGRGLPVGTAPDTPTRHHGLEDAPGPPERREQVLYGVRAHLAVGGVRLPRAGVCSGRRAVXGDEQKDFDCNTKQPGSPMSADDNSSPFPTSASGPCSSSFVQVAXRCWC

SEQ ID NO: 3205 - protein, 144 aa, Homo sapiens
  SITE (108): Xaa equals any of the naturally occurring L-amino acids
PAPPPPRSLLPLGSGKMVGRNSAIAAGVCGALFIGYCIYFDRKRRSDPNFKNRLRERRKKQKLAKERAGLCKLPDLKDAEAVQKFFLEEIQLGEELLAQGEYEKGVDXLTNAIAVCGQPQQLLQVLQQISHQQCSRCSEQASNI

SEQ ID NO: 3206 - protein, 159 aa, Homo sapiens
  SITE (92): Xaa equals any of the naturally occurring L-amino acids
  SITE (115): Xaa equals any of the naturally occurring L-amino acids
  SITE (138): Xaa equals any of the naturally occurring L-amino acids
  SITE (151): Xaa equals any of the naturally occurring L-amino acids
  SITE (156): Xaa equals any of the naturally occurring L-amino acids
RPTRPGNSRRRGRRGCWRLLGFGAAAIMPGIVELPTLEDLKVQEVKVSSSVLKAAAHHYGVQCDKPNKEFMLCRWEEKDPRRCLEEGKLVNXCALDFFRQIKLSLCRAFYRLLDXHRLLRPAVFSSLPQTAGQFDDVXGATGMVRLNWGKXSSHQXENS

SEQ ID NO: 3207 - protein, 137 aa, Homo sapiens
  SITE (120): Xaa equals any of the naturally occurring L-amino acids
  SITE (131): Xaa equals any of the naturally occurring L-amino acids
  SITE (136): Xaa equals any of the naturally occurring L-amino acids
DPRVRFPHHQGSGSQVSSYGTGALKSHIMAAKAVANTMRTSLGPNGLDKMMVDKDGDVTVTNDGATILSMMDVDHQIAKLMVELSKSQDDEIGDGDHGGGCPGRRPAGRRPSSCWTAAFXRSGSPTVTSRXPALAXE

SEQ ID NO: 3208 - protein, 70 aa, Homo sapiens
RPTRSAWWGRLLSRVSPQPRPASPSVSTRNQLPEARRGVEPGECEETAASAERAGPPRALVFGAQSRSPG

SEQ ID NO: 3209 - protein, 40 aa, Homo sapiens
ACRYRSGIPGSTHASGKSLPKSCLSLQRVAREGPRTATAV

SEQ ID NO: 3210 - protein, 150 aa, Homo sapiens
  SITE (84): Xaa equals any of the naturally occurring L-amino acids
  SITE (125): Xaa equals any of the naturally occurring L-amino acids
  SITE (138): Xaa equals any of the naturally occurring L-amino acids
  SITE (148): Xaa equals any of the naturally occurring L-amino acids
  SITE (150): Xaa equals any of the naturally occurring L-amino acids
DPRVRSLRNTRCRREEGEGEEGGPGPRRREEAGGQEGGQPAVREAAQELRHRSGHPAQAGPDALRQVAALHPAAAARAILYKRXKVPPAINQFTQALDRQTATQLLKWRTITGPRRSRRRSSGCXPGRRRKRPARGLXDQAGPVVANXGX

SEQ ID NO: 3211 - protein, 75 aa, Homo sapiens
  SITE (32): Xaa equals any of the naturally occurring L-amino acids
  SITE (51): Xaa equals any of the naturally occurring L-amino acids
STHASGRRPGGGLEGDQVGMALASGPARRHWXRPGRLGLGDCGAPRRGAYXVGRALYAEARSLVPWTGCTRSRDW

SEQ ID NO: 3212 - protein, 100 aa, Homo sapiens
  SITE (76): Xaa equals any of the naturally occurring L-amino acids
  SITE (99): Xaa equals any of the naturally occurring L-amino acids
RPTRPLDWPGLRKVQHAFARDLLHPSLEEEKKKHKKKRLVQSPNSYFMDVKCPGCYKITTVFSHAQTVVLCVGCSXVLCQPTGGKARLHRGVFHLEESXH

SEQ ID NO: 3213 - protein, 119 aa, Homo sapiens
  SITE (73): Xaa equals any of the naturally occurring L-amino acids
  SITE (119): Xaa equals any of the naturally occurring L-amino acids
AGPAPGAIMDEDYFGSAAEWGDEADGGQQEDDYGEGEDDAEVQQECLHKFSTRDYIMEPSIFNTLKRYFQAGXSPENVIQLLSENYTAVAQTVNLLAEWLIQTSVEPVQVQETVENHLX

SEQ ID NO: 3214 - protein, 44 aa, Homo sapiens
GSTHASGRNEGPPAKTKSWVGPTLHFHRKSEHLVGLKVLCCFRL

SEQ ID NO: 3215 - protein, 106 aa, Homo sapiens
  SITE (11): Xaa equals any of the naturally occurring L-amino acids
ERVPAAVLPSXRSPAMLVLRSGLTRALAARTLALQVCSSFATGPRQYDGTVYEFRTYYLKPSKMNEFLENTKKNIHLRTAALWNWLGYWECRIWRPEWNKCFHIWE

SEQ ID NO: 3216 - protein, 63 aa, Homo sapiens
  SITE (6): Xaa equals any of the naturally occurring L-amino acids
  SITE (7): Xaa equals any of the naturally occurring L-amino acids
  SITE (11): Xaa equals any of the naturally occurring L-amino acids
  SITE (14): Xaa equals any of the naturally occurring L-amino acids
  SITE (19): Xaa equals any of the naturally occurring L-amino acids
FKRLDXXLTLXLLXLQNWXQDSMGVCKINTVKYTAAKLKVQKRITAISSTIKNIKSCFWGKTS

SEQ ID NO: 3217 - protein, 67 aa, Homo sapiens
GRPTRPLLEGNKVKTLKSFYSLPRQCKDFRVFTLFPSRRRKQGENSKVLTLSGKRIEQKHNYNYILF

SEQ ID NO: 3218 - protein, 148 aa, Homo sapiens
  SITE (114): Xaa equals any of the naturally occurring L-amino acids
  SITE (135): Xaa equals any of the naturally occurring L-amino acids
  SITE (146): Xaa equals any of the naturally occurring L-amino acids
  SITE (147): Xaa equals any of the naturally occurring L-amino acids
GRPTRPGGGGSHGGSVCEAGAAKSPSLPVSQTISSTAVHSYKTEEQWPEPGRGRDQKEQKTDTPSPEKILLDEKVKLEEQLKETVEKYKRALADTENLRQRSQKLVEEAKLYGXQGFLLRFAGGSQISWEKATPXCSRRRRFRDDXXH

SEQ ID NO: 3219 - protein, 95 aa, Homo sapiens
  SITE (67): Xaa equals any of the naturally occurring L-amino acids
  SITE (76): Xaa equals any of the naturally occurring L-amino acids
AAAGPRLFGPGTRGRRRGLWARVSRRDCRTGGFHGGNEENVRSQSAEGAVKSRLLALPSASFIQRHXPQIPRTSDXEFVNKPTEALILQNSQDLL

SEQ ID NO: 3220 - protein, 89 aa, Homo sapiens
  SITE (5): Xaa equals any of the naturally occurring L-amino acids
  SITE (8): Xaa equals any of the naturally occurring L-amino acids
  SITE (21): Xaa equals any of the naturally occurring L-amino acids
  SITE (25): Xaa equals any of the naturally occurring L-amino acids
  SITE (68): Xaa equals any of the naturally occurring L-amino acids
CWSCXAAXQARGWAGHQYEHXRGPXEQSAAYFQAMRFNANMSFHAQMVINEGEAFREGQRTIPAVGEXGEALKAEIMKVTFPRNDTNNV

SEQ ID NO: 3221 - protein, 93 aa, Homo sapiens
  SITE (49): Xaa equals any of the naturally occurring L-amino acids
GRPTRPARRREASACPWQMSSWLTLRRRQRRRKEEAMGRKKRSQQSKMXQEETQLDLSGDSVKSIAKLWDSKMFAEIMMKIEEYISKQAKASE

SEQ ID NO: 3222 - protein, 54 aa, Homo sapiens
  SITE (26): Xaa equals any of the naturally occurring L-amino acids
  SITE (27): Xaa equals any of the naturally occurring L-amino acids
  SITE (37): Xaa equals any of the naturally occurring L-amino acids
  SITE (53): Xaa equals any of the naturally occurring L-amino acids
TMLVSCGSICEEAHLCGTATGGSAGXXLWGQRKTTLXSILACQNYLARKPELXL

SEQ ID NO: 3223 - protein, 113 aa, Homo sapiens
GHGTEGPRGAAQLHGEDPGQLLTPPQPAWPRLFGRQPRQPPEHPLVLADPSPSPGLSKGRPPRSPLPCPTPIMDHAREEGLMPLIYEPFHPNVGYRINSRNLQKKKKKKKKGG

SEQ ID NO: 3224 - protein, 167 aa, Homo sapiens
  SITE (120): Xaa equals any of the naturally occurring L-amino acids
  SITE (146): Xaa equals any of the naturally occurring L-amino acids
  SITE (161): Xaa equals any of the naturally occurring L-amino acids
RPTRPVAFCRPWRRSAAGLRLAPLVPLTWAHVARQTHRGEQKRTCPCLLYKLTTASNGGALRSYPMWKPERTCRNRRAGCVSLGTPLRSGGLPCLQDLWSERRSSVPSWTWVSVTSTLTXCSICGQVHTLNSCWTSFRINTLGVEXRACVHGLEAKSSVVXTGQYCT

SEQ ID NO: 3225 - protein, 52 aa, Homo sapiens
DHASGFCWRCTTEWPAVAGNQARREGQQCEKTVDVKKSKSCELMSPVIFGKK

SEQ ID NO: 3226 - protein, 137 aa, Homo sapiens
  SITE (122): Xaa equals any of the naturally occurring L-amino acids
  SITE (133): Xaa equals any of the naturally occurring L-amino acids
  SITE (137): Xaa equals any of the naturally occurring L-amino acids
STHASVRARPSRCTPLLSPWPRSPRIRSSRSCRNGTASTALTSTCAAFSKGQGTLQPLQLEPEHQPWAYSGGLLKKPCDRHCDADAGGPGQVQGVEAARDRMFSGREDSISQRNGAVLALGXRNRFKHTHFGXMGKX

SEQ ID NO: 3227 - protein, 56 aa, Homo sapiens
  SITE (49): Xaa equals any of the naturally occurring L-amino acids
  SITE (50): Xaa equals any of the naturally occurring L-amino acids
RPTRPIKNKTVLLKALFNLKKKKKKKKKKKKKGGRSRGSLEGPKLTRAXXVIALSL

SEQ ID NO: 3228 - protein, 82 aa, Homo sapiens
  SITE (37): Xaa equals any of the naturally occurring L-amino acids
  SITE (47): Xaa equals any of the naturally occurring L-amino acids
  SITE (48): Xaa equals any of the naturally occurring L-amino acids
GGGGDRGGGGGGGGGGGGRECSRVVFQTSDFSSEIKXFLHITVLASXXKSCVEPRSTQSCSNCSARLGKKPQHFIRMFWGPG

SEQ ID NO: 3229 - protein, 124 aa, Homo sapiens
  SITE (68): Xaa equals any of the naturally occurring L-amino acids
  SITE (71): Xaa equals any of the naturally occurring L-amino acids
  SITE (76): Xaa equals any of the naturally occurring L-amino acids
  SITE (77): Xaa equals any of the naturally occurring L-amino acids
  SITE (78): Xaa equals any of the naturally occurring L-amino acids
  SITE (80): Xaa equals any of the naturally occurring L-amino acids
  SITE (83): Xaa equals any of the naturally occurring L-amino acids
  SITE (114): Xaa equals any of the naturally occurring L-amino acids
  SITE (122): Xaa equals any of the naturally occurring L-amino acids
RPTRPGARRPSGRGPRRAGGEGAAVCELGSIGLEQVAAFRALGEPSPRPSVTACPPAQHPVLSPGGLXLCXASGGXXXVXSGXRGSQEGAGPTEQESVTTLCALGLLGPRATGXGGNEPANXSK

SEQ ID NO: 3230 - protein, 81 aa, Homo sapiens
  SITE (20): Xaa equals any of the naturally occurring L-amino acids
  SITE (62): Xaa equals any of the naturally occurring L-amino acids
  SITE (80): Xaa equals any of the naturally occurring L-amino acids
SAGEALTHPSQLPSPPRCWXCTPTTERALARPPGALWPCWVASTPSSCLRTSLISCCPWTQXTQRMGPAATAMVATAREXP

SEQ ID NO: 3231 - protein, 40 aa, Homo sapiens
  SITE (8): Xaa equals any of the naturally occurring L-amino acids
HASAAVRXPFNVSHCFFSRRYVTKYIEFNMNHESQYSGQL

SEQ ID NO: 3232 - protein, 76 aa, Homo sapiens
DPRVRKLCFKTQRSWLPRCILLGAQSQPCLPSHSTEHVRLLSLHLLPRTQQTCPSQVDIAFNICPSPFRQVTQNEF

SEQ ID NO: 3233 - protein, 55 aa, Homo sapiens
  SITE (42): Xaa equals any of the naturally occurring L-amino acids
  SITE (51): Xaa equals any of the naturally occurring L-amino acids
  SITE (54): Xaa equals any of the naturally occurring L-amino acids
LVILGYSLKYPKKWLIQCEEYTGQITHLPTLKDHRFGKSLFXPLEKEVRNXWVXV

SEQ ID NO: 3234 - protein, 83 aa, Homo sapiens
  SITE (25): Xaa equals any of the naturally occurring L-amino acids
REQRPADGRDVGEGDLPQMEVGSGXGSRPRTPPASGPRHSSRRKAPWRRRLPSQWWNPGGTRPGSAAQPWGSSQASSRALTFE

SEQ ID NO: 3235 - protein, 67 aa, Homo sapiens
  SITE (20): Xaa equals any of the naturally occurring L-amino acids
YIKSYRNQKKDPRVFLCQRXQDSVHASLSLSLPASPSTCDFSLSNKYIKIFKKKKKKGGRSDLAHAS

SEQ ID NO: 3236 - protein, 40 aa, Homo sapiens
STHASAHYFKPGFSESLQIAFGSVSLDRTLLFQYNMEQIN

SEQ ID NO: 3237 - protein, 96 aa, Homo sapiens
  SITE (91): Xaa equals any of the naturally occurring L-amino acids
MDSTEVESMDCPNTAPATAMTFHPLQWLVIHLGPSQVGQWVAGMLPESLTGEESWGQLLHAAEGASRLFPARLKATLGSPRATQKHKWWFXAMLGR

SEQ ID NO: 3238 - protein, 119 aa, Homo sapiens
  SITE (10): Xaa equals any of the naturally occurring L-amino acids
  SITE (19): Xaa equals any of the naturally occurring L-amino acids
  SITE (25): Xaa equals any of the naturally occurring L-amino acids
  SITE (45): Xaa equals any of the naturally occurring L-amino acids
NLFALWGQIXEGGPCWLGXSPGNTXQFPVRQCAPCPPWTTDPCPXQGKLSPVRPVGPVPLPSPAWLLLPPSPAGTSPPLSSLKGPHLFTVHCPAPFPEAGALWVLFTAVSQMPRTAHAT

SEQ ID NO: 3239 - protein, 78 aa, Homo sapiens
  SITE (12): Xaa equals any of the naturally occurring L-amino acids
  SITE (19): Xaa equals any of the naturally occurring L-amino acids
  SITE (25): Xaa equals any of the naturally occurring L-amino acids
RFLKKLMKLAQXGNGERQXKTLSRXESQQAPRKESRKQTGKEKEGKAGTQKETSPCWKEGRSSPVLGSCHISRSVTYA

SEQ ID NO: 3240 - protein, 129 aa, Homo sapiens
  SITE (99): Xaa equals any of the naturally occurring L-amino acids
  SITE (102): Xaa equals any of the naturally occurring L-amino acids
  SITE (104): Xaa equals any of the naturally occurring L-amino acids
  SITE (106): Xaa equals any of the naturally occurring L-amino acids
  SITE (108): Xaa equals any of the naturally occurring L-amino acids
  SITE (113): Xaa equals any of the naturally occurring L-amino acids
GRPTRPPEPNWLSLETIVKELAPSPSFSSQDLESDWPWLRHPLQEKGRDPRSAGGHVRVRSRLPPPQADLRSRHGENWASSNQQSPRLVPRSASHPQSXRGXRXGXPXETERXGEQNMNAKICGNRLYR

SEQ ID NO: 3241 - protein, 53 aa, Homo sapiens
  SITE (53): Xaa equals any of the naturally occurring L-amino acids
QFTSEPVLMCPFMYMDITKLQNMFILSFYTSPYSRSKQYTASVLSSLCDWIIX

SEQ ID NO: 3242 - protein, 47 aa, Homo sapiens
  SITE (29): Xaa equals any of the naturally occurring L-amino acids
  SITE (32): Xaa equals any of the naturally occurring L-amino acids
FYTLAIKSITYLISCTSLGEKMPNSSALXALXLNGLLSRESDAKNIL

SEQ ID NO: 3243 - protein, 69 aa, Homo sapiens
  SITE (33): Xaa equals any of the naturally occurring L-amino acids
  SITE (34): Xaa equals any of the naturally occurring L-amino acids
STHASGAVQPSTWPGVRTEATRWLTRTLGALAXXANGGLGHWGCGHLPFHDAPGRGESSPAVSAPLDGQ

SEQ ID NO: 3244 - protein, 50 aa, Homo sapiens
DPRVRFLTKRFIGDYERNAGNLYTRQVQIEGETWLFKFKTLQVFRSTRTA

SEQ ID NO: 3245 - protein, 142 aa, Homo sapiens
  SITE (8): Xaa equals any of the naturally occurring L-amino acids
  SITE (121): Xaa equals any of the naturally occurring L-amino acids
  SITE (128): Xaa equals any of the naturally occurring L-amino acids
  SITE (132): Xaa equals any of the naturally occurring L-amino acids
  SITE (133): Xaa equals any of the naturally occurring L-amino acids
  SITE (134): Xaa equals any of the naturally occurring L-amino acids
GSTHASEXAFRSKRPEHGGPPELFYDKNEARKYVRNSRMIDVQTKMAGRALELLCLPEGQPCYLLDIGCGSGLSGDYLSDEGHYWVGIDISPAMLDAALDRDTEGDLLLGDMGQGIPFKPXSFDGCIXISAXXXLCNANQEV

SEQ ID NO: 3246 - protein, 79 aa, Homo sapiens
  SITE (65): Xaa equals any of the naturally occurring L-amino acids
CPRGDTHFRRGSGPCPAASWRTGHSLEADALLDLSFLTEEEQEAIADVLKRDARLRQLGGGPRSXSSGASLGRPWGSWK

SEQ ID NO: 3247 - protein, 82 aa, Homo sapiens
  SITE (70): Xaa equals any of the naturally occurring L-amino acids
STWLLQANCGTGAASIMSTLTEKAVVKKELLCDVVGRDKYQVNNKHDDKYLPLPPSKIVQRAEELVGQEXPNRCAVRNASIS

SEQ ID NO: 3248 - protein, 135 aa, Homo sapiens
  SITE (39): Xaa equals any of the naturally occurring L-amino acids
  SITE (120): Xaa equals any of the naturally occurring L-amino acids
  SITE (131): Xaa equals any of the naturally occurring L-amino acids
GSTHASGEREIVMAAAILAEKVPVDSAEEREQPLASARXLAAQKREQRLRKFRELHLKRNEARKLNHQEVVEEDKRLKLPANWEARKARLEWELQEEEKKKECAARREDYEKVNCWSSWXKMQKVGRGRRXGKTP

SEQ ID NO: 3249 - protein, 102 aa, Homo sapiens
SAMKASGTLREYKVVGRCLPTPKCRTPPLYRMRIFAPNHVVAKSRFWYFVSQLKKMKKSSGEIVYCGQVFEKSPLRVKNFGIWLRYDSRSGTHNMYRGVPGT

SEQ ID NO: 3250 - protein, 131 aa, Homo sapiens
  SITE (67): Xaa equals any of the naturally occurring L-amino acids
  SITE (98): Xaa equals any of the naturally occurring L-amino acids
  SITE (117): Xaa equals any of the naturally occurring L-amino acids
GRPTRPLAPGSPALETHSALIARTHRPSLARPSVPPPPSPPPPFAAMSTRSVSSSSYRRCSAAPAPXAAELHAHNVTSPPAPTAWAAPAPQHQPQPLXLVPGRRVCSRLLPRCACGXCCPGVALAGRIPWN

SEQ ID NO: 3251 - protein, 75 aa, Homo sapiens
  SITE (14): Xaa equals any of the naturally occurring L-amino acids
  SITE (41): Xaa equals any of the naturally occurring L-amino acids
  SITE (75): Xaa equals any of the naturally occurring L-amino acids
GVDPRVRAAVVRRXREGEAGRGASETGGDDSSREGEGCACXASPPNSRLVPAVLSCGQVTPRPGPPPTAWVRAAX

SEQ ID NO: 3252 - protein, 57 aa, Homo sapiens
  SITE (36): Xaa equals any of the naturally occurring L-amino acids
  SITE (50): Xaa equals any of the naturally occurring L-amino acids
  SITE (51): Xaa equals any of the naturally occurring L-amino acids
  SITE (53): Xaa equals any of the naturally occurring L-amino acids
  SITE (56): Xaa equals any of the naturally occurring L-amino acids
QYSSSQPPASFFFQEGRIAAPVSTPTINMGWLKSRXHPSPAKKTIINQHXXLXGKXL

SEQ ID NO: 3253 - protein, 113 aa, Homo sapiens
  SITE (9): Xaa equals any of the naturally occurring L-amino acids
GSTHASEEXIKITVREPSRTGRAATMNSKGQYPTQPTYPVQPPGNPVYPQTLHLPQAPPYTDAPPAYSELYRPSFVHPGAATVPTMSAGISWRLTVSSHGPVCGLLGPLVSTI

SEQ ID NO: 3254 - protein, 99 aa, Homo sapiens
TRFGIKPRAGGSRPALRAAFQGALPGVRAAGDRIFKENWRLSQPLCHRYSSAGTHLSVRSRIVGVSHLKQEPEKVKVSLSSQHPETPLHISGFPSPLKV

SEQ ID NO: 3255 - protein, 72 aa, Homo sapiens
  SITE (26): Xaa equals any of the naturally occurring L-amino acids
  SITE (46): Xaa equals any of the naturally occurring L-amino acids
STHASGASGPGLLAVMKDVPGFLQQXQSSGPGQAAVWHRLEELYTXKLWHQLTLQVLDFVQDPCFAQGRWPH

SEQ ID NO: 3256 - protein, 70 aa, Homo sapiens
  SITE (15): Xaa equals any of the naturally occurring L-amino acids
KKKRERERSPLKHSXIHVLSLSKGPCVEFCVFVLIIYKQESRFLDATQNVNCLSTLALITFSWNEILFLN

SEQ ID NO: 3257 - protein, 120 aa, Homo sapiens
  SITE (16): Xaa equals any of the naturally occurring L-amino acids
VTRIEGRLQVPVRNSXSTHASGNTRCRREEGEGEEGGPGPRRREEAGGQEGGQPAVREAAQELRHRSGHPAQAGPDALRQVAALHPAAAARAILYKRLKVPPAINQFTQALDRQTATQLA

SEQ ID NO: 3258 - protein, 93 aa, Homo sapiens
  SITE (22): Xaa equals any of the naturally occurring L-amino acids
  SITE (47): Xaa equals any of the naturally occurring L-amino acids
  SITE (49): Xaa equals any of the naturally occurring L-amino acids
  SITE (61): Xaa equals any of the naturally occurring L-amino acids
EFPELTKGAFTRISNMELNELXDYNVVSLILDMLVLSNVCSSRLGIXFXKLSVTHRDVKVXKAFNFSLYLNPLETKRSQLSILSSMGNPVHLA

SEQ ID NO: 3259 - protein, 121 aa, Homo sapiens
  SITE (109): Xaa equals any of the naturally occurring L-amino acids
  SITE (114): Xaa equals any of the naturally occurring L-amino acids
DERDTELVYLGGRAPGGRPRRAGRPMPWCLAARSVIPWPQNWWSPMMDMRRYKVYLKGRSGDKMIHEKNIKQLKSEVQYIQEARNCLQKLREDISSKLDRDPGDSLRGXGDTGXVRKAKLD

SEQ ID NO: 3260 - protein, 94 aa, Homo sapiens
  SITE (65): Xaa equals any of the naturally occurring L-amino acids
  SITE (84): Xaa equals any of the naturally occurring L-amino acids
  SITE (90): Xaa equals any of the naturally occurring L-amino acids
SLGQYFLPYVSQRTSLRSMYRGPQNRKFGRTPRSLSAGYLCPPLPLVFLFCKSCFLPTVPPLFSXSAKLSFLQEKSFFWPRSLXPSPLVXDGFG

SEQ ID NO: 3261 - protein, 89 aa, Homo sapiens
  SITE (20): Xaa equals any of the naturally occurring L-amino acids
  SITE (40): Xaa equals any of the naturally occurring L-amino acids
GRPTRPLLNGIGLIHRRFAXQSPVECEPPLPPPLPSRHRXKDDSPDRGWPTPPAFRSERKKILGKSYTCQYKQELELRRNLSNSTNWKL

SEQ ID NO: 3262 - protein, 116 aa, Homo sapiens
  SITE (18): Xaa equals any of the naturally occurring L-amino acids
  SITE (46): Xaa equals any of the naturally occurring L-amino acids
  SITE (88): Xaa equals any of the naturally occurring L-amino acids
  SITE (98): Xaa equals any of the naturally occurring L-amino acids
  SITE (112): Xaa equals any of the naturally occurring L-amino acids
RKREGGRLRFVAAARPLXGRAEPRPSRSPATPRSRYPRAATAAGRXEARAMASGADSKGDDLSTAILKQKNRPNRLLLMKPSMRTTVXCLCSQPKMDXLQCFRSEQGGAEKXEEEG

SEQ ID NO: 3263 - protein, 67 aa, Homo sapiens
  SITE (4): Xaa equals any of the naturally occurring L-amino acids
  SITE (30): Xaa equals any of the naturally occurring L-amino acids
ARVXGFIKLLTLLQTSQRLWLRAWTAWVDXDWLISGEAVRRARPSGILLGRLVVASEVPLGAGTPAG

SEQ ID NO: 3264 - protein, 40 aa, Homo sapiens
  SITE (3): Xaa equals any of the naturally occurring L-amino acids
  SITE (4): Xaa equals any of the naturally occurring L-amino acids
KIXXIYIYVLFCFFVLKILSYGIVFGLINSSMLCFKMRFH

SEQ ID NO: 3265 - protein, 76 aa, Homo sapiens
GELGLGSRANAQISPVHGIWARAEIGMGLQKIGGRGHREASLGREGEVLHSLGSSRVSFWLLGAFSFLPVRALGWV

SEQ ID NO: 3266 - protein, 167 aa, Homo sapiens
  SITE (124): Xaa equals any of the naturally occurring L-amino acids
  SITE (147): Xaa equals any of the naturally occurring L-amino acids
  SITE (154): Xaa equals any of the naturally occurring L-amino acids
  SITE (155): Xaa equals any of the naturally occurring L-amino acids
  SITE (158): Xaa equals any of the naturally occurring L-amino acids
  SITE (163): Xaa equals any of the naturally occurring L-amino acids
  SITE (164): Xaa equals any of the naturally occurring L-amino acids
STHASDQPTEVTSSLPHLGEQTDQGSVHIPSKDDSISLTAKGDTSIPRSSLGDLDTVAGLEKELNNAKEELELMAKKERESRMELSALQSMVAVQEEELQVQAADMESLTRNIQIKEDLIKDLXDGNWLDSWKTYQLWERLDPRSLXSSGKNSXXVDXQVKRXXGIR

SEQ ID NO: 3267 - protein, 78 aa, Homo sapiens
  SITE (16): Xaa equals any of the naturally occurring L-amino acids
  SITE (46): Xaa equals any of the naturally occurring L-amino acids
STHASGRHAFLWAPRXLLLLLPPLLLLALSWPCPWSGGRPSRRALXPRAQTLAYTTTGTSRKSSTCWRRTGISVRSCR

SEQ ID NO: 3268 - protein, 70 aa, Homo sapiens
TPTPGDQRPSSLMNFILGMWWYSGCHDHHVVGGVPFPWIGTFSVASSCLGGGGSFKRPFRNFQRKGQQIM

SEQ ID NO: 3269 - protein, 139 aa, Homo sapiens
  SITE (8): Xaa equals any of the naturally occurring L-amino acids
  SITE (9): Xaa equals any of the naturally occurring L-amino acids
  SITE (95): Xaa equals any of the naturally occurring L-amino acids
  SITE (126): Xaa equals any of the naturally occurring L-amino acids
  SITE (133): Xaa equals any of the naturally occurring L-amino acids
  SITE (139): Xaa equals any of the naturally occurring L-amino acids
DPRVELPXXEIDCTGAWLFAIPASVTWGQGLALLYRPAERLGLSATMNLERVSNEEKLNLCRKYYLGGFAFLPFLWLVNIFWFFREAFLVPAYTXQSQIKGYVWRSAVGFLFWVMCSPPGSPSSRXTGPRWGXPWVDYX

SEQ ID NO: 3270 - protein, 118 aa, Homo sapiens
  SITE (39): Xaa equals any of the naturally occurring L-amino acids
NKIRDNLPQMRTLLRKPFSPSDRAPRGCKAGWGGVSDSXSFRNRPPGAKLRGGRRSGLLCDAPHGHFLISEIIFRSLQHPQVQILRAWLIYLLPQAEQIPTATFLRKISGSGIHENPQ

SEQ ID NO: 3271 - protein, 89 aa, Homo sapiens
  SITE (75): Xaa equals any of the naturally occurring L-amino acids
DPRVRWRLWSNCRTRSCSRSSLTSRVCHRWKRLVDDRWLWRHVDLTLYTMRPKVMWHLLRSTWHPGSIPCGWVAXCSLAPRPPSCPLLC

SEQ ID NO: 3272 - protein, 52 aa, Homo sapiens
  SITE (23): Xaa equals any of the naturally occurring L-amino acids
  SITE (36): Xaa equals any of the naturally occurring L-amino acids
  SITE (49): Xaa equals any of the naturally occurring L-amino acids
  SITE (51): Xaa equals any of the naturally occurring L-amino acids
FLKDSILKTCSKQTYKEADFESXALNVVHIPSGHHXKSQVEPPGFGISXLXT

SEQ ID NO: 3273 - protein, 122 aa, Homo sapiens
DSLVSSGPSMNETNKTLVGPSELPTASAVAPGPGTGARAWPVLVGFVLGAVVLSLLIALAAKCHLCRRYHASYRHRPLPETGRGGRPQVAEDEDDDGFIEDNYIQPGTGELGTEGSRDHFSL

SEQ ID NO: 3274 - protein, 60 aa, Homo sapiens
  SITE (35): Xaa equals any of the naturally occurring L-amino acids
  SITE (39): Xaa equals any of the naturally occurring L-amino acids
KETQRNVSCACSLFSQAVASESQGHYLGARAFQIXSALXLAPPPTFPICVSRKCNISLPP

SEQ ID NO: 3275 - protein, 63 aa, Homo sapiens
ALKQQLPLKHHPCPGSAWSQCPSTVCSRVTPERTTGIWKCSLATLGALLSLACFHHWKSLREL

SEQ ID NO: 3276 - protein, 45 aa, Homo sapiens
VDPRVRADQDGEKLQALLRLVIELLERVKIVEALLTTSTTAKQYI

SEQ ID NO: 3277 - protein, 121 aa, Homo sapiens
  SITE (99): Xaa equals any of the naturally occurring L-amino acids
RPTRPPTRPPTRPEELGVQVHVNKLDMFRNMPEILHHLTTDRNTQIHACRHPKAEEYFQWSKLPCGITSRNRIPLHIISIKPSTMWFGERSRKTNVIVXTGESSYRACFSFHSSYSEIKIS

SEQ ID NO: 3278 - protein, 203 aa, Homo sapiens
  SITE (1): Xaa equals any of the naturally occurring L-amino acids
XSKEVVSTQPDPLDREAQAKIEEEIRQQNIEENMNIAIEEAPESFGQVTMLYINCKVNGHPLKAFVDSGAQMTIMSQACAERCNIMRLVDRRWAGVAKGVGTQRIIGRVHLAQIQIEGDFLQCSFSILEDQPMDMLLGLDMLRRHQCSIDLKKNVLVIGTTGTQTYFLPEGELPLCSRMVSGQDESSDKEITHSVMDSGRKEH

SEQ ID NO: 3279 - protein, 145 aa, Homo sapiens
  SITE (100): Xaa equals any of the naturally occurring L-amino acids
  SITE (101): Xaa equals any of the naturally occurring L-amino acids
SVRHPFHMDAYPLVNRIISPGCIRPPISSHTEIVMLPVLSATLHDLTSWPSLVLVTRPISRTIKTTFKFFSPGLISLIKISGSLTLFILGQARLRLRRRXXAGRGQSFPPSRDRGEGRGATLGRGGERRGRKPLVRDRANQPGQH

SEQ ID NO: 3280 - protein, 95 aa, Homo sapiens
  SITE (95): Xaa equals any of the naturally occurring L-amino acids
AHASAHASDELLRQVWVRGSGGSWDWDRGVRRESAIPCYTERWQLLTGCFWGMGCLGLLLLQGKKRVPLPTASQPLGYLLAGNLQTEFNKLGSAX

SEQ ID NO: 3281 - protein, 68 aa, Homo sapiens
  SITE (24): Xaa equals any of the naturally occurring L-amino acids
FLLTSSFCRGSSEMLFAKCASSFXTFTKSFIYSVNFFLIHNVYLLKRKKALIYDLITIKDKIYSTLTC

SEQ ID NO: 3282 - protein, 48 aa, Homo sapiens
  SITE (32): Xaa equals any of the naturally occurring L-amino acids
ETPPSGLVCSRDWVTAAFFRLGPVIRETIPWXLGVPLAMNEEKGGGHT

SEQ ID NO: 3283 - protein, 43 aa, Homo sapiens
EAVANVSYSEWSRLTFIRETLSLLIAEGLAHRLRLHILSLGYT

SEQ ID NO: 3284 - protein, 99 aa, Homo sapiens
  SITE (40): Xaa equals any of the naturally occurring L-amino acids
  SITE (48): Xaa equals any of the naturally occurring L-amino acids
QNYMFYFHVCKTKSFFLDGFLISFSHNSQVNLVALARNRXNFGTSKTXWPLSMGRQRPSFKMKLLVSHIRHSLSSLATRPHSERCSLLKVSGFNQAIFH

SEQ ID NO: 3285 - protein, 35 aa, Homo sapiens
  SITE (12): Xaa equals any of the naturally occurring L-amino acids
KSNLTVLSSISXCFMTIKIHFWMCTGKKKKKKKGG

SEQ ID NO: 3286 - protein, 60 aa, Homo sapiens
KAFMNVKQGRVNVQQPSFLDHSCSRGEESGGQQRRVQVKCKDGGWVWWLMPVVFLALWGG

SEQ ID NO: 3287 - protein, 50 aa, Homo sapiens
  SITE (22): Xaa equals any of the naturally occurring L-amino acids
TRYKSLTFLKLSCVRDEPPAQXTVLVTSDEAYNSNVGNRTLLTVRLTAIF

SEQ ID NO: 3288 - protein, 83 aa, Homo sapiens
  SITE (59): Xaa equals any of the naturally occurring L-amino acids
SLSVWRQAQHTDILGRKGTTKSCENGLEPISDRIFIDEGLLEIENGGSFLSYLLVSSMXTPCSSQEKVVTLWSSYVPVLLLTK

SEQ ID NO: 3289 - protein, 98 aa, Homo sapiens
  SITE (82): Xaa equals any of the naturally occurring L-amino acids
GRPTRPGACYHIQLIFVFLVEMGFHHVGQAGLELLTSGDPPTLASQSAGITGMSHCAQPNRVIFIKETPPPSTHKLLCFTHXSELEELGISLLEFIHC

SEQ ID NO: 3290 - protein, 71 aa, Homo sapiens
DPRVRVSPLSWRVPKMNNPSVLSYQSLRSSVSCNIFGDHKRTRDSRFTVSFGSGRWSPGPQETCDPRYHWG

SEQ ID NO: 3291 - protein, 41 aa, Homo sapiens
CEWTCCLSEHGTITQLTGIFSIPKMNICFLVDKNVLLIREE

SEQ ID NO: 3292 - protein, 56 aa, Homo sapiens
FSCLSLPSSWDYGRTLPRLADVCVYSRDGFSPCWLGWFQTPDLMIRLCWPPKVGLS

SEQ ID NO: 3293 - protein, 75 aa, Homo sapiens
KACLKCFLVTWERAGSTGKWHVTGASCHFVPFPVLPQPCTVGMQKSRRNSNVKIVDKQCRESSVALNIKIKDTWS

SEQ ID NO: 3294 - protein, 41 aa, Homo sapiens
IRALFSKNSEAGKRSSLQIKDYKFSIVSAILEGVQEMFLSV

SEQ ID NO: 3295 - protein, 84 aa, Homo sapiens
  SITE (74): Xaa equals any of the naturally occurring L-amino acids
  SITE (78): Xaa equals any of the naturally occurring L-amino acids
  SITE (82): Xaa equals any of the naturally occurring L-amino acids
KFINLKTKYAKMCPGLRNNTAHSSEVVGSSVCFGVIHFFHRLLGPCIHSCSEHTPWYLMTRMDPVQAPGLPKEXYFWXAGWXRE

SEQ ID NO: 3296 - protein, 88 aa, Homo sapiens
SENLSQRKEKKNKKMLGSQHFQPTPIHIHSSTLLGPFASSEMRFCTSQQCRDSQGRPEAAKSNSAGLLQEGRGGPQRPWQNGDWSEGP

SEQ ID NO: 3297 - protein, 89 aa, Homo sapiens
FIRMPTKAEGVEQNSSKLQLNFFSIDMNHGQVYSAATKTVKCFISTAEASQVIINKAFLGSFSGVGSKMEGVLLQVTNEEVVNHRVFKK

SEQ ID NO: 3298 - protein, 46 aa, Homo sapiens
  SITE (17): Xaa equals any of the naturally occurring L-amino acids
  SITE (39): Xaa equals any of the naturally occurring L-amino acids
  SITE (41): Xaa equals any of the naturally occurring L-amino acids
  SITE (42): Xaa equals any of the naturally occurring L-amino acids
RYWFRVQAENIRRVVLXMAKAGEYKGKPRSRRLHPREIXGXXKGLD

SEQ ID NO: 3299 - protein, 71 aa, Homo sapiens
  SITE (24): Xaa equals any of the naturally occurring L-amino acids
  SITE (68): Xaa equals any of the naturally occurring L-amino acids
THASASICEMMFYLCVRMRNGSHXTKCWKLVSLETRVSGATAQGCVFNYRIPRNSSLGCHSNIFSGLXSHT

SEQ ID NO: 3300 - protein, 80 aa, Homo sapiens
AVPVLRAEQVEVIPSFLLRSFFLASDQKPSSTPSPSQTCRRRASGKAPGPGLSVLGARAAGGPSLYIFHFGILSSNCCKT

SEQ ID NO: 3301 - protein, 43 aa, Homo sapiens
  SITE (32): Xaa equals any of the naturally occurring L-amino acids
HLFLLFKGFFTKKKKKKKLPPGSLLFEIVEEXEQVQCHYVMMN

SEQ ID NO: 3302 - protein, 131 aa, Homo sapiens
  SITE (25): Xaa equals any of the naturally occurring L-amino acids
  SITE (28): Xaa equals any of the naturally occurring L-amino acids
LPNPTICSSMRGPTRTRGLSRVTSXTSXPEQDHLRDHRYIHSKEKPFKCQECGKGFCQSRTLAVHKTLHMQESPHKCPTCGRTFNQRSNLKTHLLTHTDIKPYSCEQCGKVFRRNCDLRRHSLTHTPRQDF

SEQ ID NO: 3303 - protein, 60 aa, Homo sapiens
  SITE (3): Xaa equals any of the naturally occurring L-amino acids
ALXFKMSKDRGLEGMLSCLPLSAQKAHLLVVCQMDRQEQRWMHGIQQIIVCYTRDANHLL

SEQ ID NO: 3304 - protein, 63 aa, Homo sapiens
  SITE (51): Xaa equals any of the naturally occurring L-amino acids
  SITE (63): Xaa equals any of the naturally occurring L-amino acids
SLERLKLCVQMHSLPLRVELLCLYLVFRQKCTSICYNHKRFFVCLFVLKKXKIWSKIAVTITX

SEQ ID NO: 3305 - protein, 33 aa, Homo sapiens
  SITE (28): Xaa equals any of the naturally occurring L-amino acids
APVHALSQECRDLSLLFFFPWNRPVPQXAATPS

SEQ ID NO: 3306 - protein, 45 aa, Homo sapiens
NIRKGEILSLVLEPELILDLSPSALPPFSLLCLLFCCIFSSSELS

SEQ ID NO: 3307 - protein, 118 aa, Homo sapiens
  SITE (5): Xaa equals any of the naturally occurring L-amino acids
  SITE (101): Xaa equals any of the naturally occurring L-amino acids
ARAKXSFHLKHPQFPAGLEVTDEVLEKAAGTDVNNIFQLTVEMFDYMDCELKLSESVFRQLNTAIAVSQMSSGQCRLAPLIQVIQDCSHLYHYTVKLLFKXHSCEWAQGNPWPGRLWL

SEQ ID NO: 3308 - protein, 41 aa, Homo sapiens
  SITE (18): Xaa equals any of the naturally occurring L-amino acids
  SITE (19): Xaa equals any of the naturally occurring L-amino acids
  SITE (35): Xaa equals any of the naturally occurring L-amino acids
  SITE (37): Xaa equals any of the naturally occurring L-amino acids
LKDCFKNIRFYLKEVNEXXSGWSAWRDLSSPHLHXRXSSDV

SEQ ID NO: 3309 - protein, 50 aa, Homo sapiens
  SITE (13): Xaa equals any of the naturally occurring L-amino acids
  SITE (47): Xaa equals any of the naturally occurring L-amino acids
DRITLERYLHKPXNSAFIKFSFTGNLSFSILTLGFCSKEFEGLLGGXLVP

SEQ ID NO: 3310 - protein, 42 aa, Homo sapiens
  SITE (25): Xaa equals any of the naturally occurring L-amino acids
GRDWLDSLEMQDKLVGQLVCWREPXKEEARRSPLVSRTTLKH

SEQ ID NO: 3311 - protein, 37 aa, Homo sapiens
KTNETQTYLLNTSLMEDSRYCEGYCGRKTWFPFFTNL

SEQ ID NO: 3312 - protein, 60 aa, Homo sapiens
  SITE (11): Xaa equals any of the naturally occurring L-amino acids
FMRLQIAKLNXTVAYLSLKFKCFNSLGTPNVNFSWARLFIDSLHVMMPMVSKILFGQNQE

SEQ ID NO: 3313 - protein, 52 aa, Homo sapiens
  SITE (7): Xaa equals any of the naturally occurring L-amino acids
  SITE (26): Xaa equals any of the naturally occurring L-amino acids
  SITE (38): Xaa equals any of the naturally occurring L-amino acids
  SITE (46): Xaa equals any of the naturally occurring L-amino acids
QRLLYIXVLCQQLQIPQISVAVTNMXFWNGKQLLGGLXNKLVVGLXVSFSYT

SEQ ID NO: 3314 - protein, 34 aa, Homo sapiens
ARLIQSANLILSTLYLLDLVMSEGTQRSSNPTPS

SEQ ID NO: 3315 - protein, 39 aa, Homo sapiens
GTAARGLFKVYNERSDIIKNYFIKEIIGWSIYAFKKILG

SEQ ID NO: 3316 - protein, 58 aa, Homo sapiens
NAIYFNYIVKLSFFIYRSVNFNTYTDLCKHHYSHDTEQFHHSSRFPHYPFTVMPTRFC

SEQ ID NO: 3317 - protein, 40 aa, Homo sapiens
  SITE (18): Xaa equals any of the naturally occurring L-amino acids
VNIRQTFFYLVGCLLEDXEANISGLQLTNLRNIGIGIVLV

SEQ ID NO: 3318 - protein, 45 aa, Homo sapiens
WERASQLLEFDFRNSVHIFFLLQVPSSLSLAREGVGVRMGSLELP

SEQ ID NO: 3319 - protein, 54 aa, Homo sapiens
FLHIWAAWTRRKNLQVWPLYKHVLQVLFDFSKVFLALDPLCLREVGNCSLTASL

SEQ ID NO: 3320 - protein, 42 aa, Homo sapiens
FCTNLIHSFKVSSHKYLLIIKENRVTLHGRSDRYSYFSERSN

SEQ ID NO: 3321 - protein, 123 aa, Homo sapiens
  SITE (77): Xaa equals any of the naturally occurring L-amino acids
  SITE (122): Xaa equals any of the naturally occurring L-amino acids
GRDFGDLLIYSGALLVFLSLLGWILWYTGNIEISRQELERDYGLRPSALARLARKLSRRGRGQRVRPRQPLGSSCQXQTEMCSCPYIRGQTDAPCTPSLLTWIKSRFALKKKKKKKKKKKKXL

SEQ ID NO: 3322 - protein, 128 aa, Homo sapiens
  SITE (18): Xaa equals any of the naturally occurring L-amino acids
  SITE (121): Xaa equals any of the naturally occurring L-amino acids
VAAVSGRVRRAVWPKGWXPAEGLREQAAGRGEILGSPSAAATRHVGGGLGPGCRRGPVPGSPQALGSRAWPRRLRSQAADPEQQIREAERGRLVALHHAAHPHGTGHHAQSHVQRPRGGAXRCRKLGA

SEQ ID NO: 3323 - protein, 60 aa, Homo sapiens
EGVERMGVTHWAGMAQLQHLAMTSQLLGTGQEECGLSANTGVDLEMKVWPLEAVTSPLLF

SEQ ID NO: 3324 - protein, 115 aa, Homo sapiens
  SITE (104): Xaa equals any of the naturally occurring L-amino acids
  SITE (107): Xaa equals any of the naturally occurring L-amino acids
QLKEVCRKFNRTNYCLHIDDQGQVVENIVKDITKLAHVPVQVWHGLSPGAMFENWFPAIGKFKTLVIKIIIVIGTCLLLLSLPVFSNDKTLALVKNLAQLINPXLPXYANNNPYK

SEQ ID NO: 3325 - protein, 54 aa, Homo sapiens
  SITE (46): Xaa equals any of the naturally occurring L-amino acids
  SITE (47): Xaa equals any of the naturally occurring L-amino acids
KNTFSYLFQYCSQILKYKFFFSMAWSRLTATSASRLQVILLPQPPXXWDHVAPA

SEQ ID NO: 3326 - protein, 74 aa, Homo sapiens
  SITE (48): Xaa equals any of the naturally occurring L-amino acids
  SITE (50): Xaa equals any of the naturally occurring L-amino acids
DKMSGTVHQIPQGDRQMRPPKPKRRKISDNRDYSTNAQCLLKEHAQMXLXIGIDIATVISIFRLWQIATTTTGC

SEQ ID NO: 3327 - protein, 96 aa, Homo sapiens
HYLSVKSRLLNTANKGLRNPAHSHLCSLITPHCLVPAPLYLGWLSVFQMHWALSLSWDFLLFPLPRILPPLPRSELGPSLTKDCDRTLCCMFLVSF

SEQ ID NO: 3328 - protein, 48 aa, Homo sapiens
  SITE (19): Xaa equals any of the naturally occurring L-amino acids
  SITE (23): Xaa equals any of the naturally occurring L-amino acids
  SITE (37): Xaa equals any of the naturally occurring L-amino acids
LLNSAFLKCCTCKRLSVVXLIRXDVDAGLYVSKTHDXLVLKVTKTSYF

SEQ ID NO: 3329 - protein, 68 aa, Homo sapiens
  SITE (61): Xaa equals any of the naturally occurring L-amino acids
  SITE (65): Xaa equals any of the naturally occurring L-amino acids
  SITE (67): Xaa equals any of the naturally occurring L-amino acids
  SITE (68): Xaa equals any of the naturally occurring L-amino acids
EGAPTAKQLELEHFSSLGLRLGLHISLLASPACQLQILRLLSLHNCTGKFLIINLLYTQKXKKKXGXX

SEQ ID NO: 3330 - protein, 97 aa, Homo sapiens
FVEVSQLYDCNWIVVNCSTPANYFHVLRRQILLPFRKPLIIFTPKSLLRHPEAKSSFDQMVSGTSFQRVIPEDGAAARALSRCSGSSSARERCTMTW

SEQ ID NO: 3331 - protein, 54 aa, Homo sapiens
QLLIISQKNTIMYKFRGFCIPCFFGYKYAKLKMFANTCFQFLNFSSVALLIMLK

SEQ ID NO: 3332 - protein, 71 aa, Homo sapiens
  SITE (40): Xaa equals any of the naturally occurring L-amino acids
AVLARQKQGCYISFAFCLPCGSSYKSDISGACVYSNFRDXSIKCMLYTHAHTLLSSGLESAFRPSNPPFQL

SEQ ID NO: 3333 - protein, 112 aa, Homo sapiens
NASRHCAGCVAWPSQPIQYFSPHFPGRNLRRQNVRFLLEPRLQGPWFSVTSCCRTLFLSLLWLLGSSEGSFRLALSHHISSGVWAFLSPSPLGSVSSLLCFLRSRPDVSYQL

SEQ ID NO: 3334 - protein, 108 aa, Homo sapiens
  SITE (25): Xaa equals any of the naturally occurring L-amino acids
FRVSLHIIALPLTSEMLIAVKKSKXNDVNQKIPCCIESKSNSVNTITRTLCEQAPKRRAACNLQRLLENSEHQSIKHVGSKETHLEFQFGDGSCKHLNSLPRNVSPEF

SEQ ID NO: 3335 - protein, 49 aa, Homo sapiens
LLPMLASNSWAQAILLPWPLLKCWDTVMSHHTCQVLCDTMHLFNADWET

SEQ ID NO: 3336 - protein, 51 aa, Homo sapiens
  SITE (48): Xaa equals any of the naturally occurring L-amino acids
GGSESNLTGVLISKEDWTHTQRKDNVKTQGEDSYRHTMERDLRRNQPXPQG

SEQ ID NO: 3337 - protein, 73 aa, Homo sapiens
  SITE (69): Xaa equals any of the naturally occurring L-amino acids
  SITE (73): Xaa equals any of the naturally occurring L-amino acids
QQWFRTYLQIFWADDYLLAFTSPEPSLNYGLSNSSWFNCDIILVGVIIYLLGYNDVMVILRINVQKPTXKKTX

SEQ ID NO: 3338 - protein, 74 aa, Homo sapiens
QRLQCHSSTMIASHTGNSVPQNLMVMSLKCLIQSLAHRGYTTIFLSANCLLSSCGFEDCGLGKHLDGTPVKMRN

SEQ ID NO: 3339 - protein, 84 aa, Homo sapiens
  SITE (80): Xaa equals any of the naturally occurring L-amino acids
  SITE (84): Xaa equals any of the naturally occurring L-amino acids
WSRPPDLRDPPVSASQSDGIRGVSHRARRKTRFFRSTLHCQCPWYSLHNKLHKSAQKSQTCYQVIFRDPKTTLPTLSSVXQAGX

SEQ ID NO: 3340 - protein, 65 aa, Homo sapiens
YSFFTSCKNLTCMRFSEIENHNQDNLSLLQMFYIEYHLASKSVIPFLSVAPDFHNLPLLSRSGNL

SEQ ID NO: 3341 - protein, 66 aa, Homo sapiens
  SITE (56): Xaa equals any of the naturally occurring L-amino acids
AHLRHTVGSYHMLSACSFPACAQGGFGGVGYAVCPLQIPGCPTSRNLAMQGKAHIXSPASLGSNAV

SEQ ID NO: 3342 - protein, 41 aa, Homo sapiens
PVLVFVSNHDAFIFSFLMCKFAITPFWVAAETKNSKMSCTQ

SEQ ID NO: 3343 - protein, 32 aa, Homo sapiens
GYSVFPAPFVEKTVLSPLNTFGTLAENQLTIY

SEQ ID NO: 3344 - protein, 25 aa, Homo sapiens
VDEIHMCLEQCDYLTAEQLIKLPGQ

SEQ ID NO: 3345 - protein, 63 aa, Homo sapiens
  SITE (11): Xaa equals any of the naturally occurring L-amino acids
  SITE (19): Xaa equals any of the naturally occurring L-amino acids
  SITE (45): Xaa equals any of the naturally occurring L-amino acids
DTVGKLVFWSXIKKIILKXVSMLRSYYNTGSCWSHCKCNHTFTAXHLQFDFALSLFLFSFVER

SEQ ID NO: 3346 - protein, 72 aa, Homo sapiens
GDKRKSSNITGGSAVEARVPPPIESRCPPFSGPCFSCFRATGDSHPYKAMCSPVSFPATPTSLRREFCHLRV

SEQ ID NO: 3347 - protein, 48 aa, Homo sapiens
  SITE (25): Xaa equals any of the naturally occurring L-amino acids
  SITE (26): Xaa equals any of the naturally occurring L-amino acids
  SITE (42): Xaa equals any of the naturally occurring L-amino acids
SRLSFQDLAPALGMVGGKAKNLGSXXPWALKNVVLFKEQGSXQGCFWG

SEQ ID NO: 3348 - protein, 83 aa, Homo sapiens
  SITE (66): Xaa equals any of the naturally occurring L-amino acids
  SITE (81): Xaa equals any of the naturally occurring L-amino acids
KSHPIPAVGILSKKKKSAMNYHMKSNKERRQKASRALFLFCRLCWLQSNRMLESGVFLVGKTIATXLSIKKSVWLKKKKKXKE

SEQ ID NO: 3349 - protein, 78 aa, Homo sapiens
  SITE (71): Xaa equals any of the naturally occurring L-amino acids
  SITE (73): Xaa equals any of the naturally occurring L-amino acids
EGLPERIDLKLHSKEEVLVHICVFHLHEQNGPARWSCSKRGGTCPIARKPSGSFILEGVCNRLGRISFFFXLXALGKS

SEQ ID NO: 3350 - protein, 68 aa, Homo sapiens
  SITE (60): Xaa equals any of the naturally occurring L-amino acids
  SITE (61): Xaa equals any of the naturally occurring L-amino acids
  SITE (68): Xaa equals any of the naturally occurring L-amino acids
AQEFETSLGDMVKSCLYKKIQKISQAWWHAPAAPAYLGGLRWEDHLSLGGQGCSELRSDXXFPALVTX

SEQ ID NO: 3351 - protein, 71 aa, Homo sapiens
  SITE (2): Xaa equals any of the naturally occurring L-amino acids
  SITE (4): Xaa equals any of the naturally occurring L-amino acids
CXGXVIHEKKFKASPVCIISPTLLFFSPSSLLKSPARLRFTISPVGSCLVHRKVGPGGRIQGPRAEAFFPI

SEQ ID NO: 3352 - protein, 55 aa, Homo sapiens
  SITE (15): Xaa equals any of the naturally occurring L-amino acids
FSPPKKKKNPLEVLXSARPMKINPWIIGNLKRFPKWASLRHIQQLCRLIRRNGHS

SEQ ID NO: 3353 - protein, 52 aa, Homo sapiens
LESGIRTLWLLIEGRTVLKSRVGRAWWLMPVILALWEAKADGSPEVRSSRAA

SEQ ID NO: 3354 - protein, 68 aa, Homo sapiens
  SITE (59): Xaa equals any of the naturally occurring L-amino acids
  SITE (68): Xaa equals any of the naturally occurring L-amino acids
ALNMTKRNLGKQFLKSKVYSCFVSVWLLIIQQNRLLKTGHSKPEFQDLTLDTSMEAGKXSGAGKGRGX

SEQ ID NO: 3355 - protein, 25 aa, Homo sapiens
SLAENVIISMVFFSSNTTCDSRLCH

SEQ ID NO: 3356 - protein, 51 aa, Homo sapiens
  SITE (24): Xaa equals any of the naturally occurring L-amino acids
GQTQFKAAAPKPGSTLTSLRPSRXHSRAIKSEFLEVKCRHRYFLLKYPRGP

SEQ ID NO: 3357 - protein, 81 aa, Homo sapiens
  SITE (41): Xaa equals any of the naturally occurring L-amino acids
  SITE (67): Xaa equals any of the naturally occurring L-amino acids
  SITE (74): Xaa equals any of the naturally occurring L-amino acids
QDIHRVETAALPHPFRPLECHQTTRAAPAGVAHLGNSEDKXPWRLFSGGRWHFPRKGSTQTSESEDXLKRKLFXLYSGMLL

SEQ ID NO: 3358 - protein, 49 aa, Homo sapiens
  SITE (27): Xaa equals any of the naturally occurring L-amino acids
CFARTLFLFFFRKISFDSKWKAKHTFXPPTLAIGRGPFLLPSYNDSVYV

SEQ ID NO: 3359 - protein, 70 aa, Homo sapiens
  SITE (51): Xaa equals any of the naturally occurring L-amino acids
NSARALLGLPECWDYRRDTVPGPRSILIDFSHLSIWVIMSCLFSCLFFCFXFFPDIQYFVFYLVWCWIFL

SEQ ID NO: 3360 - protein, 57 aa, Homo sapiens
  SITE (51): Xaa equals any of the naturally occurring L-amino acids
VFHFLWSDCKIYCLFNFSFHIFIATDQKMKGDCLFVCWTLFPQDLAQLIWXFAFECV

SEQ ID NO: 3361 - protein, 43 aa, Homo sapiens
  SITE (17): Xaa equals any of the naturally occurring L-amino acids
  SITE (31): Xaa equals any of the naturally occurring L-amino acids
  SITE (37): Xaa equals any of the naturally occurring L-amino acids
LLLSSFPLGKLSYFSPXLKINPNFNRGPPYXGPFHPXYPYNLY

SEQ ID NO: 3362 - protein, 74 aa, Homo sapiens
  SITE (72): Xaa equals any of the naturally occurring L-amino acids
RGTCGFYLTFVSVFTVSCEFYNEPVRFAELRVIYPSMVENTGSFRGVKVACLEICVQWVVFLTSVSQSCFAXES

SEQ ID NO: 3363 - protein, 49 aa, Homo sapiens
  SITE (35): Xaa equals any of the naturally occurring L-amino acids
GNVICTWIKFQNTTCNFLSLEKQHPPLHCCLTIFXLMQFSLTTEGRKTL

SEQ ID NO: 3364 - protein, 36 aa, Homo sapiens
MTEKNDTSCCGDLFTRNGVMKCLGKRLQHRIYLGVN

SEQ ID NO: 3365 - protein, 84 aa, Homo sapiens
NPISTKKKKTRGGARYPIRPIVSRITIHWPSFYNVVTGKTLALPNLIALQHIPLSPAGVIAKRPDRSPFPTVAQPEWRMANCKR

SEQ ID NO: 3366 - protein, 39 aa, Homo sapiens
LGVVARAYESQHFGRLRWADYLRPGVRDQPGQHGEPRLY

SEQ ID NO: 3367 - protein, 39 aa, Homo sapiens
SFFKLNERRLSSPDIKTDHKAIIIKMAWHCHRVKSVKNY

SEQ ID NO: 3368 - protein, 80 aa, Homo sapiens
  SITE (37): Xaa equals any of the naturally occurring L-amino acids
  SITE (62): Xaa equals any of the naturally occurring L-amino acids
  SITE (70): Xaa equals any of the naturally occurring L-amino acids
SPSGPVSIPSLPPTISSSEVPGFDQHSYPFSCHHPLXLLCLWNMKCSSVSLPLPPSLKQACXSFLRLSEXFCCSSQRETG

SEQ ID NO: 3369 - protein, 37 aa, Homo sapiens
GSWDSGGLITCPALQSEFRSHNSDSDLLTPKFLQVLP

SEQ ID NO: 3370 - protein, 54 aa, Homo sapiens
  SITE (42): Xaa equals any of the naturally occurring L-amino acids
GLKAGRHWMPDDEVDFQTGALLKRWDGQRHRRSVGASSITKXFNEDLGIAWSWS

SEQ ID NO: 3371 - protein, 88 aa, Homo sapiens
  SITE (86): Xaa equals any of the naturally occurring L-amino acids
YVKLSENKFQRGDCGKPKYAIQSVPLWHILRWLFRGSADTKHGSENLSFCKINLHVYINKANKGCRQTVSLRSFYLNLGKVNSQEXKT

SEQ ID NO: 3372 - protein, 49 aa, Homo sapiens
  SITE (41): Xaa equals any of the naturally occurring L-amino acids
DQRAQERPLMVTSIGRTMTKYNSLLDTKSPTVRILLHYLGXSLYKSLKI

SEQ ID NO: 3373 - protein, 55 aa, Homo sapiens
  SITE (46): Xaa equals any of the naturally occurring L-amino acids
GLSHSNSSYLEPLGSDVDRANVKFTENTCVFRTLKGTIRACFPSLXMHIFGISWG

SEQ ID NO: 3374 - protein, 66 aa, Homo sapiens
  SITE (66): Xaa equals any of the naturally occurring L-amino acids
ASRRLNKLLTVSQLETGEAEFKSTSFSFQSSCSLRHTPWRVVHCEQEGSALFHLSPFFFYLFSRGX

SEQ ID NO: 3375 - protein, 57 aa, Homo sapiens
  SITE (35): Xaa equals any of the naturally occurring L-amino acids
  SITE (45): Xaa equals any of the naturally occurring L-amino acids
  SITE (48): Xaa equals any of the naturally occurring L-amino acids
  SITE (53): Xaa equals any of the naturally occurring L-amino acids
KIQNLNPNPGLTNLKVCILKRDTLSFCVRRVESIXICRYRVFYGXGLXRGHNXGVKG

SEQ ID NO: 3376 - protein, 67 aa, Homo sapiens
EKIYPSLMLLGLAKLCEAQKLRPSLHLLYFKWKVNTVWEESARSISPFVLIGFYFFLLKTGVNYTLH

SEQ ID NO: 3377 - protein, 51 aa, Homo sapiens
  SITE (26): Xaa equals any of the naturally occurring L-amino acids
FQKIDTVSNFNLDVIVIITVFIYPSXYILSCRQLLFRGMKKKRELVGSLLA

SEQ ID NO: 3378 - protein, 59 aa, Homo sapiens
  SITE (49): Xaa equals any of the naturally occurring L-amino acids
  SITE (50): Xaa equals any of the naturally occurring L-amino acids
PLPDTLPVTVRINLKSLPSPYQPGNHPALATFLLSLSLTLLKLHVTFAXXFFPEHNKLP

SEQ ID NO: 3379 - protein, 59 aa, Homo sapiens
  SITE (8): Xaa equals any of the naturally occurring L-amino acids
  SITE (36): Xaa equals any of the naturally occurring L-amino acids
  SITE (53): Xaa equals any of the naturally occurring L-amino acids
LWQEIWKXLKSMREKKWNAHYKRNSSLVGGLCSLFXFFPSYYSLTTPLASQLXLCPKKS

SEQ ID NO: 3380 - protein, 37 aa, Homo sapiens
ATWSGARSLGFRIQQAQIQVQLSHVAECCLNLSVLSC

SEQ ID NO: 3381 - protein, 77 aa, Homo sapiens
NSARVTAGGEEWVSEQSFICIYSRSPLLALPRVPPPVRLAAAFDFHRNTNPIVNSACKGSRLCTPYENLMPDDLRWS

SEQ ID NO: 3382 - protein, 44 aa, Homo sapiens
  SITE (40): Xaa equals any of the naturally occurring L-amino acids
  SITE (41): Xaa equals any of the naturally occurring L-amino acids
PWPEVYKEILLNIAFCSGKYIHRNRIVYSPAKECYLLSFXXMLS

SEQ ID NO: 3383 - protein, 52 aa, Homo sapiens
  SITE (2): Xaa equals any of the naturally occurring L-amino acids
  SITE (20): Xaa equals any of the naturally occurring L-amino acids
  SITE (23): Xaa equals any of the naturally occurring L-amino acids
  SITE (34): Xaa equals any of the naturally occurring L-amino acids
  SITE (36): Xaa equals any of the naturally occurring L-amino acids
  SITE (44): Xaa equals any of the naturally occurring L-amino acids
RXLSTFNSWGSMRKTDIFFXNWXCGAFFVSPKEXPXYQKFTLGXSRVVPLKV

SEQ ID NO: 3384 - protein, 77 aa, Homo sapiens
KKKDPEILLLPLEPTPNSSLERNRGTPLIPIPSFTNQQELHAVMTGRKELKACPMILSLVWLLESNFSLGPERMIHI

SEQ ID NO: 3385 - protein, 98 aa, Homo sapiens
VQKPQNPYKPKWVKMRYGAWYLNPKLWKKQRVDEPLVDPEVSHKAQEENFKKELQEQEELLADLHGTVAFKDFILSRGYRMPRFLENMYIGKECKPCM

SEQ ID NO: 3386 - protein, 63 aa, Homo sapiens
  SITE (15): Xaa equals any of the naturally occurring L-amino acids
NVESYLCFPLTLILXFPVVFGLNVNCIHLLILICVTHTEIILFIEPPVGRCLIVYKYKIVPNT

SEQ ID NO: 3387 - protein, 62 aa, Homo sapiens
IRHEKKERMKERKEKKERKEKGKKERKERKERKREKERRKRRKGIPGIYHCMSKGRVVDRHS

SEQ ID NO: 3388 - protein, 56 aa, Homo sapiens
  SITE (9): Xaa equals any of the naturally occurring L-amino acids
QEFIQILVXSKREVSCTFNWLSTVEFKHNHGQIIQMLEIQQASWYLRLRNQASAEI

SEQ ID NO: 3389 - protein, 50 aa, Homo sapiens
PSIDLEAEESQRLLKVVMWFSFKKLLFLESRIYGYNVCSLFVHKIKPFKK

SEQ ID NO: 3390 - protein, 25 aa, Homo sapiens
  SITE (23): Xaa equals any of the naturally occurring L-amino acids
LGLKNFIFKKKKKKLEGGPGTQXAL

SEQ ID NO: 3391 - protein, 126 aa, Homo sapiens
  SITE (54): Xaa equals any of the naturally occurring L-amino acids
  SITE (110): Xaa equals any of the naturally occurring L-amino acids
NPDPQPKFKLVPSPGYNSKKWGCDPENSVPAISVCPLLHSHLVSTGLRCLLLGXQAGLALSHLGPHVSWHSRPGVMQTDFLSLRFFCLEKISPSCDPRGPGLGLRVCVPXCVLKIGPGKEAGRLRN

SEQ ID NO: 3392 - protein, 111 aa, Homo sapiens
  SITE (99): Xaa equals any of the naturally occurring L-amino acids
SCREGLRHSVSGPYPVEGLCHSVGGPYPISRKLFATAWVGLTQSVEGFLPQRGWALPSQRPLPQRGWALPNQSKAFDTAWVGPCPISRSPSTQRGLGLXPISRKATKEQKI

SEQ ID NO: 3393 - protein, 46 aa, Homo sapiens
ILYYQGVSEIYMNLSINNWYILFICIKIRSLLHPQHHIPYPQNNGE

SEQ ID NO: 3394 - protein, 20 aa, Homo sapiens
KKKKREWGEGEGRKRGKWVL

SEQ ID NO: 3395 - protein, 154 aa, Homo sapiens
  SITE (58): Xaa equals any of the naturally occurring L-amino acids
  SITE (95): Xaa equals any of the naturally occurring L-amino acids
  SITE (102): Xaa equals any of the naturally occurring L-amino acids
  SITE (117): Xaa equals any of the naturally occurring L-amino acids
  SITE (118): Xaa equals any of the naturally occurring L-amino acids
  SITE (133): Xaa equals any of the naturally occurring L-amino acids
  SITE (147): Xaa equals any of the naturally occurring L-amino acids
  SITE (151): Xaa equals any of the naturally occurring L-amino acids
GTRTEVEARAARPGAESAPAAAMPDSWDKDVYPEPPRRTPVQPNPIVYMMKAFDLIVXRPVTLVREFIERQHAKNRFTTTTGSTAACQTSLSARXRTSCASXSTKKLSTLCRIGSKXXSRGKDRTTSRLYQGXGAVTQVAKAYQGPXSGPXGLH

SEQ ID NO: 3396 - protein, 37 aa, Homo sapiens
  SITE (23): Xaa equals any of the naturally occurring L-amino acids
LLSKINLSTRKSTRRHRAPSWAXDLREYVGKREGAIS

SEQ ID NO: 3397 - protein, 109 aa, Homo sapiens
  SITE (37): Xaa equals any of the naturally occurring L-amino acids
  SITE (109): Xaa equals any of the naturally occurring L-amino acids
TFTQTLQIFFLIIGRRLTGRMAAVDDLQFEEFGNAAXSLTANPDATTVNIEDPGETPKHQARIPKRLKEEKKMMSYWEMMTLTKLSYLLDRRKASPSGHLNTTKHSLMX

SEQ ID NO: 3398 - protein, 96 aa, Homo sapiens
FLPFLFTKISSFLLLSFCLFFSTILQTFFFSIFLFYCLLISSSFFIPSLLCLPLIFFFNIIGFAQIFSTSIHLFFYIASVKFLICLKQISLCIINQ

SEQ ID NO: 3399 - protein, 141 aa, Homo sapiens
  SITE (130): Xaa equals any of the naturally occurring L-amino acids
  SITE (140): Xaa equals any of the naturally occurring L-amino acids
EREMLQAPRGRARAALRRLAVATRTMAGGSLALGSVTVHSSEPEVRIPENNPVKLSCAYSGFSSPRVEWKFDQGDTTRLVCYNNKITASYEDRVTFLPTGITFKSVTREDTGTYTCMVSEEGGNSYGESXSSSSCLCLHXG

SEQ ID NO: 3400 - protein, 156 aa, Homo sapiens
  SITE (39): Xaa equals any of the naturally occurring L-amino acids
  SITE (135): Xaa equals any of the naturally occurring L-amino acids
  SITE (144): Xaa equals any of the naturally occurring L-amino acids
KKGHLLRLPAAFRKAASQNSSLWAQLSSTQTSDSTDAAXAKTQFLQNMQTASGGPQPRLSAVEVEAEAGRLRKACSLLRLRMREELSAAPMDWMQEYRCLLTLEGLQAMVGQCLHRLQELRARWREQPQRPCPVXEAPREPRRXVGGKTDLAWDPH

SEQ ID NO: 3401 - protein, 36 aa, Homo sapiens
NCYHSLLLSSCAKHANVATKSYYNLLTVSYNGEKRC

SEQ ID NO: 3402 - protein, 54 aa, Homo sapiens
  SITE (17): Xaa equals any of the naturally occurring L-amino acids
PGIRILGFLLSGLSVPXRLCKSNCGFGIKSNNKNCNYFCTNIIDEEQCGFDDLS

SEQ ID NO: 3403 - protein, 68 aa, Homo sapiens
  SITE (25): Xaa equals any of the naturally occurring L-amino acids
YFKNAHLKQSLSSILKKLPSYRVVXSSQSPAFIPLYCLFVSPRSFLLFTMLCLNPALLKSQKKKKKKI

SEQ ID NO: 3404 - protein, 51 aa, Homo sapiens
GTAATHPLLCTWFLTGHGLVQGIMQGWGPTRLHRVLVKKKFALAGRGGSRL

SEQ ID NO: 3405 - protein, 89 aa, Homo sapiens
  SITE (43): Xaa equals any of the naturally occurring L-amino acids
HSHSPDHACIWMDEGAKVPRGSRAAKATLPPAKGAAPQCSSSXERARSWGSHLCVGEQNPSHASGFCSWDTKVKMGRWEEDVLIPGHVF

SEQ ID NO: 3406 - protein, 59 aa, Homo sapiens
ISAPCLRKNQFGYSFLESRIIVKELRTLGVLRVVVKMNWMCVCTCGSMQSTRCKACYLC

SEQ ID NO: 3407 - protein, 83 aa, Homo sapiens
HEEKQRGSSSSGRKGQQTLEGRVFWEPQSSDGFSIFPWRRGWVLESPPFSAPYTQFVLRSRHEVCAHPSAHSLLLSSIPICWA

SEQ ID NO: 3408 - protein, 51 aa, Homo sapiens
  SITE (36): Xaa equals any of the naturally occurring L-amino acids
  SITE (39): Xaa equals any of the naturally occurring L-amino acids
  SITE (47): Xaa equals any of the naturally occurring L-amino acids
TLTNQKKILIKVYIFSGTPDIVYSSTIPFIKCSQAXLLXNFCTLAGXQQWR

SEQ ID NO: 3409 - protein, 50 aa, Homo sapiens
  SITE (43): Xaa equals any of the naturally occurring L-amino acids
QVWRQRRVKEGDGSGAGAGRVHVAWGGGGGKSPDKDAWGCMQXEGMPESS

SEQ ID NO: 3410 - protein, 45 aa, Homo sapiens
  SITE (27): Xaa equals any of the naturally occurring L-amino acids
  SITE (45): Xaa equals any of the naturally occurring L-amino acids
LAQSRVTENYSLKDYLGSESFQKITQXFPQFLKVKAFQGKIKSGX

SEQ ID NO: 3411 - protein, 52 aa, Homo sapiens
KTMLFIVQEQSRLLKWDIVTKCCQLMLYLISNTCKTFILLSRLTKKTKRSCL

SEQ ID NO: 3412 - protein, 83 aa, Homo sapiens
  SITE (51): Xaa equals any of the naturally occurring L-amino acids
TKRDYQVSQGYIVNEKHLGQSSGLLVQALCFFSTEAPHWSSFFIILIFLGXSEGRQACIAGLTFTSSSCLVSPLPSLFLACGC

SEQ ID NO: 3413 - protein, 55 aa, Homo sapiens
WKLFICPQERMNNLIENAKGVILGEHLMSSEEKHRQIFYSLPYFPLYFQDVGIKM

SEQ ID NO: 3414 - protein, 27 aa, Homo sapiens
LPTSSQPIALTLGPLSMFSKQEKQQLI

SEQ ID NO: 3415 - protein, 55 aa, Homo sapiens
  SITE (53): Xaa equals any of the naturally occurring L-amino acids
NELIPLILKLELAYITIGRTWSCLARWKCSGKLLLLVDVEVRVRILQCLVKGXRL

SEQ ID NO: 3416 - protein, 55 aa, Homo sapiens
NIRFLNPIVTWHQNYTITTRHFSAESFLGNNASFLPLSLHKQKNMESIFSQKINM

SEQ ID NO: 3417 - protein, 38 aa, Homo sapiens
ILVSSFLTLICFFCTNCLMSYLISHLGDIGNYYLHTCR

SEQ ID NO: 3418 - protein, 113 aa, Homo sapiens
  SITE (74): Xaa equals any of the naturally occurring L-amino acids
  SITE (82): Xaa equals any of the naturally occurring L-amino acids
  SITE (107): Xaa equals any of the naturally occurring L-amino acids
TVGRVLTRDGSSASWGGGVPSGMEEGLASLSVVTSPSVSASNEGNPSSSTGRLSSVSVRTASKFASFSSSIFCXKRKKQKMXVDPGRQVTLCINMFDQMSEPYVKSXMPIPEH

SEQ ID NO: 3419 - protein, 44 aa, Homo sapiens
VSGNPLGKILFLAPIEDQVFQVIYMVLKFLIHELLNIFKFNTAF

SEQ ID NO: 3420 - protein, 81 aa, Homo sapiens
  SITE (74): Xaa equals any of the naturally occurring L-amino acids
ELVLMRAGPLGLVLPAWDRGQCMLHILGSQVRLWRPGGSSMEGRSATQEQRSRWPRCREDCGDPVAHWPLWKSXRWEGGWA

SEQ ID NO: 3421 - protein, 95 aa, Homo sapiens
  SITE (25): Xaa equals any of the naturally occurring L-amino acids
PRASVYVNSPIQMLVETSHVQLTQXIIQTPQEFKDFCQYACNISFRTRRKPVEGKPTVANQFQCPTQCSLDSLYMHTVASVFVWLQSQNVGFFWP

SEQ ID NO: 3422 - protein, 67 aa, Homo sapiens
GMSTSEAYFPTSAASSRQNFKSLSHLHSPIMEGFLKDWSRWGRKEASGPLDIFPKVRVSGPTKPLST

SEQ ID NO: 3423 - protein, 30 aa, Homo sapiens
  SITE (30): Xaa equals any of the naturally occurring L-amino acids
IHRASACWARKMPLMARGYVGSGYVPAVTX

SEQ ID NO: 3424 - protein, 37 aa, Homo sapiens
IITLESCKEINLQGVFLCMFFIFVIWIRVKKLEKELL

SEQ ID NO: 3425 - protein, 31 aa, Homo sapiens
LPPAQGHTGPCNFSFYIIQGIRLQYNCSRCL

SEQ ID NO: 3426 - protein, 35 aa, Homo sapiens
  SITE (23): Xaa equals any of the naturally occurring L-amino acids
KVCKHKNTHCICFQISASGQDVXVEILFTFPPEMT

SEQ ID NO: 3427 - protein, 47 aa, Homo sapiens
  SITE (27): Xaa equals any of the naturally occurring L-amino acids
SYRSPKYPLGTPRDPGLPCPVESGYCXSVNLCDQENVTWVTFAQVLC

SEQ ID NO: 3428 - protein, 198 aa, Homo sapiens
  SITE (163): Xaa equals any of the naturally occurring L-amino acids
  SITE (183): Xaa equals any of the naturally occurring L-amino acids
  SITE (190): Xaa equals any of the naturally occurring L-amino acids
  SITE (194): Xaa equals any of the naturally occurring L-amino acids
LTSFLKHLKPPFQRCPNRKKVFVEDDENSSQKRSVIVCQSRNEAQGKTVSQNQPDVSHTSRPSPSIAVKANTNKPHVPKPIEPLHNLSLTEKSWPKDSSVVYAKSLEHSGSLDDPNRISLVKRNAVLPSKPLQDREAMDDKPGVSGQLPKGKALELALKRPRXPVLSVCSSSETPYLLKETNXGNGQGEXRNLXTIQS

SEQ ID NO: 3429 - protein, 57 aa, Homo sapiens
  SITE (27): Xaa equals any of the naturally occurring L-amino acids
  SITE (36): Xaa equals any of the naturally occurring L-amino acids
  SITE (46): Xaa equals any of the naturally occurring L-amino acids
  SITE (57): Xaa equals any of the naturally occurring L-amino acids
NFAYVCLGLLDLIKTLVILLCIHTVLXVLIAWLGVXRMTIAACTSXSGDFLLTQSIX

SEQ ID NO: 3430 - protein, 52 aa, Homo sapiens
  SITE (38): Xaa equals any of the naturally occurring L-amino acids
RSGFLNYRAFRVDIVNLTVRHFTAREDIHHSADRGGKXRANLKNNFTMFLKL

SEQ ID NO: 3431 - protein, 35 aa, Homo sapiens
  SITE (12): Xaa equals any of the naturally occurring L-amino acids
LKIFFQLQDLHXGKQNNLNVSTLITDLFKLINFML

SEQ ID NO: 3432 - protein, 64 aa, Homo sapiens
ALNNLYNKIVSVGPKLKCKVQISNTKERSILFLLVQPWFPNCVAGHLSKLTWVPHNILKFLRKT

SEQ ID NO: 3433 - protein, 39 aa, Homo sapiens
GFKDPRPALECEEMGFKLLAEVLRDEFSEAVLSKRIFLR

SEQ ID NO: 3434 - protein, 85 aa, Homo sapiens
  SITE (29): Xaa equals any of the naturally occurring L-amino acids
  SITE (37): Xaa equals any of the naturally occurring L-amino acids
  SITE (38): Xaa equals any of the naturally occurring L-amino acids
  SITE (77): Xaa equals any of the naturally occurring L-amino acids
  SITE (85): Xaa equals any of the naturally occurring L-amino acids
GDSYHKPKRQALGEPNPGNTLILDFQPPXLFEKINFXXLSHSLYSILLWQPKLTNLLIYLFNEYSPQFFTLLQIHSXCLNMHRLX

SEQ ID NO: 3435 - protein, 60 aa, Homo sapiens
  SITE (52): Xaa equals any of the naturally occurring L-amino acids
NLYNLVDRNCQSPALNSCPYSLFKIAYPLQSAEDGVATRLQIREESTSCLAXEYWSQEPA

SEQ ID NO: 3436 - protein, 70 aa, Homo sapiens
RRSPSFLPHEPLTRLLMTWQLVFPRPCATREKESKQAGSCPVFYNLILEVVFHHFCCILLVSVGKDCIEV

SEQ ID NO: 3437 - protein, 113 aa, Homo sapiens
REQKLELHRGGGRSRTSGSPGLAAAIGPTIFVDVDPNASLSREEIFGPVLVVTRFTSEEQALQLANDSQYGLGAAVWTRDLSRAHRMSRRLKAGSVFVNNYNDGDMTVPFGRL

SEQ ID NO: 3438 - protein, 48 aa, Homo sapiens
ERVEVSKVPSGLQLGQLTENRKELPLRGRKENDTESMLGHIGFKGISL

SEQ ID NO: 3439 - protein, 47 aa, Homo sapiens
GTRERPKVRRVSLLTCQAASPQSKEAALSLQNEGFIWGRETLGLFVG

SEQ ID NO: 3440 - protein, 78 aa, Homo sapiens
YPLLEWSRFQTQLCTGSCLRASQNWGTAWAQGIAVNTRAKFLSVHVYLLVQFPPMSENIWCLVFCSCDSLLRMMISNF

SEQ ID NO: 3441 - protein, 72 aa, Homo sapiens
  SITE (4): Xaa equals any of the naturally occurring L-amino acids
  SITE (40): Xaa equals any of the naturally occurring L-amino acids
NDLXEDYTADKAANLDFVLYFMSRPKFLHERMIRVLLELXVFFISSSLKWYCLIVVLIFIFLITNEHIKYIY

SEQ ID NO: 3442 - protein, 56 aa, Homo sapiens
GQWGPQAEHFTKSARVKPEIESHLPAPSVLSVSLYKLPICSPGKKTNFSPFLLSVD

SEQ ID NO: 3443 - protein, 63 aa, Homo sapiens
EMGYPIDAAGNLCCLLYLRAETMCQRLYFRGSGKKVQAVGMFLATSFSFSKVLQEINLGYTGF

SEQ ID NO: 3444 - protein, 80 aa, Homo sapiens
  SITE (36): Xaa equals any of the naturally occurring L-amino acids
  SITE (42): Xaa equals any of the naturally occurring L-amino acids
ETCQQNSRTLGEIPTLVFKKTSKLESVCGIQLEQKXENKNFXTTQVCNESPHGDGYSSGVIKDIWTKMADTNSVATVEIE

SEQ ID NO: 3445 - protein, 38 aa, Homo sapiens
SVKYKFSCLASHSSLKSVLNFGHRVFIFQYLVVPMTYT

SEQ ID NO: 3446 - protein, 71 aa, Homo sapiens
  SITE (60): Xaa equals any of the naturally occurring L-amino acids
SAKLDFWEPSSVGWGGKTEVQAALGKEFPILLTGVRAGQVQCLTPVIPELWQAKAGRSLXVRRSRPAWPTW

SEQ ID NO: 3447 - protein, 49 aa, Homo sapiens
  SITE (4): Xaa equals any of the naturally occurring L-amino acids
GTRXKHIQGPFLQHLLHAWCCAGEQRWDMEWREGEGGTEGELARLLWFL

SEQ ID NO: 3448 - protein, 59 aa, Homo sapiens
GCGMWGFALMQRSFYVGFPQSYRPTVHRSPSPMYCPIDCRFHSAQNGCLSLVPNIPNLS

SEQ ID NO: 3449 - protein, 167 aa, Homo sapiens
  SITE (99): Xaa equals any of the naturally occurring L-amino acids
  SITE (145): Xaa equals any of the naturally occurring L-amino acids
  SITE (148): Xaa equals any of the naturally occurring L-amino acids
HEVPLALASMAMVRPHISYHCRQTLHTRHRGSGDRSSHPAHSRSQGASSARHGYSSPAHQVPQHGPLYQSDSGPRSGLQAAEAPIYQLPLTHDQGYPAXSSLFHSPETSNNHGVGDPWGNFRGSSSACPILQQSSCIGAYWQYKXCNXNVCPESSRSIREVQCGFYN

SEQ ID NO: 3450 - protein, 40 aa, Homo sapiens
GRALSLSLSPQVPHPAQWPGLGMLLQDGSVTPCDCLMIAP

SEQ ID NO: 3451 - protein, 80 aa, Homo sapiens
  SITE (8): Xaa equals any of the naturally occurring L-amino acids
ARNIWANXSLTECEGHQCEAGQKGRDPSRSTAVPFKLPASDTVSSILFRLKSDLDSKGLFKHMGGIASMDSWRLTSAVHF

SEQ ID NO: 3452 - protein, 83 aa, Homo sapiens
  SITE (10): Xaa equals any of the naturally occurring L-amino acids
  SITE (19): Xaa equals any of the naturally occurring L-amino acids
  SITE (34): Xaa equals any of the naturally occurring L-amino acids
  SITE (39): Xaa equals any of the naturally occurring L-amino acids
GTSGSCHGPXSLRTRWGSXGRCCWLEGLVPLWSXKDVSXVQEELKPGPRNSSHACALSVGFSRCSTEASGFHGCKQKYLLSGP

SEQ ID NO: 3453 - protein, 71 aa, Homo sapiens
  SITE (50): Xaa equals any of the naturally occurring L-amino acids
  SITE (56): Xaa equals any of the naturally occurring L-amino acids
  SITE (63): Xaa equals any of the naturally occurring L-amino acids
TNTKPTQWMLPCGGSWLLNLGWEPGSKPGSPGRVGVPRKPLEVLGGGAWXIHLGLXFPPTFNXRREYGVLC

SEQ ID NO: 3454 - protein, 46 aa, Homo sapiens
CASPIKSSALMCCCRTFSLCVMSRMFGIVIQSKRKISQNGTYPCHK

SEQ ID NO: 3455 - protein, 41 aa, Homo sapiens
SSLLSSPCRFISSLIQHCSSICVPAVVLGDRDNKALGSSHA

SEQ ID NO: 3456 - protein, 53 aa, Homo sapiens
SFVCLCLDRPLSIVTESLYLNYLQYCFVYCNLVQSPNFSRLSILISSCLSTVF

SEQ ID NO: 3457 - protein, 54 aa, Homo sapiens
  SITE (34): Xaa equals any of the naturally occurring L-amino acids
TLSIALKGWGLLLSQGPIITIVNIYGRHPGQGFXSVRCRECEVLCMGSLNMFTE

SEQ ID NO: 3458 - protein, 84 aa, Homo sapiens
  SITE (62): Xaa equals any of the naturally occurring L-amino acids
  SITE (79): Xaa equals any of the naturally occurring L-amino acids
LTHFHSVFPFLPGVIFYPAFLGVCGGRFRPYVILICCHISEPGIPFTTLSSGHQGSPGITFXAVSSVKPINLPVIRKAXISRSC

SEQ ID NO: 3459 - protein, 45 aa, Homo sapiens
  SITE (4): Xaa equals any of the naturally occurring L-amino acids
  SITE (14): Xaa equals any of the naturally occurring L-amino acids
  SITE (15): Xaa equals any of the naturally occurring L-amino acids
HVLXQTDRTFPPPXXILVMPLCTHKRTPTKCRGPGASMGEGPDSD

SEQ ID NO: 3460 - protein, 64 aa, Homo sapiens
SQLYEKNLYISGSRENQIRMRTRFLVWAPGGDEAVLGPEDSWHLPCTILIRNSELFIHFILEEL

SEQ ID NO: 3461 - protein, 48 aa, Homo sapiens
  SITE (43): Xaa equals any of the naturally occurring L-amino acids
KCLLPRAVNTWCLCLAQEVNVCHFRFFPPTRPDPPFCGREHPXRQSVP

SEQ ID NO: 3462 - protein, 92 aa, Homo sapiens
  SITE (17): Xaa equals any of the naturally occurring L-amino acids
  SITE (59): Xaa equals any of the naturally occurring L-amino acids
  SITE (81): Xaa equals any of the naturally occurring L-amino acids
DKQGNCGIPFKIASERXHEVTSVISLQQSQLHKKPKDTPAPCQPKPPHKKSDHLLEEPXGEALSQHGEEEGLGLNPAFQLXPTKVPGMRMKA

SEQ ID NO: 3463 - protein, 87 aa, Homo sapiens
SELRVGVYFNLWIYLSTSLHPNTSTASWLCNASKNSITDALIIPAQCFAQFWLSQTVLRRVIPNVRWSEQTDPQEAQERSPQDPRHF

SEQ ID NO: 3464 - protein, 45 aa, Homo sapiens
FVHFMFLISGNIICSEIYFVCFLLISIRMVYFFLPLIFKLYVKHG

SEQ ID NO: 3465 - protein, 75 aa, Homo sapiens
  SITE (59): Xaa equals any of the naturally occurring L-amino acids
VRTCLATASQIVILSRLRKLVGFHNHHFLEKPEQRELYSDCMRIFSRFTHHRRDPNALXNIRQLNLAVWEVLEHL

SEQ ID NO: 3466 - protein, 81 aa, Homo sapiens
  SITE (67): Xaa equals any of the naturally occurring L-amino acids
  SITE (69): Xaa equals any of the naturally occurring L-amino acids
TFIQRHGQVLTSGLAVLELVEDRTQVLEREGAGVLGRPRCRVPSAPILCPPLVLCHGFLTASLNVVXIXSCTENANRGIDA

SEQ ID NO: 3467 - protein, 87 aa, Homo sapiens
  SITE (8): Xaa equals any of the naturally occurring L-amino acids
SRLGCMTXRQDKTSLSSSKDYSVAIWEDTSSPDGKTFYLLCLKCLQKHPELSGRQLANYLQSLASMQGTVFVKGEIGFTLNTAKLGD

SEQ ID NO: 3468 - protein, 87 aa, Homo sapiens
AYVSRLPQYNKPNSSLGEKLDWATGEGRWCPRLSGPFYLHEALHDFFCQEQCLHPPTSRNVSYLSYYIGRVLCVLVSLPFFFPSFIW

SEQ ID NO: 3469 - protein, 60 aa, Homo sapiens
  SITE (24): Xaa equals any of the naturally occurring L-amino acids
QREASRLEQSQGIERVPRTRLGNXTLSFLFLAAAKATSKHGKPLGSHSSSVSRGLVSGQV

SEQ ID NO: 3470 - protein, 31 aa, Homo sapiens
  SITE (10): Xaa equals any of the naturally occurring L-amino acids
  SITE (17): Xaa equals any of the naturally occurring L-amino acids
  SITE (19): Xaa equals any of the naturally occurring L-amino acids
YATESRLRFXGLDEDLXFXDPTRLPPESAHG

SEQ ID NO: 3471 - protein, 52 aa, Homo sapiens
ICGSRCSPTKCRRTWLRSLRPGLAIQKEVATSLAYLPEWKENIMKLYLLTQM

SEQ ID NO: 3472 - protein, 95 aa, Homo sapiens
GTSNNPGSDFPLPHALSAAEKDAHTVAGALQTGGPLQPDEAGQLPDRLSGEYSENISCAGGIFKFNATHLRFLPDFDRWHMRKRWLSKQPMYLGC

SEQ ID NO: 3473 - protein, 67 aa, Homo sapiens
  SITE (56): Xaa equals any of the naturally occurring L-amino acids
LMPGLLCLLVLIRRQHHVPHGTPPGKNLCVCAYLHPCPTSASSPSSSNHRTSSQGXPSSVPLHLLRL

SEQ ID NO: 3474 - protein, 66 aa, Homo sapiens
  SITE (20): Xaa equals any of the naturally occurring L-amino acids
  SITE (25): Xaa equals any of the naturally occurring L-amino acids
  SITE (62): Xaa equals any of the naturally occurring L-amino acids
YQLFHQQYNFTKKVSGPHTXGSCLXFQQFGRLRQADRFSLGVQKQPGEHGEPHFYKKKKKNXGGAP

SEQ ID NO: 3475 - protein, 51 aa, Homo sapiens
RFGWLVDQEPKLSGPAQAPPHRLFLSCPNSGILRTGGYTALGAESEGGNIQ

SEQ ID NO: 3476 - protein, 50 aa, Homo sapiens
  SITE (9): Xaa equals any of the naturally occurring L-amino acids
  SITE (31): Xaa equals any of the naturally occurring L-amino acids
  SITE (40): Xaa equals any of the naturally occurring L-amino acids
TLREHLNRXDGFSFRVRRRRDQEDALNQRYXEEQGKRRQXDKEFHNSTRR

SEQ ID NO: 3477 - protein, 42 aa, Homo sapiens
  SITE (12): Xaa equals any of the naturally occurring L-amino acids
  SITE (20): Xaa equals any of the naturally occurring L-amino acids
  SITE (26): Xaa equals any of the naturally occurring L-amino acids
  SITE (28): Xaa equals any of the naturally occurring L-amino acids
  SITE (29): Xaa equals any of the naturally occurring L-amino acids
IYKYTIIILSVXRQNVPNYXTGFGLXKXXNRKMCYFLFMRNI

SEQ ID NO: 3478 - protein, 36 aa, Homo sapiens
  SITE (10): Xaa equals any of the naturally occurring L-amino acids
WLVYSKHTVXVHCHCIFVPQHLKLWFIHSTYSFMLC

SEQ ID NO: 3479 - protein, 94 aa, Homo sapiens
  SITE (86): Xaa equals any of the naturally occurring L-amino acids
  SITE (94): Xaa equals any of the naturally occurring L-amino acids
ENQEQPSLLGSTTVAGASWGIGTSECDIYTRVHIFCGVFVVVFETEPRSVTQAALQWPNLCLPGSSDSPAFSLPSGWGFTGTRQQXHIIFGIFX

SEQ ID NO: 3480 - protein, 50 aa, Homo sapiens
  SITE (11): Xaa equals any of the naturally occurring L-amino acids
  SITE (23): Xaa equals any of the naturally occurring L-amino acids
LMPLPWWEGKXYGLHSQSERVVXQFSSKLRQNQASIFRPRSPGYHSLKLL

SEQ ID NO: 3481 - protein, 65 aa, Homo sapiens
  SITE (3): Xaa equals any of the naturally occurring L-amino acids
KTXILINPPLGHGWFFCLFVLFVLFVLFCFWERILLLLPRLECESRAHCSLCLAWNFRRRRLQRS

SEQ ID NO: 3482 - protein, 99 aa, Homo sapiens
HEVEVILGRSGWRVWLPGNEAQLPKDPTIHLTPGLSDGLPRKGPSSFPAVVQNLEALGSILWFRITPRGVEGTGQTPGTAPCVHLQTWLGNLLPKFLIF

SEQ ID NO: 3483 - protein, 38 aa, Homo sapiens
  SITE (16): Xaa equals any of the naturally occurring L-amino acids
LAHQSPQIVITYLYWXHSKSFSSFEKIYNKLLLTVFTT

SEQ ID NO: 3484 - protein, 15 aa, Homo sapiens
ILVCIKYKAEHEETK

SEQ ID NO: 3485 - protein, 57 aa, Homo sapiens
LVTSFRRNLGKHFLGRSLGLRVYLAFTFSWPEAGFSLTSQRVKSWFCLFVCLFSPQI

SEQ ID NO: 3486 - protein, 49 aa, Homo sapiens
QSLGPYPFPTIMQLLSIAEKGQPAKTTGPQTKTLLANNFMNQSTRSGLL

SEQ ID NO: 3487 - protein, 38 aa, Homo sapiens
WLHVNLLLESTVHYSYFGTFGLLPVFQTAPMNIVVPII

SEQ ID NO: 3488 - protein, 41 aa, Homo sapiens
  SITE (32): Xaa equals any of the naturally occurring L-amino acids
NQKLWSKGSAVHVLTSPPAASDACSKLRTTVXETAVCGVFL

SEQ ID NO: 3489 - protein, 38 aa, Homo sapiens
GREKTLALMASHYPQHKVKLFYTDKRIQISRKKRGIYS

SEQ ID NO: 3490 - protein, 150 aa, Homo sapiens
  SITE (47): Xaa equals any of the naturally occurring L-amino acids
  SITE (147): Xaa equals any of the naturally occurring L-amino acids
  SITE (149): Xaa equals any of the naturally occurring L-amino acids
AEKESALLNKLSILASKLAPAMKTQKLRYRRCSSELLPMAKSYKRLXYKRLLDGFSSSTEQLNPYLAASGWDKRPNSKPMALYSLESIKMTFIDLSNKMPSLLFGSEIFPVILSCEIIQLRLHDESSRTFPEHCAPGKACLRRGLQXPXK

SEQ ID NO: 3491 - protein, 66 aa, Homo sapiens
  SITE (17): Xaa equals any of the naturally occurring L-amino acids
  SITE (22): Xaa equals any of the naturally occurring L-amino acids
  SITE (27): Xaa equals any of the naturally occurring L-amino acids
  SITE (53): Xaa equals any of the naturally occurring L-amino acids
IVDFMKSWGSSTFEHFXWNPRXYSPRXLQLPPSHSPVSTTGMGSHWPTGFRLXGPGQQSWGPFKPN

SEQ ID NO: 3492 - protein, 46 aa, Homo sapiens
  SITE (29): Xaa equals any of the naturally occurring L-amino acids
  SITE (42): Xaa equals any of the naturally occurring L-amino acids
ECSPHPSIFKCSQGGSTVLPQLKVTGPLXSLVTKGSQCSCLXAKGK

SEQ ID NO: 3493 - protein, 40 aa, Homo sapiens
  SITE (27): Xaa equals any of the naturally occurring L-amino acids
  SITE (30): Xaa equals any of the naturally occurring L-amino acids
LLLSTMPRLFIQRGTCRPVPSCPQPPXWPXSHARLVPKVW

SEQ ID NO: 3494 - protein, 109 aa, Homo sapiens
  SITE (78): Xaa equals any of the naturally occurring L-amino acids
RSFPNKSSKMFSAIAMIWTERMPSCTDASGGPHFPFRDTLSTQLMLHTRPTPVPTLTECRLERDADFRGGVFFGLNVXPKKGIFGLMKAKPVLPSPRVRKSQGYKQLDH

SEQ ID NO: 3495 - protein, 134 aa, Homo sapiens
  SITE (100): Xaa equals any of the naturally occurring L-amino acids
  SITE (114): Xaa equals any of the naturally occurring L-amino acids
  SITE (125): Xaa equals any of the naturally occurring L-amino acids
HSLGVRPGLALGFQPRRTGSGQWRRDLSSAFLYPHLYSRAYINFRNPDDILLFRDRFDGYIFLDSKGLEYPAVVEFAPFQKIAKKKLRKKDAKTGKPSKXSQNIRSFLETYCVXGREDHGQPGEXGGGRWKRRQ

SEQ ID NO: 3496 - protein, 93 aa, Homo sapiens
HEGTLLSQVSTVSGTLLSQVSTAPARRTVAEASVQTDLNPETTLRAGSKNTRALGPLLCQSVPHRTEHKGAHEPPWRLHESRSCTLLREMSML

SEQ ID NO: 3497 - protein, 63 aa, Homo sapiens
  SITE (15): Xaa equals any of the naturally occurring L-amino acids
  SITE (63): Xaa equals any of the naturally occurring L-amino acids
ENQVAKETLSNFGNXQNLATCSYCSKASVYLPENKGRCWSFHFFCLKLKRCVAHRGYLTSIKX

SEQ ID NO: 3498 - protein, 63 aa, Homo sapiens
  SITE (6): Xaa equals any of the naturally occurring L-amino acids
LCIYNXLFMQKMSGRIYKQLKSWLGVVAHACNPSTLGGRGRWIKGQEIETVLSGMVNPVSTKK

SEQ ID NO: 3499 - protein, 48 aa, Homo sapiens
SLKSQNEEIHPAWRLPIPSLCRRLLMLSGEALSPREYFPHKSSSPIGD

SEQ ID NO: 3500 - protein, 52 aa, Homo sapiens
  SITE (32): Xaa equals any of the naturally occurring L-amino acids
HEVYCENLVEYLRQIPQKYGSTAKTVASKGSXVIWHPTQLPEIHQNYHKCPY

SEQ ID NO: 3501 - protein, 71 aa, Homo sapiens
ARGTFHPSPLPPPSSSVTAHSSSLFRSQVKYPPSGKHPRHPQTRDGAPTDLSHRTHLSQALRTGLSSSCLP

SEQ ID NO: 3502 - protein, 61 aa, Homo sapiens
GTSFSILSFLLFLSISLASFNFPFPFFLIGLALGLVRPRAQKDTGSMPTFPPRHNLLLGIY

SEQ ID NO: 3503 - protein, 71 aa, Homo sapiens
  SITE (6): Xaa equals any of the naturally occurring L-amino acids
  SITE (18): Xaa equals any of the naturally occurring L-amino acids
  SITE (20): Xaa equals any of the naturally occurring L-amino acids
  SITE (22): Xaa equals any of the naturally occurring L-amino acids
  SITE (24): Xaa equals any of the naturally occurring L-amino acids
  SITE (32): Xaa equals any of the naturally occurring L-amino acids
  SITE (43): Xaa equals any of the naturally occurring L-amino acids
  SITE (60): Xaa equals any of the naturally occurring L-amino acids
GSWGRXFLQPSNRCPHRXNXDXGXKNVGTIGXAHCGIPGKSPXGGLKCQVGKRTGNLWKXSIWESPQLVEF

SEQ ID NO: 3504 - protein, 106 aa, Homo sapiens
  SITE (47): Xaa equals any of the naturally occurring L-amino acids
  SITE (101): Xaa equals any of the naturally occurring L-amino acids
KRLLWSQRTDTSTVSWISPTDVFGLTHIVVYAYVSLLQHTKTGGFHXKICIFNFFFLTAKSDNTVSSLLPLWETVCLTGVTVGSRVPTVYQGPTWAHFPSXPVLFS

SEQ ID NO: 3505 - protein, 69 aa, Homo sapiens
AILGAVCSCSSYPYLCQCVIVIVSCLSFPSVPELSMGRGCVLLSLYSHITRVEHSASSLQALIRYLLNK

SEQ ID NO: 3506 - protein, 52 aa, Homo sapiens
ASACRFWYPSEFLEPIHHRYQGTTAQIKTLMHYYRVPTIITKMGRNRNARYW

SEQ ID NO: 3507 - protein, 68 aa, Homo sapiens
AREQSKAVTTGPAPPSRGWRVQDPGRPAAALLTGAAVSGLDAGALKVDVVLAESALLSAAAPMDKHSK

SEQ ID NO: 3508 - protein, 50 aa, Homo sapiens
TIHDSDIVFLSSINMCIVWPTLICTPYYCCNDSTVPTFNCSLIIMPFGVK

SEQ ID NO: 3509 - protein, 61 aa, Homo sapiens
  SITE (26): Xaa equals any of the naturally occurring L-amino acids
  SITE (43): Xaa equals any of the naturally occurring L-amino acids
  SITE (53): Xaa equals any of the naturally occurring L-amino acids
TDMIMPGRTGMGQSRFWKDPVWADGXHGAPGRPQAKRPHPQYXSGSVGNQTRXQNRFAELR

SEQ ID NO: 3510 - protein, 107 aa, Homo sapiens
  SITE (38): Xaa equals any of the naturally occurring L-amino acids
  SITE (42): Xaa equals any of the naturally occurring L-amino acids
  SITE (79): Xaa equals any of the naturally occurring L-amino acids
  SITE (87): Xaa equals any of the naturally occurring L-amino acids
GNSGVCNSLNPRAKKRIWQMFVCPGGRWMKVSVGSVAXSASXVLAIGLLHLVTSVWEAFRELERLHMAWLTSGLDPGFXHLPGLVKXTKPLWRASSRAFKFTGALGV

SEQ ID NO: 3511 - protein, 76 aa, Homo sapiens
  SITE (73): Xaa equals any of the naturally occurring L-amino acids
LTTRSLAFLGPWAVVPKLRCTLELLGEIISSDSQVYSDLMEIERVHGAGSRHHCFLNDPRMFPLWQQIFGEQXFPP

SEQ ID NO: 3512 - protein, 48 aa, Homo sapiens
RKTFLLSCPGLLVKTKTFAETINYFIEPHKISFRLVKWPIRFLLSPML

SEQ ID NO: 3513 - protein, 70 aa, Homo sapiens
  SITE (6): Xaa equals any of the naturally occurring L-amino acids
  SITE (55): Xaa equals any of the naturally occurring L-amino acids
  SITE (68): Xaa equals any of the naturally occurring L-amino acids
NLAWSXRHPLRNSIWGGWTWWLMPVIPALWEAEAGGSAEVRSSRQAWATWRTHFXLKKKKKNPGGGPXPI

SEQ ID NO: 3514 - protein, 93 aa, Homo sapiens
ANNPSRVSNEASVKIPELQDPESFWAGGHIRMLGGWRPPTPRGQKLLCPGPTRARPVCLFVFLFICIINNVLYKDIVVLVIMNEEGIIPFRKE

SEQ ID NO: 3515 - protein, 51 aa, Homo sapiens
GHFTLIEQNEVLSFKPGAEVFPSLGYAPGGGWTGLESGISSGIPFPSLFPS

SEQ ID NO: 3516 - protein, 44 aa, Homo sapiens
  SITE (39): Xaa equals any of the naturally occurring L-amino acids
EIILCGKFLSYSKMTVYLRKREIYDKTKSSKHVVNCLCXHDKVP

SEQ ID NO: 3517 - protein, 47 aa, Homo sapiens
KGHFGKGWGGREIFPGGCELLGFQVSSWPCSHACRMIQNSRHLHGEG

SEQ ID NO: 3518 - protein, 37 aa, Homo sapiens
VCHNVEQCSLIKPSFYGDGNVLYLHCLMWKPLTTCGC

SEQ ID NO: 3519 - protein, 54 aa, Homo sapiens
  SITE (39): Xaa equals any of the naturally occurring L-amino acids
  SITE (54): Xaa equals any of the naturally occurring L-amino acids
NLLQEQLTAQTWKDDYSTAQRVNIQILRWDAKAMFGQRXLSQAGGVTGPLALGX

SEQ ID NO: 3520 - protein, 77 aa, Homo sapiens
  SITE (60): Xaa equals any of the naturally occurring L-amino acids
LTQALQTEPLPVSYLQWRPESRGVQPCLGSWETMGPGSPAQHETVTPHPRVRRGLPGWLXWLGGCLQCELGQDAGPS

SEQ ID NO: 3521 - protein, 50 aa, Homo sapiens
SIKWCHNVTMPKVWGFASDSSPTWWNRCRSFVKVLCFRMCLHNNTNSYVV

SEQ ID NO: 3522 - protein, 43 aa, Homo sapiens
VGIVELNEFNLFFDSGLLRASNVCTCIVNPLESLGGRKMKCWY

SEQ ID NO: 3523 - protein, 66 aa, Homo sapiens
  SITE (13): Xaa equals any of the naturally occurring L-amino acids
  SITE (62): Xaa equals any of the naturally occurring L-amino acids
TFVKLQEADGSSXPRLPRGARSRVGPEAGTVSSRGVFGGDVPRGVGQEEGHGAPPGAGSERXWVVC

SEQ ID NO: 3524 - protein, 72 aa, Homo sapiens
HSPRSGHGFACFSSVSGTDQPERCLHLVRASFPVSLGMLQFLPSTQLWVDSRRPAAAQGQIMTEFSNQKVSQ

SEQ ID NO: 3525 - protein, 68 aa, Homo sapiens
  SITE (39): Xaa equals any of the naturally occurring L-amino acids
  SITE (51): Xaa equals any of the naturally occurring L-amino acids
HRLWWVLLAAQYLGHFKICSWCYLMVFRERWFRKNTLWXDLCVLCDRVCVXVCVCNYVRVCVYEGFLW

SEQ ID NO: 3526 - protein, 52 aa, Homo sapiens
ALVQATNAILQPNQEALLQALQRLRLSIQDITKTLGQMHDGKTTQQCLQADV

SEQ ID NO: 3527 - protein, 47 aa, Homo sapiens
IFLGEMWYYFFFCCYFMSVSKISYCTLFSGCQQIPWSFETWTGQIQS

SEQ ID NO: 3528 - protein, 109 aa, Homo sapiens
  SITE (74): Xaa equals any of the naturally occurring L-amino acids
  SITE (76): Xaa equals any of the naturally occurring L-amino acids
  SITE (102): Xaa equals any of the naturally occurring L-amino acids
CSSVDQLQRSPSRGQDWRPCSSVVRCSHPGCLLLGGIYPHGCPTGCLGVWRAGHASQGPAAPQRVSCPLCLSGXLXPAALPFLAWADLSTCGFPQGFFPCGXIIWAIII

SEQ ID NO: 3529 - protein, 102 aa, Homo sapiens
  SITE (83): Xaa equals any of the naturally occurring L-amino acids
GTARHAHYKAWEWGGVARRGREEWRQSSSSALLCLQRTWLPCFPTSPAASSSTLSSMWALSGSSRCSSRTRPSSRASYSSASXTGQRAHEGEAEVTQVAGEG

SEQ ID NO: 3530 - protein, 108 aa, Homo sapiens
  SITE (8): Xaa equals any of the naturally occurring L-amino acids
  SITE (104): Xaa equals any of the naturally occurring L-amino acids
IDPILPIXFYCLENLLSAGHIHCLLLPPCSFLPLVLLSVVFHEPISNIHSHPFLLANEFCHEFWLQWMGLGCLEHCVGSELSRKWNHTGMKRVAVHRQHNCHIXLAKS

SEQ ID NO: 3531 - protein, 55 aa, Homo sapiens
  SITE (6): Xaa equals any of the naturally occurring L-amino acids
  SITE (16): Xaa equals any of the naturally occurring L-amino acids
  SITE (25): Xaa equals any of the naturally occurring L-amino acids
GCEHWXLTVWVQILAXPPISCVALXMSPNLLCLNFLICKTVVIIPTFAREIVRNK

SEQ ID NO: 3532 - protein, 188 aa, Homo sapiens
  SITE (52): Xaa equals any of the naturally occurring L-amino acids
  SITE (97): Xaa equals any of the naturally occurring L-amino acids
GRGERERERERDNSPSFFNPEEAATVTSYLKLLLAPSSKKGKARLSPRSVGXISPYRKQVEKIRYCITKLDRELRGLDDIKDLKVGSVEEFQGQERXVILISTVRRAQSFVQLDLDFNLGFLKNPKRFNVAVTRAKALLIIVGNPLLLGHDPDWKVFLEFCKETGGITGCPFLPKLDFQQGQNLLQGL

SEQ ID NO: 3533 - protein, 45 aa, Homo sapiens
YFQRRYISYEVSFINCLNKCSGSDQSSIRDNHDCLVDINLSKYTS

SEQ ID NO: 3534 - protein, 44 aa, Homo sapiens
  SITE (16): Xaa equals any of the naturally occurring L-amino acids
ISVRDYFDSFLIMIPXQEKLQDSKADLQQHSRIISVLVAKISRI

SEQ ID NO: 3535 - protein, 74 aa, Homo sapiens
  SITE (25): Xaa equals any of the naturally occurring L-amino acids
  SITE (51): Xaa equals any of the naturally occurring L-amino acids
  SITE (71): Xaa equals any of the naturally occurring L-amino acids
APWVPNQYFLPWNQMSEVNTQTSFXQKDSTTIIQKLQCKEEELDVKSCVRXLWGVDQDKVEVSAPLILVSXMAI

SEQ ID NO: 3536 - protein, 47 aa, Homo sapiens
TYYTPHLFRSLILRSVLQFSELRSYTSFVIFICNYFIFHFDAIINEF

SEQ ID NO: 3537 - protein, 71 aa, Homo sapiens
  SITE (68): Xaa equals any of the naturally occurring L-amino acids
  SITE (71): Xaa equals any of the naturally occurring L-amino acids
GWVAPCEGHSATMREVWIAVGVDLLNVFGRGSLEGVGSWWKEKSHGLESQTGICMLFHHFPDYVTLVXVPX

SEQ ID NO: 3538 - protein, 49 aa, Homo sapiens
RIYSNLFIGNFRLSLFLLELVFTFLPPHRILYRFNIFQFYKILNNFLCP

SEQ ID NO: 3539 - protein, 110 aa, Homo sapiens
  SITE (77): Xaa equals any of the naturally occurring L-amino acids
  SITE (78): Xaa equals any of the naturally occurring L-amino acids
  SITE (80): Xaa equals any of the naturally occurring L-amino acids
  SITE (87): Xaa equals any of the naturally occurring L-amino acids
  SITE (88): Xaa equals any of the naturally occurring L-amino acids
ERKQICCVTAESHDILQHQDSNCSATSNKHLLEDEEGRDFITKNRSWVSPVHCTQESRRELPEQEVAPPSGQQALQXXQXQRKSLRXXVLLLMQALNTLSDSRGEAGSSL

SEQ ID NO: 3540 - protein, 61 aa, Homo sapiens
  SITE (36): Xaa equals any of the naturally occurring L-amino acids
  SITE (38): Xaa equals any of the naturally occurring L-amino acids
  SITE (55): Xaa equals any of the naturally occurring L-amino acids
HAVGLRGHVYLFCFILFHLKKFFEMESRSVAQAGMXGXNPGLTGNLHLPGSKQFXLALASP

SEQ ID NO: 3541 - protein, 74 aa, Homo sapiens
ARGRDDSQRSYQMNGNLDCLDTRLNKIPCFPIFTLFFYYILPLKKINSHHSPSTRISAFWNSFWLGFLSYSTDS

SEQ ID NO: 3542 - protein, 56 aa, Homo sapiens
  SITE (26): Xaa equals any of the naturally occurring L-amino acids
  SITE (52): Xaa equals any of the naturally occurring L-amino acids
LLPSPHIKTLFTSFLEPLSLAVWQHXKIYYFSLIRKVTGFRKWGKTKRAIKXHPIP

SEQ ID NO: 3543 - protein, 67 aa, Homo sapiens
  SITE (28): Xaa equals any of the naturally occurring L-amino acids
SSIKTHEQWVLMSFRVYGFVGCFHLLGXWCTLTQGQKPLSVLRTLADLFTWLFIFHNQLVDVTSKRK

SEQ ID NO: 3544 - protein, 22 aa, Homo sapiens
SKNLFKLLRCVVRLSFPKGIIS

SEQ ID NO: 3545 - protein, 46 aa, Homo sapiens
  SITE (3): Xaa equals any of the naturally occurring L-amino acids
  SITE (11): Xaa equals any of the naturally occurring L-amino acids
  SITE (20): Xaa equals any of the naturally occurring L-amino acids
  SITE (21): Xaa equals any of the naturally occurring L-amino acids
  SITE (24): Xaa equals any of the naturally occurring L-amino acids
  SITE (31): Xaa equals any of the naturally occurring L-amino acids
  SITE (36): Xaa equals any of the naturally occurring L-amino acids
  SITE (45): Xaa equals any of the naturally occurring L-amino acids
KMXKVQEKKDXKEGVFLNKXXANXNVDNRNXNAIAXLWVWDSGSXG

SEQ ID NO: 3546 - protein, 41 aa, Homo sapiens
  SITE (40): Xaa equals any of the naturally occurring L-amino acids
GTASTYPVLEAPARGLPSCLLLWDLSPQWRTWRGMTARRXR

SEQ ID NO: 3547 - protein, 89 aa, Homo sapiens
  SITE (24): Xaa equals any of the naturally occurring L-amino acids
  SITE (71): Xaa equals any of the naturally occurring L-amino acids
  SITE (73): Xaa equals any of the naturally occurring L-amino acids
  SITE (84): Xaa equals any of the naturally occurring L-amino acids
HSRAPEVQPLLHGAWVLSWRIREXISGEHWLLWSCTCSLQPVRAQRGHREHTRSQAAQRAHKVLVISVLGXHXTISMLSSRDAXKLSQM

SEQ ID NO: 3548 - protein, 41 aa, Homo sapiens
FSIVYLFVCSVLREGRGNIVITLPNNLEAEDSTYGMELFLF

SEQ ID NO: 3549 - protein, 80 aa, Homo sapiens
  SITE (79): Xaa equals any of the naturally occurring L-amino acids
RALWVGGCSGEACGIGMSGLLTDPEQRAQEPRYPGFVLGLDVGSSVIRCHVYDRGGAGLRLPAWQKVRKSLSFKLGWVXN

SEQ ID NO: 3550 - protein, 85 aa, Homo sapiens
HSTQSSPECCQPGTQHTALHPVLSRTLSGGVTALPFRGGKWGTDRSSDLASVRIASVQSWEASPGPWDHKSNTKIHPPGTLTEQK

SEQ ID NO: 3551 - protein, 104 aa, Homo sapiens
  SITE (63): Xaa equals any of the naturally occurring L-amino acids
  SITE (83): Xaa equals any of the naturally occurring L-amino acids
HSAGPSWRRPPWRRPPTPRPLRPRPLPRFRCAPRMWRLRRSRKRKKVDNDYNALRERLSTLPXKLSYNIMVPFGPFAFMPGKXVHTNESLFYWGTMVCKLLQQS

SEQ ID NO: 3552 - protein, 51 aa, Homo sapiens
  SITE (30): Xaa equals any of the naturally occurring L-amino acids
  SITE (31): Xaa equals any of the naturally occurring L-amino acids
  SITE (45): Xaa equals any of the naturally occurring L-amino acids
  SITE (50): Xaa equals any of the naturally occurring L-amino acids
CSLNLTIADLGDFFLTFVHIRNLYDSNVLXXYLNWFFRILPTGKXFCLFXV

SEQ ID NO: 3553 - protein, 88 aa, Homo sapiens
  SITE (83): Xaa equals any of the naturally occurring L-amino acids
  SITE (87): Xaa equals any of the naturally occurring L-amino acids
LKQITFPGLVSFIYLVYLFLPPSRDLEMPWKSDGKSTVTHCRGCGNAGYLMPLGNTKVTGSSVHLGTVASSSGGTGSHLFPNXGSRXF

SEQ ID NO: 3554 - protein, 49 aa, Homo sapiens
GTRWDEFSKEHVEILEVRVILKHEFLLSQIKVFDPYNCQTISSNRDSKI

SEQ ID NO: 3555 - protein, 51 aa, Homo sapiens
  SITE (27): Xaa equals any of the naturally occurring L-amino acids
  SITE (38): Xaa equals any of the naturally occurring L-amino acids
SSLLIEVPATTREMVVWGTSVEGESIXPHILKKADHFXFEKVSFPKKGVHD

SEQ ID NO: 3556 - protein, 147 aa, Homo sapiens
  SITE (134): Xaa equals any of the naturally occurring L-amino acids
  SITE (138): Xaa equals any of the naturally occurring L-amino acids
  SITE (140): Xaa equals any of the naturally occurring L-amino acids
GTSGPGVHAGGARDGGPDPARGASPPMPSTRGCRKGSLANLPQLVFNMSIPFPDFQSSVFLPSAYLFIYLFIETESHSVAQAGVQWRSVGSLQPLPPGFKRFSCLSLPSSWDYKRLLPDAADFCILSTAGVSTXLARXSXNPNLGSA

SEQ ID NO: 3557 - protein, 53 aa, Homo sapiens
  SITE (40): Xaa equals any of the naturally occurring L-amino acids
RKKKKKKKGKKSSQVGKSNTKTFIRPISKSFTPEVIYTFXKNTDSWAPLQTSA

SEQ ID NO: 3558 - protein, 89 aa, Homo sapiens
  SITE (26): Xaa equals any of the naturally occurring L-amino acids
  SITE (64): Xaa equals any of the naturally occurring L-amino acids
PQTVRAGLEIFACSLLLCSTGNIHSXSAPRTYISFLGSSPFPFIFFLEIHRRLQLTGSSQQLRXCPDSPLCTKRVEEGTREGLILGKRT

SEQ ID NO: 3559 - protein, 123 aa, Homo sapiens
  SITE (112): Xaa equals any of the naturally occurring L-amino acids
  SITE (115): Xaa equals any of the naturally occurring L-amino acids
FPFFHSDIIQGINTHTHTHTFSLLWHLPHLPQCPFLSHLNKKPPQSLRYMERSSGLAPRSVRSSHVFRGCIPLGLGPTLKVGADGGGPLRTKSPMKECTVQSIKQTQKMCVXLLXEKERGASR

SEQ ID NO: 3560 - protein, 65 aa, Homo sapiens
RLTWGSTPGGPVKKMVPSSPSPQCRVHFTLHGQPPASLITQQMSQAKNTDLTVPLQLTHRLEASC

SEQ ID NO: 3561 - protein, 73 aa, Homo sapiens
  SITE (69): Xaa equals any of the naturally occurring L-amino acids
  SITE (71): Xaa equals any of the naturally occurring L-amino acids
IDPRRPGSQQMSWNFLGEKSGLWRKPQLDFSTLQDALLWLSPANLPWTWNNLPLSSLFTTAVQAKNGAXSXTG

SEQ ID NO: 3562 - protein, 57 aa, Homo sapiens
EVLQLTASDPVNIVCDSAYVVNVAHCIKASTVKSTLDPELLNLFHLFSYAACYMPNR

SEQ ID NO: 3563 - protein, 37 aa, Homo sapiens
  SITE (21): Xaa equals any of the naturally occurring L-amino acids
ARWLTPAIPGVWEAEVGRSRXQEIETILVNTVKPHLY

SEQ ID NO: 3564 - protein, 129 aa, Homo sapiens
  SITE (43): Xaa equals any of the naturally occurring L-amino acids
  SITE (123): Xaa equals any of the naturally occurring L-amino acids
DMGIFSHSQFFDLMLYSHGQIEIDDQVEGLQYLASRYDFIDLXRVGIHGWSYGGYLSLMALMQRSDIFRVAIAGAPVTLWIFYDTGYTERYMGHPDQNEQGYYLGSVAMQAEKFPSEPNRLLXLHGFLD

SEQ ID NO: 3565 - protein, 74 aa, Homo sapiens
AYTKQFSSFVRTPAECPTIEFNSATVYLETATGPTDEGLHPTRLPPLQTTITDPGSHPSNWRVNQRSPQPPPQV

SEQ ID NO: 3566 - protein, 90 aa, Homo sapiens
CLCHLLCGIGLSLTLDHIFARKNVSSPTSSNKEVVMRNDQNNGDMKPFQNFTTIPITQRVHVQICYVRIVHNAGSLRYESHHPDSSQLQS

SEQ ID NO: 3567 - protein, 50 aa, Homo sapiens
LFYVVTTTNVLKGFYFKTRPYKCILKYPWSLIEFNSIFIKQYFYFKINYL

SEQ ID NO: 3568 - protein, 67 aa, Homo sapiens
  SITE (4): Xaa equals any of the naturally occurring L-amino acids
FLIXEAKVSFDELGMKQQVMNQGRDWEFPLWERTGSGVALLGGLSGSLSPRQGSPHLPMPSFVDLYL

SEQ ID NO: 3569 - protein, 56 aa, Homo sapiens
SKVFCFSSSKELRQRSWRPSGESQDFPQLCLAGLLLVFSVCREEQELPFYLAYLHL

SEQ ID NO: 3570 - protein, 41 aa, Homo sapiens
  SITE (41): Xaa equals any of the naturally occurring L-amino acids
ILIKYLVRDGICGSCTMTGQWWRLSKLESLKALPSRCAQLX

SEQ ID NO: 3571 - protein, 168 aa, Homo sapiens
  SITE (89): Xaa equals any of the naturally occurring L-amino acids
  SITE (112): Xaa equals any of the naturally occurring L-amino acids
  SITE (141): Xaa equals any of the naturally occurring L-amino acids
TQDYLFQLSAAALQRRFQKTQYLALPERAELAASLGLTQTQVKIWFQNKRSKIKKIMKNGEMPPEHSPSSSDPMACNSPQSPAVWEPQXRPARSATTLMPTLRPPTSPQRPXTWRTLHPGTQVQPAQSIPTCRRRAPYSNXWRWPPGHSIRWAALSYSLFWDYCVLLF

SEQ ID NO: 3572 - protein, 108 aa, Homo sapiens
  SITE (8): Xaa equals any of the naturally occurring L-amino acids
  SITE (10): Xaa equals any of the naturally occurring L-amino acids
PRASQNYXNXAILNLLELANLARHPSLWKPQEELWAMLFPGSSCLFTNVVFPSLALHGIQCLLPLGTVASKLLSMTVTLCIISHTYILNPRHILKQPALLVRGLATPF

SEQ ID NO: 3573 - protein, 67 aa, Homo sapiens
  SITE (49): Xaa equals any of the naturally occurring L-amino acids
  SITE (62): Xaa equals any of the naturally occurring L-amino acids
  SITE (63): Xaa equals any of the naturally occurring L-amino acids
VESFLLQHCKAKMMFDLGLQNILKISEFECFKIRACLSGLLWALLLGTXISSPFYSLHSYLXXEERG

SEQ ID NO: 3574 - protein, 83 aa, Homo sapiens
  SITE (59): Xaa equals any of the naturally occurring L-amino acids
IGPHFQICLMFQLELCLIQKPVAFLILVTHGVSPPLPGKSEASESPPDFRSQLPSCSLXLHGTSHPLKMSQVQAASRGFCNPH

SEQ ID NO: 3575 - protein, 72 aa, Homo sapiens
LLSPGASPAHYFLDLQRVQAHLLLFLTLCGVSCSSWHLALALRNSDGSALQSRCAQVLSVDGMSTVRVNARV

SEQ ID NO: 3576 - protein, 95 aa, Homo sapiens
  SITE (12): Xaa equals any of the naturally occurring L-amino acids
ATSGSPRGSHSXALERLETKLHLLRQEMVNLRATDVRLMRQLLVINESIESIKWMIEEKATITSRGSSLSGSLCSLLESQSTSLRGQLQQPTRWQ

SEQ ID NO: 3577 - protein, 53 aa, Homo sapiens
GQVHNRCSFSLCRYIYINNTWSVIGSKFFFLNRLLEALCRHLVGYFTCILIYC

SEQ ID NO: 3578 - protein, 61 aa, Homo sapiens
  SITE (26): Xaa equals any of the naturally occurring L-amino acids
  SITE (31): Xaa equals any of the naturally occurring L-amino acids
GYSLNTLSPSRPSMHCHRPHSTICLXFGDPXHCCAETPHFLPSMDSKPQLVPVKSRHVYGA

SEQ ID NO: 3579 - protein, 109 aa, Homo sapiens
  SITE (38): Xaa equals any of the naturally occurring L-amino acids
  SITE (39): Xaa equals any of the naturally occurring L-amino acids
AGRGAWNGCWSSEKLWPKMEEQVCGRRGPRTRSPDASXXNTFYFTTWSPSYPRAYEQPGNYFGGYQQGDLEILEIGKNKTICLGRQRELVSSRTLIPALGHWYSWFSGL

SEQ ID NO: 3580 - protein, 71 aa, Homo sapiens
  SITE (54): Xaa equals any of the naturally occurring L-amino acids
EDLQEVMLSSNPVKQYLNCSRTSRRQNPSASEFKKEGLYSAGIFGKTHVSNNQXPQRRGFTMFGQGWSRSL

SEQ ID NO: 3581 - protein, 55 aa, Homo sapiens
QIGYQFKIMRSSPSQRMQDTAVRTTQRRKGQICLLFLCSGVLSPSFHLQLSTLSA

SEQ ID NO: 3582 - protein, 61 aa, Homo sapiens
QKTTYNTIYMTYQKNYRDRKQISDFQGMVVAEGVDYQGSHGILRVIEQLFNFYGSYTTLLL

SEQ ID NO: 3583 - protein, 48 aa, Homo sapiens
  SITE (36): Xaa equals any of the naturally occurring L-amino acids
  SITE (45): Xaa equals any of the naturally occurring L-amino acids
KKNALSTNYMFVFCSPQKFKLSRCEQKRRKAVKNEXKQQQVSLNXFTD

SEQ ID NO: 3584 - protein, 80 aa, Homo sapiens
  SITE (57): Xaa equals any of the naturally occurring L-amino acids
  SITE (62): Xaa equals any of the naturally occurring L-amino acids
  SITE (69): Xaa equals any of the naturally occurring L-amino acids
LFINGIKDRKHNVYFLRVLVLFPGEENTVGWYFQAHSRVLQISPSSSAHTILRPPKXTFSRXGFFTRLXNFQWLGWNVQG

SEQ ID NO: 3585 - protein, 36 aa, Homo sapiens
  SITE (17): Xaa equals any of the naturally occurring L-amino acids
  SITE (25): Xaa equals any of the naturally occurring L-amino acids
IRHSYLRVASFYFVAEXIVFSVKTXGTLDFYLKMVS

SEQ ID NO: 3586 - protein, 53 aa, Homo sapiens
  SITE (42): Xaa equals any of the naturally occurring L-amino acids
  SITE (50): Xaa equals any of the naturally occurring L-amino acids
KERYVDTILALNSSQCGKRNFINFLRLMINTVSLGRLTLNIXFRGVITVXKGF

SEQ ID NO: 3587 - protein, 40 aa, Homo sapiens
  SITE (31): Xaa equals any of the naturally occurring L-amino acids
AASNSIYHTLLWLLVTWPSPCWDGSLKAVIXLILDVSPIS

SEQ ID NO: 3588 - protein, 98 aa, Homo sapiens
  SITE (54): Xaa equals any of the naturally occurring L-amino acids
GFLLHPVYLLRVSFPLPTPAGQSWAPAPEHSRAARVSRLETHDTKEIQVKKYKXGLIKPCPANYFAFKICSGAANVVGPTMCFEDRMIMSPVKNNVGR

SEQ ID NO: 3589 - protein, 58 aa, Homo sapiens
FGTSFSLTDAHGARPHMNIQFLEHIILFYDFVSCLCIPLSGILKTDVPSCTNYYFISV

SEQ ID NO: 3590 - protein, 49 aa, Homo sapiens
  SITE (10): Xaa equals any of the naturally occurring L-amino acids
LNPPYLDCCXSKYFNICLELCLAHDNRFVLLLLNISPGCLIDLYYPAGN

SEQ ID NO: 3591 - protein, 38 aa, Homo sapiens
VKVMFYNVLSHMHLLSGLHPVLHWFLVEVFKLASMGAI

SEQ ID NO: 3592 - protein, 62 aa, Homo sapiens
  SITE (9): Xaa equals any of the naturally occurring L-amino acids
FGTRDDESXLELDKGGRCTTLRMYLMPLNRMLLKSSMLLMDRECCYCYHCLFCLFLQSPGLM

SEQ ID NO: 3593 - protein, 54 aa, Homo sapiens
  SITE (52): Xaa equals any of the naturally occurring L-amino acids
QDREGFGSGQAGDGYEHLSFETCRGGNEGRGPCVEVFIQEAVVPLGLNIASXRQ

SEQ ID NO: 3594 - protein, 49 aa, Homo sapiens
  SITE (7): Xaa equals any of the naturally occurring L-amino acids
ACSNMPXALPTCICTQAAQIHHFTSYHELKELYLFNKHHFIFNLFFLLW

SEQ ID NO: 3595 - protein, 67 aa, Homo sapiens
ESLSGFLRPKNCANKHSRRFWYIIRVQTSADWSTVGQEQNCKYTLFPENTFTSSQMLTHCKNMFVES

SEQ ID NO: 3596 - protein, 60 aa, Homo sapiens
GILRQEQEHIQQNINGNRGSEAGENTNIAGHRHAKHYSALSLDLSFLEAKAKRETRSAKE

SEQ ID NO: 3597 - protein, 48 aa, Homo sapiens
IRHEPDIARSHTALVSLFYKCIKKNQQNMNISLLTEIKNLVASDSSRF

SEQ ID NO: 3598 - protein, 53 aa, Homo sapiens
LNSDLRNRKHGLFQVKPHCSYLGDKCLANLYSFITVFIKVKTLDPESDHLDGS

SEQ ID NO: 3599 - protein, 145 aa, Homo sapiens
  SITE (126): Xaa equals any of the naturally occurring L-amino acids
  SITE (138): Xaa equals any of the naturally occurring L-amino acids
SKGILCQRTFQTSLPLIWILLAWYDEDDTSIGMPSLMYRSPPGAEEPQAPPASRDEAALPELLLGALPVGSNLTSNLASLVSQGMIQLALSGASQPGPSGAPAQRATRASSGPPVQTWTLMLRGMXLNSGPVGAESAXTLPVLGA

SEQ ID NO: 3600 - protein, 46 aa, Homo sapiens
PLWDWNCSQSQKIKHKWHGLSYLGLKLQLLCLSFRARFSVLLCIFL

SEQ ID NO: 3601 - protein, 130 aa, Homo sapiens
  SITE (30): Xaa equals any of the naturally occurring L-amino acids
FLQFKTWWADEASIQASHNTQDQPQINITXDQLLGVGSWAGLDAQMVMQDDAIEQLRGACIRAWGKKITSSGEQYPFFSAIKQGPEESYVDFIAQLQESLKKMTADLAAQDIVLQLLAFNNANPDCQAAL

SEQ ID NO: 3602 - protein, 54 aa, Homo sapiens
  SITE (50): Xaa equals any of the naturally occurring L-amino acids
ATVFPPADGKTHTPVPLSLVSPVLGQAERKICIALLQTINLLRKPSPVRXTMGA

SEQ ID NO: 3603 - protein, 92 aa, Homo sapiens
LCGFDLDLPEPHFPLCEMGIAPALRGALRLWILCAMALAECCCRQHQGQHSPAIGVVCFNLQRKKWERRLGMVSGTCEPQLSYSGGWGRRIA

SEQ ID NO: 3604 - protein, 57 aa, Homo sapiens
  SITE (46): Xaa equals any of the naturally occurring L-amino acids
HTLIIKYFIAAGCGGACLKVPAYFRRLKTGGSLEPQGFESQLGATXSGRLRRGRETG

SEQ ID NO: 3605 - protein, 52 aa, Homo sapiens
SADRFHVRCEREESQAHPQLWQRKTAKVKKVASSLPPPSKPQLVKPHACPEC

SEQ ID NO: 3606 - protein, 46 aa, Homo sapiens
  SITE (23): Xaa equals any of the naturally occurring L-amino acids
  SITE (40): Xaa equals any of the naturally occurring L-amino acids
GNHLKLEKKMLRPCKEVSSGGLXKRQAAKGFRVGNCLWGXLWVWGY

SEQ ID NO: 3607 - protein, 67 aa, Homo sapiens
  SITE (60): Xaa equals any of the naturally occurring L-amino acids
ELPGFVVQPTCKVTSQTYSSGSTFQSVLVFFQYCRHTCVSLSFCSLLAPGCFRVDCVCVXLEGKLKS

SEQ ID NO: 3608 - protein, 48 aa, Homo sapiens
GQKGMSILESSCYLRGLDFCQGGLVFLQVQPQVEWLRVSLQPLQPRRL

SEQ ID NO: 3609 - protein, 50 aa, Homo sapiens
QKQWKARGSRIIYSKDAKEKKLSATNSLSSNYFSKMKITQRLCQINRNIN

SEQ ID NO: 3610 - protein, 50 aa, Homo sapiens
IFQSLLLSWKTHLQVHSYYAPTMPVYGNLITLDMAKFYMVYSSFNFCSSI

SEQ ID NO: 3611 - protein, 65 aa, Homo sapiens
HFLSENFLPCFSLINIMVITVNKGDSEIPDFVFILFHRSGCLPLSSCVKLGKWAYVQVTVVPEGK

SEQ ID NO: 3612 - protein, 39 aa, Homo sapiens
VRGSKLGATFQPPSLRDIWQYLETFLVVVMGWGADLIHS

SEQ ID NO: 3613 - protein, 136 aa, Homo sapiens
  SITE (101): Xaa equals any of the naturally occurring L-amino acids
  SITE (117): Xaa equals any of the naturally occurring L-amino acids
  SITE (118): Xaa equals any of the naturally occurring L-amino acids
QKARGISGSAGKALAVWSLDWQQALQVRGTHELTNPGIAEVTIRPDRKILATASWDHRIRVFHWRTMQPMAVLAFPKAPLFQVRGLQRPMGFAWPRGFQRXKRDSSLLVQFNPRRIXXNPIPFRGRRRKGGQGKLG

SEQ ID NO: 3614 - protein, 50 aa, Homo sapiens
ELSDSLREHSLHLRQRHSSFLLAICSGLIVFLNTEWQWPALSIIYVPLVY

SEQ ID NO: 3615 - protein, 50 aa, Homo sapiens
QRGGARAEGTVQSPGRPGSGLEAINKPDPAGTAGALRRRPRADGGGSGEA

SEQ ID NO: 3616 - protein, 102 aa, Homo sapiens
  SITE (23): Xaa equals any of the naturally occurring L-amino acids
  SITE (24): Xaa equals any of the naturally occurring L-amino acids
  SITE (31): Xaa equals any of the naturally occurring L-amino acids
FLFQVSSTHEHFILLRDPLFFPXXSPPPGQXLKFPDRDQKEGLERKEHLPRAALPPRGSLLSLSQFHPSSKSRLPPLSSESRRLPRGVFALGLSCPGCTHRL

SEQ ID NO: 3617 - protein, 72 aa, Homo sapiens
  SITE (46): Xaa equals any of the naturally occurring L-amino acids
  SITE (47): Xaa equals any of the naturally occurring L-amino acids
QYHEISSNRFDCCLLLFSAAFLHCNCIALYFMFFTLMTSELSTVHXXCNHLLLLYMHVTTTVWVVLTYSPFL

SEQ ID NO: 3618 - protein, 160 aa, Homo sapiens
  SITE (33): Xaa equals any of the naturally occurring L-amino acids
  SITE (76): Xaa equals any of the naturally occurring L-amino acids
  SITE (160): Xaa equals any of the naturally occurring L-amino acids
QDSTMSEQQMDLKDLMPTKRKYMWKTAEDRRMXDLTCVLEWLERRQGKKKQAPEKQKPKVVTVLKRNKKKEEKKGXGLMTARGGNRRDTETSQQALGKRFRKDAAPTEASMEWSKRGNTSTWSLAATSRMAPRNLIQTSRMQSTQSPLSGQTHSVDKALX

SEQ ID NO: 3619 - protein, 105 aa, Homo sapiens
  SITE (88): Xaa equals any of the naturally occurring L-amino acids
IYATNSAEVCQYVITHAKVNILLVENDQQLQKILSIPQSSLEPLKAIIQYRLPMKKNNNLYSWDDFMELGRSIPDTQLEQVIESQKAXQCACSSTLQGPQAYPRE

SEQ ID NO: 3620 - protein, 46 aa, Homo sapiens
LQISAVMPRGQEVTSRTIRPWQQKPTTTHVPIYDLPLLLVQGYGLA

SEQ ID NO: 3621 - protein, 82 aa, Homo sapiens
AASSCSSRPASSPSAPSTQLPALPTVTHRPNDRLSAVMARDDTRRLPCCAPPEDAERSPFLTLLGHKNTRQLKVAKPHLFML

SEQ ID NO: 3622 - protein, 80 aa, Homo sapiens
  SITE (6): Xaa equals any of the naturally occurring L-amino acids
  SITE (54): Xaa equals any of the naturally occurring L-amino acids
  SITE (77): Xaa equals any of the naturally occurring L-amino acids
SAWPQXGAIYLLYKAIKAGIKCKPPLCSNSPICIARLAVEREGHGRDSGELRRXLNSLECKQDEYAKSIDPAQYHSXCVL

SEQ ID NO: 3623 - protein, 41 aa, Homo sapiens
NLSETWTRNLEKHLSNGFEEVMPPSLAIIKKQNHLVLDVFQ

SEQ ID NO: 3624 - protein, 32 aa, Homo sapiens
  SITE (19): Xaa equals any of the naturally occurring L-amino acids
PNLRDVKFQKKKKCVLDTXKYGKVSTQRLFLK

SEQ ID NO: 3625 - protein, 74 aa, Homo sapiens
  SITE (10): Xaa equals any of the naturally occurring L-amino acids
  SITE (14): Xaa equals any of the naturally occurring L-amino acids
DPVGKPVRFXLRNXGKIYPPLSQVFPNLPSPPYPKVFLTFPWAQPRVEFRIESYTPAYMLSLSLKGFLVYSAHE

SEQ ID NO: 3626 - protein, 208 aa, Homo sapiens
  SITE (172): Xaa equals any of the naturally occurring L-amino acids
  SITE (174): Xaa equals any of the naturally occurring L-amino acids
  SITE (177): Xaa equals any of the naturally occurring L-amino acids
  SITE (182): Xaa equals any of the naturally occurring L-amino acids
  SITE (200): Xaa equals any of the naturally occurring L-amino acids
KAQPRLLLLPQQPRKRHGCRRPGKRVFDTDCGSLDKSPSLSPQLAAPIRGRPKKCLVYPHAPKSSRLSRSVLRWLQGLDLSFFPRNINRDFSNGFLIAEIFCIYYPWELELSSFENGTSLKVKLDNWAQLEKFLARKKFKLPKELIHGTIHCKAGVPEILIEEVYTLLTHRXIXSIXDDFVXFTDYSYQDAFTLVSRSTXSKSIKDNH

SEQ ID NO: 3627 - protein, 105 aa, Homo sapiens
GSTSPAGQALATESQKPRAEAKSQSQRGWGTPTTERRLRNPSETTLSVLLHLDRMSQQHRRKRPSSERQVSKTATDGSYLLVFTSYVISSPVWAGPGDLLPVNRI

SEQ ID NO: 3628 - protein, 43 aa, Homo sapiens
  SITE (9): Xaa equals any of the naturally occurring L-amino acids
GRGRSAEVXRGGPAGVVVSGDFFWSRFLSSFQPLGRHLLSLRR

SEQ ID NO: 3629 - protein, 51 aa, Homo sapiens
  SITE (29): Xaa equals any of the naturally occurring L-amino acids
  SITE (42): Xaa equals any of the naturally occurring L-amino acids
LLIWILYSEPQLFSKAKKIQNKSKTKCLXTMEREMTHWNASXFHHIKDAST

SEQ ID NO: 3630 - protein, 46 aa, Homo sapiens
NALISFPNIFIYEYSRPRSWISCYPYTPCIYQLKLSLMTWAKWQEV

SEQ ID NO: 3631 - protein, 72 aa, Homo sapiens
  SITE (17): Xaa equals any of the naturally occurring L-amino acids
FSLLHTFYFYSYDCYFXISPLDLAHFSICLILGFKIQSLFLDIFIFKYKHESCNITLGTVLTAFHKFLFVMF

SEQ ID NO: 3632 - protein, 107 aa, Homo sapiens
  SITE (78): Xaa equals any of the naturally occurring L-amino acids
LCLANMSAEYTSKVQIFEHGGLEPLIRLLSSPDPDVKKNSMECIYNLVQDFQCRAKLQELNAIPPILDLLKSEYPVIXLLALKTLGVIANDKESRTMLKRQSRIGPS

SEQ ID NO: 3633 - protein, 80 aa, Homo sapiens
  SITE (78): Xaa equals any of the naturally occurring L-amino acids
SISTPSKCSYLAERHKLQPAATPASAANNARPGCSSSLLSKLGLNDKLLTPTLLLRILNYKQWNLLDYIKQKMNLVNXIR

SEQ ID NO: 3634 - protein, 50 aa, Homo sapiens
DSHGEELRVPANHQHHFASLVSGPPWNWSLQFLLTSDCNIMRDPEFEPPS

SEQ ID NO: 3635 - protein, 323 aa, Homo sapiens
  SITE (248): Xaa equals any of the naturally occurring L-amino acids
  SITE (269): Xaa equals any of the naturally occurring L-amino acids
  SITE (270): Xaa equals any of the naturally occurring L-amino acids
  SITE (274): Xaa equals any of the naturally occurring L-amino acids
  SITE (282): Xaa equals any of the naturally occurring L-amino acids
SPEFAYVPADPAQLAAQMLGKVSSIHSDQSDVLMVDVATSMPVVIKEVPSSEAAEDVMVAAPLVCSGKVLEVQVVNQTSVHVDLGSQPKENEAEPSTASSVPLQDEQEPPAYDQAPEVTLQADIEVMSTVHISSVYNDVPVTEGVVYIEQLPEQIVIPFTDQVACLKENEQSKENEQSPRVSPKSVVEKTTSGMSKKSVESVKLAQLEENAKYSSVYMEAEATALLSDTSLKGQPEVPAQLLDAEGAXKIGSEKSLHLEVEITSIVSDXXGQEXFGENFVPXEMEGKPVLSGEAAEAVHLGTSVKSSSGPFPPAPEGLYCTRN

SEQ ID NO: 3636 - protein, 56 aa, Homo sapiens
IRGNLLNQLRVFSETGKRAAWGLKSEHIIFSQPMISDEAQGKQGEAKEGIIEQLKQ

SEQ ID NO: 3637 - protein, 50 aa, Homo sapiens
SELTLGSGLGLRQGSVVTQSPWFLVRCLTVDDFLYVLSSREEKERGKEVT

SEQ ID NO: 3638 - protein, 149 aa, Homo sapiens
  SITE (58): Xaa equals any of the naturally occurring L-amino acids
KYKLENKDYREKTNTFLCSPVGIWTCHEVLKPCFTELERLDLNGADDFAPAWLNFPTXPSSTKVLTSSLKSSLNFEKHSENFAWTENRYDVNRRRHNSSDGFDSAIGRPNGGNFGRKEKNGWRTHGRNGYRKHKSSRWIPWWKFPFFVQ

SEQ ID NO: 3639 - protein, 53 aa, Homo sapiens
  SITE (35): Xaa equals any of the naturally occurring L-amino acids
EIDILMVGRTLLSTILNLIKLIWKNNTSSNEVTSXFFSHSSPPLFPNNTIYLC

SEQ ID NO: 3640 - protein, 56 aa, Homo sapiens
  SITE (5): Xaa equals any of the naturally occurring L-amino acids
  SITE (40): Xaa equals any of the naturally occurring L-amino acids
  SITE (43): Xaa equals any of the naturally occurring L-amino acids
  SITE (50): Xaa equals any of the naturally occurring L-amino acids
  SITE (54): Xaa equals any of the naturally occurring L-amino acids
ELVRXCHAHFMALHTHPPTHHSEHVLLPTFCNGFLILCTXFLXPKHLLYXCLGXVY

SEQ ID NO: 3641 - protein, 118 aa, Homo sapiens
  SITE (66): Xaa equals any of the naturally occurring L-amino acids
  SITE (107): Xaa equals any of the naturally occurring L-amino acids
  SITE (108): Xaa equals any of the naturally occurring L-amino acids
  SITE (109): Xaa equals any of the naturally occurring L-amino acids
  SITE (113): Xaa equals any of the naturally occurring L-amino acids
  SITE (116): Xaa equals any of the naturally occurring L-amino acids
FGRVFSKHLPIQEGQPWALKTPADIISTVEFNHTGELLATGDKGGRVVIFQREPESKNAPHSQGEXRRVTALSRATEPEFDYLQEPGDRGGRSTRSSGFPQQNGGPXXXVPPXLKXFN

SEQ ID NO: 3642 - protein, 77 aa, Homo sapiens
LYHCPAQGSPIFDPLHCQTTSRHTLQAPLSWESILLETIQKIEEEVFLFNSFYKATITLDTKIWAKTQEKKTAVQYS

SEQ ID NO: 3643 - protein, 182 aa, Homo sapiens
RIESSSEPASTFSSDVPHVVPCKFTISLAFPVNMGQKGKYASLIEKYKKHPKTDSSVTKMRRFYHIEYFLLPDDEEPKKVDILLFPMVAKVFLESGVKTVKPWHEGDKAWVSWEQTFNITVTKELLKKINFHKITLRLWNTKDKMSRKVRYYRLKTAGFTDDVGAFHKSEVRHLGLNQEKII

SEQ ID NO: 3644 - protein, 46 aa, Homo sapiens
  SITE (12): Xaa equals any of the naturally occurring L-amino acids
SNCFINYCLNLXNFIASVFLGQKTLCLENFGDLKTSRPISLRFYNF

SEQ ID NO: 3645 - protein, 145 aa, Homo sapiens
  SITE (57): Xaa equals any of the naturally occurring L-amino acids
  SITE (96): Xaa equals any of the naturally occurring L-amino acids
  SITE (102): Xaa equals any of the naturally occurring L-amino acids
PRSKMPLVEPPEDHQCSRSSNLKRGIWMTSFRVWRDKKTTREIVHLGTVWWAADHAXFKTAWCRAPTTGSWNSWPSCAPRIQGLCLCPEGACRHSXGHQRGXFRKQVGLVARPGSCGPLEWPHGFVALTGPTKGGALHVHSVSHS

SEQ ID NO: 3646 - protein, 40 aa, Homo sapiens
IRHEVFTLVKGELVSIKIFNAKTVMCCLTKGVCSEKCVLT

SEQ ID NO: 3647 - protein, 68 aa, Homo sapiens
NSAEFWPFLYICGLAISCVWKSINLRHHLYRKYLPRKHLKAKILQIQIYPIISSAYYHPKSFFFSKIY

SEQ ID NO: 3648 - protein, 93 aa, Homo sapiens
  SITE (27): Xaa equals any of the naturally occurring L-amino acids
  SITE (43): Xaa equals any of the naturally occurring L-amino acids
  SITE (85): Xaa equals any of the naturally occurring L-amino acids
VMPVAVGERMRRNGMRKCAPVFAPVPXLTQAPQCFTQPCARIXFLPLRTHFCNRCLGDTKEFPNPGASTCKLQIKLLKHQHSIRXTREGRPQI

SEQ ID NO: 3649 - protein, 129 aa, Homo sapiens
  SITE (127): Xaa equals any of the naturally occurring L-amino acids
NSARGHQLSFLPLKGAGSSCPPSPPEISAGEIYFVELVKEDGTLGFSVTGGINTSVPYGGIYVKSIVPGGPAAKEGQILQGDRLLQVDGVILCGLTHKQAVQCLKGPGQVARLVLERRVPRSTQQCXFC

SEQ ID NO: 3650 - protein, 129 aa, Homo sapiens
  SITE (2): Xaa equals any of the naturally occurring L-amino acids
PXCRNWHELYSRFFSIHTVSFLQGAHRLFQATQMVQSLKSMEGIQVEPARKRTKGRTYFCPSVSLNGASNGESLRHGKSWDSLLVLIPATTIVATINQVSTCHTVYIHYSLLPSNSPVCAYFPILPEGN

SEQ ID NO: 3651 - protein, 51 aa, Homo sapiens
MTLNRYAARLLDLHCGPHAPQVQNGCLLAALHVCFLSVSVCALIYAFHLGA

SEQ ID NO: 3652 - protein, 103 aa, Homo sapiens
FGRGPFTSAAHHLRRCCLHWLRYRDLSYHMWACFTDGSSQVTFAGLEQVCLSSGLKEACLLQSMVRDIQLHGRALWGSDGYTGHPQRSPVVVSWTHGLWLSPD

SEQ ID NO: 3653 - protein, 80 aa, Homo sapiens
  SITE (60): Xaa equals any of the naturally occurring L-amino acids
YGQSKRVMTLAVSDISSKPTIVIERGRLHNTISLVSTGTLNGWHPLSGIQKNEGVKSVFXKEENHAMEEGLLYRLFRSLV

SEQ ID NO: 3654 - protein, 70 aa, Homo sapiens
  SITE (3): Xaa equals any of the naturally occurring L-amino acids
  SITE (12): Xaa equals any of the naturally occurring L-amino acids
VKXGASHLRSGXPGPGVELGVENGLLCQLIHSPEFNLFSNSVVFESNFIQTHVPEADFQVTKARGLERCL

SEQ ID NO: 3655 - protein, 81 aa, Homo sapiens
RKPWTENKKIRKAMSHPIQNINKEIEIVEKNQIEILELKSIITKTENSLEVFSSRLEKSEERINRLQDRSIKIIQSEEQKG

SEQ ID NO: 3656 - protein, 49 aa, Homo sapiens
  SITE (20): Xaa equals any of the naturally occurring L-amino acids
KFGRGHNHWDLGIQGWKGKXEHSFFCQHTWVFARMKKEPGTPAPLFLDE

SEQ ID NO: 3657 - protein, 87 aa, Homo sapiens
  SITE (44): Xaa equals any of the naturally occurring L-amino acids
PCFFPGEGSHFLEGRFSKYGLRTSSVENAGNSLEKQVFNPRPRXRNSGWSPAMCVLTSPRATPCWLGLQSHCSTERARSIIVGQARG

SEQ ID NO: 3658 - protein, 68 aa, Homo sapiens
LTKRLPTTNSIKDYSNWPTIPQVYLNGEFVGGCDILLQMHQNGDLVEELKKLGIHSALLDEKKDQDSK

SEQ ID NO: 3659 - protein, 141 aa, Homo sapiens
  SITE (100): Xaa equals any of the naturally occurring L-amino acids
  SITE (115): Xaa equals any of the naturally occurring L-amino acids
  SITE (121): Xaa equals any of the naturally occurring L-amino acids
  SITE (133): Xaa equals any of the naturally occurring L-amino acids
  SITE (135): Xaa equals any of the naturally occurring L-amino acids
TVKEAECHVLTSLRSIQQTLKDGQRDRRWSFIMQCDLCCNRVLEARSSKRGVGSTMLSPKMLGRICSMPFHSFLGFPASPDIPWLVDASPQFPPHHHMAXSLCVPLRSLYSSSKXTDTSHXGLSVHSNQLHLXNXIPIKHI

SEQ ID NO: 3660 - protein, 99 aa, Homo sapiens
IRQRLVQLPAKQPPPGTLEQGRSIQQGEKPVVSLETTPSQKADWSSIPKPENEGKLIKQAAEGKPRPRPGDLIEIFRIGYEHWAIYVEDDCVVPSGFPK

SEQ ID NO: 3661 - protein, 118 aa, Homo sapiens
  SITE (103): Xaa equals any of the naturally occurring L-amino acids
KVLDVPGKHECCACGLGWLPTCPKLIPLTDQVMTATFAPGIHLRTLSMFSNAWMARWLRAVSCGPQQPGLSPADLSPASRRGSADARRKGTHCQVHQLSHRQXQASLLSLCPIITMSS

SEQ ID NO: 3662 - protein, 86 aa, Homo sapiens
  SITE (71): Xaa equals any of the naturally occurring L-amino acids
  SITE (73): Xaa equals any of the naturally occurring L-amino acids
  SITE (83): Xaa equals any of the naturally occurring L-amino acids
HVIHHINKIALIINQPCIPAVNLNWSFYVVRLYHPDVLYRNFVLYLCSWVRLTCSFTYPDCLCWILVMGLXYXKKGFVNVSGXFFF

SEQ ID NO: 3663 - protein, 169 aa, Homo sapiens
  SITE (62): Xaa equals any of the naturally occurring L-amino acids
  SITE (103): Xaa equals any of the naturally occurring L-amino acids
  SITE (106): Xaa equals any of the naturally occurring L-amino acids
  SITE (107): Xaa equals any of the naturally occurring L-amino acids
  SITE (110): Xaa equals any of the naturally occurring L-amino acids
  SITE (112): Xaa equals any of the naturally occurring L-amino acids
  SITE (114): Xaa equals any of the naturally occurring L-amino acids
  SITE (117): Xaa equals any of the naturally occurring L-amino acids
  SITE (121): Xaa equals any of the naturally occurring L-amino acids
  SITE (123): Xaa equals any of the naturally occurring L-amino acids
RDTRHSSRPGLPRNSRREKKQASCEKPRTPSQSWAPKAAKGAKPEPAPAPPPPGAKPEEDKXDGKEPSDKPQKAVQDHKEPSDKPQKAVQPKHEWPRGGGVAXTGXXLKXSXKXFWXLGHXEXKIRSLGCLIAAMILLSSLTVHPILRLIITMEISFFSFFIYCTVCHS

SEQ ID NO: 3664 - protein, 47 aa, Homo sapiens
NSAELLLKVENRQKSSQSRCGKARQKATPNTPNTYHWDPRAYEIRRT

SEQ ID NO: 3665 - protein, 53 aa, Homo sapiens
FGTRKYIHWEGKRHRRIVKERKKGGKERSKKGEKEKMLYPPATFTLILDEHIT

SEQ ID NO: 3666 - protein, 91 aa, Homo sapiens
  SITE (75): Xaa equals any of the naturally occurring L-amino acids
  SITE (77): Xaa equals any of the naturally occurring L-amino acids
  SITE (84): Xaa equals any of the naturally occurring L-amino acids
FGTSKNTATPSMPGEERTALPLPEGTNSIRNPQSQCMLGIVVRQPVTNGRKWLGDYFSQHAWRGAHRWALSPGTXTXSNPGLCXDCSQAAL

SEQ ID NO: 3667 - protein, 95 aa, Homo sapiens
  SITE (14): Xaa equals any of the naturally occurring L-amino acids
IRQSHSPQGATACXVHPPVSRASPNIPPSLRARCHGLLTEVIIQKQKSETPRNSWPPFLKEFGTCRLMKSRSRQNPLADVQITCKTRSRSFMNER

SEQ ID NO: 3668 - protein, 95 aa, Homo sapiens
IRQRFLALACSALGVTITKTLKIVCEVLSCDHNGGLPRIPFSTFQFLYTYIAEVDGEICASHVSRMLNYIEQEVIGPDGLITVNDFTQNPRVWLE

SEQ ID NO: 3669 - protein, 117 aa, Homo sapiens
  SITE (7): Xaa equals any of the naturally occurring L-amino acids
  SITE (108): Xaa equals any of the naturally occurring L-amino acids
IRHELVXFLLLKNIALVAIQRYFLISNEVLMIAPLPPPPLLPPLATNYRTPYDDAYYFYGSRNTFDPSLAYYGSGMMGVQPAAYVSAPVTHQLAQPVVNTVGQNELKXTSDQVIIQD

SEQ ID NO: 3670 - protein, 84 aa, Homo sapiens
IRQRRPQHSQLRRACQVALDEIKAEIEKQRLGTAAPPKANFIEADKYFLPFELACQSKSPRVVSTSLDCLQKLIAYGHITGQRP

SEQ ID NO: 3671 - protein, 98 aa, Homo sapiens
  SITE (22): Xaa equals any of the naturally occurring L-amino acids
  SITE (61): Xaa equals any of the naturally occurring L-amino acids
  SITE (67): Xaa equals any of the naturally occurring L-amino acids
FGRGLVMAPVAPKEPSTQVATXLRIPVSPPLPDPEDLKNLPSSVLVKFPTQKDLQTVPASXEGAPFXPAQAGLTTKKDPTVLPLVQAAPKNSPSFQST

SEQ ID NO: 3672 - protein, 45 aa, Homo sapiens
ESQCPTRAPFHLLAHRFTTIRILLVLSCRESLNYSDFQETKNMHF

SEQ ID NO: 3673 - protein, 54 aa, Homo sapiens
FGTRERERERERALRPGRRHPAARRPAQGNGLVLKSDLGLDIKIDAVKPRGLQR

SEQ ID NO: 3674 - protein, 139 aa, Homo sapiens
IRQSSFPVLHCRGWAAAGRTEGIQRVPAAAARGLSMNGSRRVRATSVLPRYGPPCLFKGHLSTKSNAAVDCSVPVSVSTSIKYADQQRREKLKKELAQCEKEFKLTKTAMRANYKNNSKSLFNTLQKALKANRKLRMTC

SEQ ID NO: 3675 - protein, 63 aa, Homo sapiens
KRMARLDLHIEKSSGCSVENRSVTESAGQASSGMNLMRRNLLQNINLPIFFLHREILLQCQLN

SEQ ID NO: 3676 - protein, 141 aa, Homo sapiens
NSARALGKLSCKKVRKGSLFEIISFPAKTALTSIIYASYAALIYLAVCVNAVLKKVKNIFQEEESIRQNREESENCRKAFSEPVLSEPMFAEGEIKAKPYRSLPEKPDISDYPKLLANKQSNNIQVLHSVFDQSAEMNEQI

SEQ ID NO: 3677 - protein, 52 aa, Homo sapiens
LQLQLQYQMYCLSKLTQLLVPGMQLPGILIAFSFHITLVHYIDDIMLTGPNE

SEQ ID NO: 3678 - protein, 56 aa, Homo sapiens
RGKLTRYNEPVTVTEFLKITLFPTTADCFRIEEDNSHAIKPTDFQKNKRCISLLGP

SEQ ID NO: 3679 - protein, 58 aa, Homo sapiens
LQVDFVLYFLRIVTNLRDLIQFIRNTVPPSKITYLRGLSLLSLEQLAKTVPQYGAYLC

SEQ ID NO: 3680 - protein, 137 aa, Homo sapiens
  SITE (127): Xaa equals any of the naturally occurring L-amino acids
NSARGERERERDFSKTLFNCLVYGPENTQPILDDVSDFDVAQIIIRINTATTVADLKSIINECYNYLELIGCLRLITTLSDKYMLVKDILGYHVIQRVHTPFESFKQGLKTLVFWRNSGLSRGICSXLCHNPGVFCK

SEQ ID NO: 3681 - protein, 195 aa, Homo sapiens
  SITE (152): Xaa equals any of the naturally occurring L-amino acids
  SITE (166): Xaa equals any of the naturally occurring L-amino acids
  SITE (195): Xaa equals any of the naturally occurring L-amino acids
KNMVKGEKVPKGKKITLKVARNCIKITFDGKKRLDLSKMGITTFPKCILRLSDMDELDLSRNLIRKIPDSISKFQNLRWLDLHSNYIDKLPESIGQMTSLLYLNVSNNRLTSNGLPVELKQLKNIRAVNLGLNHLDSVPTTLGALKELHEVXLHDNLLNNIPVSIXKLPKLKKLNIKRNPFSKPGEVGKYSRLHX

SEQ ID NO: 3682 - protein, 160 aa, Homo sapiens
  SITE (91): Xaa equals any of the naturally occurring L-amino acids
PAVRKMGLTSEFILTSIKWWKPSRAFLGSPSPPPTTSACLASTSNSSTTCVLGTMENLITDLYSYFTEPWCLALFHDRFIDLRKELRQILXSKEEEDLPSIEQLAHQIEDEEINPTEKPRQYLKRVFEESIYKTLVERSTLDYLHYNRYHLPMYAWPGIV

SEQ ID NO: 3683 - protein, 92 aa, Homo sapiens
  SITE (37): Xaa equals any of the naturally occurring L-amino acids
  SITE (40): Xaa equals any of the naturally occurring L-amino acids
  SITE (85): Xaa equals any of the naturally occurring L-amino acids
ALECCRVGLWLKPFLAMDLPDESQWDETTCGLAVCQXPQXWAIIRRIERGHPRILGSSCKTPLDAEDKLPVLTVVDILDSGFAAXSFTRMYL

SEQ ID NO: 3684 - protein, 41 aa, Homo sapiens
  SITE (2): Xaa equals any of the naturally occurring L-amino acids
PXVGKYPPWAKSRCPPVFINNGLLEDSCTHLFTYWLWLLSS

SEQ ID NO: 3685 - protein, 101 aa, Homo sapiens
  SITE (20): Xaa equals any of the naturally occurring L-amino acids
RDAHFPSLATSSPGTLQITXRWELRSALSFAEGGWRCQGSELILFLHKDWTRRCLSREEVTTTDTTSFDALCEAAPRAPDSSHFTENAPPRVSYCCDEMEI

SEQ ID NO: 3686 - protein, 85 aa, Homo sapiens
  SITE (44): Xaa equals any of the naturally occurring L-amino acids
  SITE (81): Xaa equals any of the naturally occurring L-amino acids
  SITE (85): Xaa equals any of the naturally occurring L-amino acids
LSSPSITTRPSVFTTLLTLSSRPAARRVPLPSRKTRPEGAGFPXAPGASATMASRGECCIERPPLRLRGFGAALTTTPRLXSPLX

SEQ ID NO: 3687 - protein, 57 aa, Homo sapiens
  SITE (37): Xaa equals any of the naturally occurring L-amino acids
  SITE (38): Xaa equals any of the naturally occurring L-amino acids
  SITE (52): Xaa equals any of the naturally occurring L-amino acids
  SITE (54): Xaa equals any of the naturally occurring L-amino acids
PHSHYSGPWMKLSAVLASGLTQCSPSGGGHKGAYVTXXPSSRQHSIEIVTPXVXGES

SEQ ID NO: 3688 - protein, 54 aa, Homo sapiens
  SITE (23): Xaa equals any of the naturally occurring L-amino acids
  SITE (30): Xaa equals any of the naturally occurring L-amino acids
  SITE (36): Xaa equals any of the naturally occurring L-amino acids
  SITE (53): Xaa equals any of the naturally occurring L-amino acids
FGTAFNSRGFEDSYATDSSSMWXPEEQDRXNLQVPXGVSEPISKCGDLDVIFXI

SEQ ID NO: 3689 - protein, 34 aa, Homo sapiens
SNCKYNSLIGTIFSFFLLFIFKVSFYCFFVALSN

SEQ ID NO: 3690 - protein, 107 aa, Homo sapiens
  SITE (25): Xaa equals any of the naturally occurring L-amino acids
  SITE (37): Xaa equals any of the naturally occurring L-amino acids
  SITE (89): Xaa equals any of the naturally occurring L-amino acids
  SITE (90): Xaa equals any of the naturally occurring L-amino acids
  SITE (94): Xaa equals any of the naturally occurring L-amino acids
  SITE (101): Xaa equals any of the naturally occurring L-amino acids
  SITE (106): Xaa equals any of the naturally occurring L-amino acids
  SITE (107): Xaa equals any of the naturally occurring L-amino acids
NSAQVSFLGFGKEFPYLVNTFWQSXPLSLWSYECVRXGRIFLSMGRVCHGCCVCSLDTGMCCTYSEPLGNFTGSPHVISLHGLLDLTSXXVVAXQMVGIHXETLGXX

SEQ ID NO: 3691 - protein, 90 aa, Homo sapiens
QRPYICFRIILTNTMAVRIFVFFLMLWDPVSILVLCPVVWVLIKGLPLCFVWIILQAAGKLLVKTAHPVLTCLILCVWSLQLLAHSRELD

SEQ ID NO: 3692 - protein, 57 aa, Homo sapiens
  SITE (16): Xaa equals any of the naturally occurring L-amino acids
  SITE (18): Xaa equals any of the naturally occurring L-amino acids
  SITE (51): Xaa equals any of the naturally occurring L-amino acids
EGKYSLLRSPSQRTAXGXGQKRVLPCKMWLKLTKSSKVSLSEAMGFLWKRXDVANSL

SEQ ID NO: 3693 - protein, 115 aa, Homo sapiens
  SITE (6): Xaa equals any of the naturally occurring L-amino acids
  SITE (73): Xaa equals any of the naturally occurring L-amino acids
  SITE (111): Xaa equals any of the naturally occurring L-amino acids
RQKSAXGSAADLLSAAEVRSQPVLFSLMNSSEAAMKKTLPKSHLSRVIIHDNRIAQRIYEMEVSALEKTKKKXSHYYEHLKKKFMTEQLQKAWAMERGIRGTATGTLTFGXPPPF

SEQ ID NO: 3694 - protein, 68 aa, Homo sapiens
  SITE (22): Xaa equals any of the naturally occurring L-amino acids
  SITE (55): Xaa equals any of the naturally occurring L-amino acids
TNSEAAINRQINLELYASYVYXSMAYYFSRDDVALNNFSRYFLHQSREETEHAEXADEAAEPARRPDP

SEQ ID NO: 3695 - protein, 141 aa, Homo sapiens
  SITE (78): Xaa equals any of the naturally occurring L-amino acids
  SITE (90): Xaa equals any of the naturally occurring L-amino acids
  SITE (102): Xaa equals any of the naturally occurring L-amino acids
PPLPGPLPRSPGLPQEYWETKMRHNQMCCETPPTVTVYVKSGSNRSHQPKKPITLKRPICKDNWQAFEKNTHNNNKSXRPKGPCLVIQRXDMTAFFKLFDDXLIQDFLWMDCCCKIADKYLLAMTFVYFKRAKFTISEHTR

SEQ ID NO: 3696 - protein, 59 aa, Homo sapiens
  SITE (2): Xaa equals any of the naturally occurring L-amino acids
  SITE (28): Xaa equals any of the naturally occurring L-amino acids
  SITE (32): Xaa equals any of the naturally occurring L-amino acids
  SITE (41): Xaa equals any of the naturally occurring L-amino acids
  SITE (45): Xaa equals any of the naturally occurring L-amino acids
  SITE (55): Xaa equals any of the naturally occurring L-amino acids
PXCFLRELRFKEEKTKLQESDSNKALVXQKGXYFGWLKCFXILNXPPNSMSRFRXRQFN

SEQ ID NO: 3697 - protein, 28 aa, Homo sapiens
  SITE (28): Xaa equals any of the naturally occurring L-amino acids
THRPCCPEMNEHLGLAVLRWMDTWTMPX

SEQ ID NO: 3698 - protein, 62 aa, Homo sapiens
  SITE (62): Xaa equals any of the naturally occurring L-amino acids
KRWLLNNTGLNCIIPLIHRLSSATATPENNMTNLSPSSSSAYFQHKDDEDKGIYDELLPHNX

SEQ ID NO: 3699 - protein, 190 aa, Homo sapiens
  SITE (54): Xaa equals any of the naturally occurring L-amino acids
  SITE (88): Xaa equals any of the naturally occurring L-amino acids
  SITE (137): Xaa equals any of the naturally occurring L-amino acids
RIWQNRRGSFLVLLLRECFRDLSWLALIHSVRGEAGLLVTSIVPKTPFFWAMHXTEALHQNMQALFSTLAQAEEQQPYLEGSTVMRGXRCLAEYHLGDYGHAWNRCWVLDRVDTWAVVMFIDFGQLATIPVQSLRSXDSDDFWTIPPLTQPFMLEKDILSSYEVVHRILKGKITGALNSALHILKFEESK

SEQ ID NO: 3700 - protein, 243 aa, Homo sapiens
  SITE (43): Xaa equals any of the naturally occurring L-amino acids
  SITE (172): Xaa equals any of the naturally occurring L-amino acids
  SITE (220): Xaa equals any of the naturally occurring L-amino acids
  SITE (237): Xaa equals any of the naturally occurring L-amino acids
GQMDQLVLVFMGCLLKDHDTLSQRGIMDGHTIYLVIKSKQGSXSLAHSFRDLPTNDPCHRDRNTKGNSSRVHQPTGMNQAPVELAHFVGSDAPKVHTQNLEVSHPECKAQMLENPSIQRLLSNMEFMWQFISEHLDTQQLMQQNPEVSRLLLDNSEILLQTLELARNLAMIXEIMQIQQPSQNLEYPLNPQPYLGLETMPGGNNALGQNYVDINDQMLNXMQDPFGGNPLQFSGRTXAKQGSL

SEQ ID NO: 3701 - protein, 54 aa, Homo sapiens
  SITE (16): Xaa equals any of the naturally occurring L-amino acids
  SITE (18): Xaa equals any of the naturally occurring L-amino acids
LISGTRCGTPWGNGVXTXPWSGRQGRPHGWAMGGALRVASHRSTARGWRPPWPV

SEQ ID NO: 3702 - protein, 81 aa, Homo sapiens
  SITE (72): Xaa equals any of the naturally occurring L-amino acids
APRLHFVRGILSMEANQYVLSIQWKPNVPPLPRAVHFNSDPTPQPNERSLNLGFFNNGAGGVRVHQIFRRFXPEDFSSAPR

SEQ ID NO: 3703 - protein, 62 aa, Homo sapiens
  SITE (59): Xaa equals any of the naturally occurring L-amino acids
RLGDHGRTLKENNAFKAASKILSSIMLATTSGMGCSMDTPDMPRFPPSGSLGMVNSQLXPGI

SEQ ID NO: 3704 - protein, 46 aa, Homo sapiens
  SITE (42): Xaa equals any of the naturally occurring L-amino acids
IRHELLSASHGFMSLTSLYLTFHHQLIKKQKQRGQKKKKKKXGGGP

SEQ ID NO: 3705 - protein, 204 aa, Homo sapiens
  SITE (151): Xaa equals any of the naturally occurring L-amino acids
  SITE (155): Xaa equals any of the naturally occurring L-amino acids
  SITE (161): Xaa equals any of the naturally occurring L-amino acids
  SITE (171): Xaa equals any of the naturally occurring L-amino acids
  SITE (178): Xaa equals any of the naturally occurring L-amino acids
SWSWVSSEMLEAMSLEVLGSCKDIIAEVTAQVLAASDIASTPTVGTESTSQVLVRGPGWKPPLDFFDSSSQNFSCLGNLRLTNPGCGSLRARVLHHASPIAHVDQNFVTGRLPGQDTSDHGRIHAVLLANGLHHGLIFQEVWHVYFSQPFXSTNXTVVQAXTSSNPTRCSXGVQALDXSIASPVRCFQTSPSGQGGPAAATMQT

SEQ ID NO: 3706 - protein, 46 aa, Homo sapiens
  SITE (38): Xaa equals any of the naturally occurring L-amino acids
  SITE (40): Xaa equals any of the naturally occurring L-amino acids
SLESSFIMPYEKLDRKLQNFFLQYCLYRGKVFTWKFLXLXALILKP

SEQ ID NO: 3707 - protein, 38 aa, Homo sapiens
  SITE (13): Xaa equals any of the naturally occurring L-amino acids
HSGRTRQEDHLSXRGMSCHTQVNIFISNYRYGLTAPKN

SEQ ID NO: 3708 - protein, 93 aa, Homo sapiens
  SITE (27): Xaa equals any of the naturally occurring L-amino acids
  SITE (31): Xaa equals any of the naturally occurring L-amino acids
  SITE (32): Xaa equals any of the naturally occurring L-amino acids
  SITE (85): Xaa equals any of the naturally occurring L-amino acids
YFHVLCQPQVERTWNGRGNGSHQEMNXGPEXXKQVNHQSNSSENFLVLPFQTSGAWIINSQFCQHAVFMGFHPGAPHICWASVSXPSLGPFLH

SEQ ID NO: 3709 - protein, 172 aa, Homo sapiens
  SITE (142): Xaa equals any of the naturally occurring L-amino acids
  SITE (164): Xaa equals any of the naturally occurring L-amino acids
  SITE (167): Xaa equals any of the naturally occurring L-amino acids
  SITE (170): Xaa equals any of the naturally occurring L-amino acids
MAGLQRLASHLPVGVMLPHNTTEAPGPHSAKQDSYEQGDSSQQSLKGHLRNNFQKQLLSNKELILDKVYTHPKWNTQTKARSYSYPHCTGISQQDPESDSQGQGNGLFYSSGPQSWYPKANNQDFIPFTKKRVGSGPGRSHXKPMVHRKVVQLQVRLALMGGPXCFXPRXPG

SEQ ID NO: 3710 - protein, 72 aa, Homo sapiens
  SITE (43): Xaa equals any of the naturally occurring L-amino acids
  SITE (47): Xaa equals any of the naturally occurring L-amino acids
SRWQGQAGHGTCYGRAEVLEATTIVTSKRYQEGKNTSLQLFLXEICXAGWKNLKSFCLRMNKNVKGVFKTQI

SEQ ID NO: 3711 - protein, 61 aa, Homo sapiens
  SITE (6): Xaa equals any of the naturally occurring L-amino acids
  SITE (45): Xaa equals any of the naturally occurring L-amino acids
  SITE (52): Xaa equals any of the naturally occurring L-amino acids
PWVLTXHQFCDWLCGVEMKRLTQFQPLQIPQDPGSSRSMSPHFPXFVRVTPXETFTSWASQ

SEQ ID NO: 3712 - protein, 86 aa, Homo sapiens
  SITE (71): Xaa equals any of the naturally occurring L-amino acids
  SITE (72): Xaa equals any of the naturally occurring L-amino acids
  SITE (82): Xaa equals any of the naturally occurring L-amino acids
RMTCPRTRDQVGQLNPLCLWSLGLSCDVGQDSFLSLCHVTNGPGRQSLGTTTWQQGQPFQWQQGKLHAYYXXKKGVQWLGLXFLFL

SEQ ID NO: 3713 - protein, 48 aa, Homo sapiens
  SITE (43): Xaa equals any of the naturally occurring L-amino acids
HAIISHCVERRNQNVGVDVCHMDEFKQFRPWQIIGYNSKLQCXNYTPF

SEQ ID NO: 3714 - protein, 109 aa, Homo sapiens
  SITE (40): Xaa equals any of the naturally occurring L-amino acids
  SITE (46): Xaa equals any of the naturally occurring L-amino acids
  SITE (53): Xaa equals any of the naturally occurring L-amino acids
  SITE (68): Xaa equals any of the naturally occurring L-amino acids
  SITE (100): Xaa equals any of the naturally occurring L-amino acids
MIYPLAVPKGRRLCCEVCEAQPSGCARPAQSLITVGWYIXRLTGNXIHEKICXLLIPLGTSMPFYNSXEERQHGLQQLQQRQKYLIEFCYTIAQKYLFEXETRGCCYQQ

SEQ ID NO: 3715 - protein, 72 aa, Homo sapiens
LPGWFRILCILSDENTCLPSRTDLSMRFYIPPETYSTADHEEVHMCRLCGTASAFWKRGEEKHQGGLGIKVL

SEQ ID NO: 3716 - protein, 45 aa, Homo sapiens
SPSQNGSSWSSMPQYENPWTIPNMLSMTRIGLAPVLGYLIIEEGF

SEQ ID NO: 3717 - protein, 86 aa, Homo sapiens
INHYRKKKLFLIYSDKCVDKDADCYAVRNPSSPVGRSKCCKEPRHLTNSQHGLAGHKSVPSWKQILQPQSSLQMTAVPTVIRVHGR

SEQ ID NO: 3718 - protein, 88 aa, Homo sapiens
  SITE (46): Xaa equals any of the naturally occurring L-amino acids
  SITE (78): Xaa equals any of the naturally occurring L-amino acids
  SITE (88): Xaa equals any of the naturally occurring L-amino acids
ERAWLKLYYHSFSSLRSLKASLPPYSNCQDKHKGPETARLSSEVAXNIYTPISSVEGVSLCCLECCGGVEWLFTEPVXAGDTESLAPX

SEQ ID NO: 3719 - protein, 151 aa, Homo sapiens
  SITE (13): Xaa equals any of the naturally occurring L-amino acids
AWYLTGAVAGVTXGVQQKSGDRTSRARRTSQEEAEKLWKLLFLMKSQGWLPQEGSVRRILCADPCCQICNVMALEIKQLLAEAPEVGLDNKMKLFLHWINPEMKDRRHEESILLSKAETVTQDRTKNIEKSPTVHQRSCVGSYNTEDNRGP

SEQ ID NO: 3720 - protein, 49 aa, Homo sapiens
  SITE (1): Xaa equals any of the naturally occurring L-amino acids
XLKKTFYPIWKNYGLKNTGELHKSNFLKCYQIRSHIHMKPLVMHSVLKM

SEQ ID NO: 3721 - protein, 40 aa, Homo sapiens
  SITE (40): Xaa equals any of the naturally occurring L-amino acids
TFRNLLFTLYIHTSGLYFQIVISPRQTCFLLLWTYILYCX

SEQ ID NO: 3722 - protein, 44 aa, Homo sapiens
  SITE (35): Xaa equals any of the naturally occurring L-amino acids
  SITE (38): Xaa equals any of the naturally occurring L-amino acids
KENVQCVNKNIKRFNILFSYFRFLHSISINSHLYXVLXANLGKN

SEQ ID NO: 3723 - protein, 76 aa, Homo sapiens
  SITE (23): Xaa equals any of the naturally occurring L-amino acids
LPLMTTEEAMPEKAKCPTLEITXQDFFQEAKTLIAQHYEKINENKVQGTSINGFRKKHQKPKSGKSNLWRLTKGTP

SEQ ID NO: 3724 - protein, 26 aa, Homo sapiens
PFFPKKKKKKLTKTKTKTKHQNRVGE

SEQ ID NO: 3725 - protein, 59 aa, Homo sapiens
  SITE (57): Xaa equals any of the naturally occurring L-amino acids
TSSLLFGAMLKFQEAAKCVSGSTAISTYPKNLIARRYVLPQKLGNGNFWTVYLVSDXKA

SEQ ID NO: 3726 - protein, 86 aa, Homo sapiens
  SITE (1): Xaa equals any of the naturally occurring L-amino acids
  SITE (82): Xaa equals any of the naturally occurring L-amino acids
  SITE (85): Xaa equals any of the naturally occurring L-amino acids
XRSTGAYYRHSTTNQNHGTANFQHQWGEDESPCESNNKKNDEMQEVPNRVLAPEQSLKNTKTSEYPIIFVYYLRKGKKINSXQLXD

SEQ ID NO: 3727 - protein, 66 aa, Homo sapiens
FLSTVDFLVTEEAQALAKAFPSLTTLLWLLFSMNSDVVSDMNSERISHNHYTGMVSFPCGVSLVSK

SEQ ID NO: 3728 - protein, 78 aa, Homo sapiens
  SITE (28): Xaa equals any of the naturally occurring L-amino acids
RTDHKLRPSPTESQGPKLGRGQLHPSYXRASPQEAFPLDSSSEIPCFKNFSWSQKPLKFALMDPSPPEFPLQQIPVTT

SEQ ID NO: 3729 - protein, 56 aa, Homo sapiens
GTSIYIHSCSYLKRSLLVIRILVKYTSLTLKNKSINLYLTNIEVVNQVRPLWLYVP

SEQ ID NO: 3730 - protein, 26 aa, Homo sapiens
TSSLGNSVHVQSENCCILKRFEHGFN

SEQ ID NO: 3731 - protein, 130 aa, Homo sapiens
  SITE (46): Xaa equals any of the naturally occurring L-amino acids
GREFYENVFEVPVTFMRMSSKFPSPPLPIFLPPEPVDLGSITSSSXSLNELDNISHLLRKISADINEIKGMKAAILTVEANLFDLNGRVSKNEAKISSLEGKMNEYSTTYECNRQFEDQEEDTGLQVKNY

SEQ ID NO: 3732 - protein, 108 aa, Homo sapiens
  SITE (80): Xaa equals any of the naturally occurring L-amino acids
RRVPSADSDTVQEALGSDTVCSLWRERKCLDPLCRFRHMEMQQNCSISCFWETQPLGCVKISCIFYHSKPRNINGLFLPXSSNITLQKEFRKEFHSSPRSQGTSGNLR

SEQ ID NO: 3733 - protein, 93 aa, Homo sapiens
  SITE (60): Xaa equals any of the naturally occurring L-amino acids
GTRTVKDEKLNLETTLQESTAARQIMEREIENIQTYQSTAEENFLQEIKNAKSEASIYKXSLSEIGKECEMLSKMVMETKTDNQILKEELKET

SEQ ID NO: 3734 - protein, 78 aa, Homo sapiens
  SITE (57): Xaa equals any of the naturally occurring L-amino acids
KKKKLTNFKMYSVVHILVHSQCCTTITSYISQNIFITPKGNLYPLSKWSLSTPLPPXLATTNLLSVCLDLPVYSGHFL

SEQ ID NO: 3735 - protein, 46 aa, Homo sapiens
  SITE (3): Xaa equals any of the naturally occurring L-amino acids
RSXRYPQMGAAETLGVYGGLESWQSKPCVLSFPGSLAQANHVVIMF

SEQ ID NO: 3736 - protein, 506 aa, Homo sapiens
  SITE (20): Xaa equals any of the naturally occurring L-amino acids
  SITE (41): Xaa equals any of the naturally occurring L-amino acids
  SITE (337): Xaa equals any of the naturally occurring L-amino acids
ISKMPDVKESVPPKYPGDSXGRSCKPETSGPPQEDKSGSEXPPPFLSVTGLTETVNEVSKLSNKIGMNCDYYMEEKVLPPSSLEGKVKETVHNAFWDHLKEQLSATPPDFSCALELLKEIKEILLSLLLPRQNRLRIEIEEALDMDLLKQEAEHGALKVLYLSKYVLNMMALLCAPVRDEAVQKLENITDPVWLLRGIFQVLGRMKMDMVNYTIQSLQPHLQEHSIQYERAKFQELLNKQPSLLNHTTKWLTQAAGDLTMSPPTCPDTSDSSSVAGPSPNEAANNPEPLSPTMVLCQGFLNLLLWDLENEEFPETLLMDRTRLQELKSQLHQLTVMXSVLLVASSFSGSVLFGSPQFVDKLKRITKSLLEDFHSRPEEAILTVSEQVSQEIHQSLKNMGLVALSSDNTASLMGQLQNIAKKENCVCSVIDQRIHLFLKCCLVLGVQRSLLDLPGGLTLIEAELAELGQKFVNLTHHNQQVFGPYYTEILKTLISPAQALETKVESV

SEQ ID NO: 3737 - protein, 39 aa, Homo sapiens
  SITE (33): Xaa equals any of the naturally occurring L-amino acids
  SITE (35): Xaa equals any of the naturally occurring L-amino acids
VPVEIMKEKSANNVRTDDYCPYGTVAFYTKGSXVXQSWG

SEQ ID NO: 3738 - protein, 99 aa, Homo sapiens
  SITE (99): Xaa equals any of the naturally occurring L-amino acids
FQMPWKEESEFTKQDKAARVIQQAWKSFLNVAIFQHFKSLIDLRRQGEPRQIVKYINPKEVKFPPDIYYKIFTHRPIEDLCANSPRKLWQNFQQSITSX

SEQ ID NO: 3739 - protein, 93 aa, Homo sapiens
RPASHQWRQSSLPASPKDTGTRKGPGSPSPGQATLAPVGWMVGCNEPSNLVTKALSNHGVWTKGKSVISRQRTVRCRNRQRINKRVTEPAKKK

SEQ ID NO: 3740 - protein, 111 aa, Homo sapiens
  SITE (23): Xaa equals any of the naturally occurring L-amino acids
  SITE (58): Xaa equals any of the naturally occurring L-amino acids
  SITE (70): Xaa equals any of the naturally occurring L-amino acids
NTSQGNVDPRCAVRLVDPGCRFXGSLKRSASRHRACRYKTVDLKRVVSALEGLQGVSXPSPACLERSQPXDCSLHRVKSGAAQPSKCPCGGRCLLSGSGSIPGPLDGMPVG

SEQ ID NO: 3741 - protein, 66 aa, Homo sapiens
  SITE (16): Xaa equals any of the naturally occurring L-amino acids
  SITE (31): Xaa equals any of the naturally occurring L-amino acids
  SITE (41): Xaa equals any of the naturally occurring L-amino acids
  SITE (59): Xaa equals any of the naturally occurring L-amino acids
  SITE (61): Xaa equals any of the naturally occurring L-amino acids
TRSEPHAERGLTVAYXESGSTSSFLWKSPSXYWSLGHTWWXHTVSSQLFQRKRAPSSRXFXAFFQK

SEQ ID NO: 3742 - protein, 64 aa, Homo sapiens
  SITE (55): Xaa equals any of the naturally occurring L-amino acids
IGWTPTCPPLTVYCLVLWELTAEWERRGQTWADAGCGAGNVFEMNHGVKYTGRSXGRAPFLLKS

SEQ ID NO: 3743 - protein, 64 aa, Homo sapiens
  SITE (8): Xaa equals any of the naturally occurring L-amino acids
ALILTGTXSHSFPTPEIASSSCSAELILHGLITPAPACPEGGGFFSSASLSGRPEAEHPNKPES

SEQ ID NO: 3744 - protein, 72 aa, Homo sapiens
  SITE (45): Xaa equals any of the naturally occurring L-amino acids
GSHPLVSRTVPSTTTSSNYLAKAMVSQISTQGFKSPFSMAASPKXAASPKPATSPKPLPSPEAFCLTQALSV

SEQ ID NO: 3745 - protein, 47 aa, Homo sapiens
  SITE (47): Xaa equals any of the naturally occurring L-amino acids
LLKHKHLRYLYLPKRDAKEKCKKPKPFLCTSEYMDKNFHSNIIIASX

SEQ ID NO: 3746 - protein, 60 aa, Homo sapiens
  SITE (40): Xaa equals any of the naturally occurring L-amino acids
  SITE (56): Xaa equals any of the naturally occurring L-amino acids
NMVDYYEVLGVQRHASPEDIKKAYRKLALKWHPDKNPEDXRRSREKIQASSGGMMXVPVG

SEQ ID NO: 3747 - protein, 61 aa, Homo sapiens
  SITE (57): Xaa equals any of the naturally occurring L-amino acids
GYLERLTTEVMQIRDFLPRILNGEVLESFQKLKIVEKNLERKEQDLEQLKMDCEALXKPAW

SEQ ID NO: 3748 - protein, 294 aa, Homo sapiens
  SITE (61): Xaa equals any of the naturally occurring L-amino acids
  SITE (164): Xaa equals any of the naturally occurring L-amino acids
  SITE (181): Xaa equals any of the naturally occurring L-amino acids
EIFKICQVLGTPKKSDWPEGYQLASSMNFRFPQCVPINLKTLIPNASNEAIQLMTEMLNWXPKKRPTASQALKHPYFQVGQVLGPSSNHLESKQSLNKQLQPLESKPSLVEVEPKPLPDIIDQVVGQPQPKTSQQPLQPIQPPQNLSVQQPPKQQSQEKPPQTXFPSIVKNMPTKPNGTLXHKSGRRRWGQTIFKSGDSWEELEDYDFGASHSKKPSMGVFKEKRKKDSPFRLPEPVPSGSNHSTGENKSLPAVTSLKSDSELSTAPTSKQYYLKQSRYLPGQHDIILQGLADL

SEQ ID NO: 3749 - protein, 100 aa, Homo sapiens
  SITE (64): Xaa equals any of the naturally occurring L-amino acids
  SITE (86): Xaa equals any of the naturally occurring L-amino acids
  SITE (88): Xaa equals any of the naturally occurring L-amino acids
  SITE (92): Xaa equals any of the naturally occurring L-amino acids
  SITE (95): Xaa equals any of the naturally occurring L-amino acids
SSDAMILSQAPHLLVFRWSGTLVILTEKFQPKRKLMLCLSVEQNPSPSYINLSKQGSPTQPNFXEPSRQQKVCPSGLIHKAPRDWXRXFPGXVLXCKTFQ

SEQ ID NO: 3750 - protein, 62 aa, Homo sapiens
AEVHPQTSLKCLCAGISQESACQCVCASVIYLEKCKGKGQDQQAKGRILEAGSRVLLPDLCH

SEQ ID NO: 3751 - protein, 58 aa, Homo sapiens
  SITE (39): Xaa equals any of the naturally occurring L-amino acids
HKTSIDWETRLETKEPTPKPGITEDLCHGVTMEREGIWXFYSRGNLGNLNELVRGTTG

SEQ ID NO: 3752 - protein, 81 aa, Homo sapiens
  SITE (58): Xaa equals any of the naturally occurring L-amino acids
  SITE (64): Xaa equals any of the naturally occurring L-amino acids
  SITE (80): Xaa equals any of the naturally occurring L-amino acids
QMKSNLTLLTCLTLHGGEGWKGAAVCFETVEQFCSLRKWHVTYLTKDSGLCQQQEKLXTEFLVXIREHQMKEIRKPSGNXP

SEQ ID NO: 3753 - protein, 74 aa, Homo sapiens
  SITE (4): Xaa equals any of the naturally occurring L-amino acids
  SITE (27): Xaa equals any of the naturally occurring L-amino acids
  SITE (54): Xaa equals any of the naturally occurring L-amino acids
  SITE (59): Xaa equals any of the naturally occurring L-amino acids
DGFXAWEVPWRRWRERKPAQPAKRPEXELARAPEAFTGGGLRQGTANSANGKRXSRDFXQRFPEVWAKRSTKDH

SEQ ID NO: 3754 - protein, 62 aa, Homo sapiens
  SITE (58): Xaa equals any of the naturally occurring L-amino acids
NTCSLVYIEFLSLSLRLYSGNFLSLLTLPPFGHPPCPRTEYEERLFYYSVLGGRHRHXYQGW

SEQ ID NO: 3755 - protein, 67 aa, Homo sapiens
  SITE (39): Xaa equals any of the naturally occurring L-amino acids
  SITE (58): Xaa equals any of the naturally occurring L-amino acids
LCSWQEVLPLESELLPNSTNSISSVYAELCEASLKLSWXIRQHQAFFLAWSQEMRAEXSKQGLRGVD

SEQ ID NO: 3756 - protein, 56 aa, Homo sapiens
  SITE (12): Xaa equals any of the naturally occurring L-amino acids
  SITE (33): Xaa equals any of the naturally occurring L-amino acids
RSRPSGCANKTXTGSLISLGVPLLCRSGLMVDXVFSDLSFVIPLSNREWNSSFTSE

SEQ ID NO: 3757 - protein, 98 aa, Homo sapiens
  SITE (9): Xaa equals any of the naturally occurring L-amino acids
WGSTKMWAXLSLDHPSAKENQALRLIEMREENGNVPKTEQAGSLKPLRDTGKSNLKEKKMNINKLCPGLGGECMTPDVMLLQQNQSLLWKPRNGNRRI

SEQ ID NO: 3758 - protein, 68 aa, Homo sapiens
AEPNGPSRREPGDYAAPCRSTFRLGGSTMKKVKKKRSEARRHRDSTSQHASSNSTSQQPSPGIHTTAA

SEQ ID NO: 3759 - protein, 156 aa, Homo sapiens
  SITE (120): Xaa equals any of the naturally occurring L-amino acids
  SITE (132): Xaa equals any of the naturally occurring L-amino acids
  SITE (139): Xaa equals any of the naturally occurring L-amino acids
  SITE (142): Xaa equals any of the naturally occurring L-amino acids
  SITE (145): Xaa equals any of the naturally occurring L-amino acids
  SITE (153): Xaa equals any of the naturally occurring L-amino acids
WPMSSFQAQMRNLGFYLPIASFLVLRGRYGYVGSSSGHDLIQCNQDQPDRIHLLPCRPGIYHFQGGILLVNNILWHLSPLGQVCPQLLYRASGEQLTHCTGPQWLLHASRPKWHPVGRQXKTLPESVSGEFXGQWGCSXTKXQIXQGKIITLXGPG

SEQ ID NO: 3760 - protein, 32 aa, Homo sapiens
NPPKIPFNLMPSFMHSAIFLRAYYVPGTSWSC

SEQ ID NO: 3761 - protein, 134 aa, Homo sapiens
  SITE (11): Xaa equals any of the naturally occurring L-amino acids
  SITE (21): Xaa equals any of the naturally occurring L-amino acids
  SITE (45): Xaa equals any of the naturally occurring L-amino acids
  SITE (109): Xaa equals any of the naturally occurring L-amino acids
ANMHPAGAAEXAEGVCQSRHXGAAQDLIQWGADYFEALSRGETPXVRERSERVALCNWAELTPELLKILHSQVAGRLIIRAEELAQMWKVVNLPTDLFNSVMNVGRFTXEIEWLKFLALACSASGSYYYQNSSR

SEQ ID NO: 3762 - protein, 60 aa, Homo sapiens
SQETFLDKPLSQITSTHDFQYHCLKRSQRREILRRFFKILKVLVFKEVGSFLVLTLSCEY

SEQ ID NO: 3763 - protein, 113 aa, Homo sapiens
  SITE (78): Xaa equals any of the naturally occurring L-amino acids
  SITE (83): Xaa equals any of the naturally occurring L-amino acids
  SITE (84): Xaa equals any of the naturally occurring L-amino acids
LTARAFAVTSFYPNPSFCWNSVLGDEVIGIWPRNADKADVNCACVTHAGLNIVTGDDFGLVKLFDFPCTEKFAKHKRXFGHSXXVTNILSLMMTSMWSSTGGDDCSVFVWRCL

SEQ ID NO: 3764 - protein, 72 aa, Homo sapiens
  SITE (12): Xaa equals any of the naturally occurring L-amino acids
GSSTVPGVYSSXHRDDQPPGFALLSLLKAGRQLQTRTRWSPHGEHQSPSLAHTGKQPGETMAQGLEPKGLNK

SEQ ID NO: 3765 - protein, 81 aa, Homo sapiens
GTRAPAPVPGGQAASPSWGLPATSPQGSQQGLPVSVQNVEERGLGPHRCKGHEGRRLPEAPEAPVLGCALGAWAACLSRAF

SEQ ID NO: 3766 - protein, 117 aa, Homo sapiens
GTRRDSITEHFMPVKIGNISSPVTTVSLIDFSTDIAKEDILLATIDTGDAEISITSEVSGTLKDSSAVVADAPAFPRKKDEADMSNYNSSIKSNVPADEAVQVTDSIIPEAGNPSCS

SEQ ID NO: 3767 - protein, 119 aa, Homo sapiens
  SITE (24): Xaa equals any of the naturally occurring L-amino acids
  SITE (27): Xaa equals any of the naturally occurring L-amino acids
  SITE (54): Xaa equals any of the naturally occurring L-amino acids
NKNKSSCKDPGLVAGHPGAQGHCXHAXLRAWIIQCWWRMTLSRVLEKETAGSSXRLRNQREGSDQAPVFGPYVACPLAILPGAQCHLHHPGPLAMPQLPDLRSPPGHCVVTATHLQFHI

SEQ ID NO: 3768 - protein, 129 aa, Homo sapiens
  SITE (100): Xaa equals any of the naturally occurring L-amino acids
  SITE (104): Xaa equals any of the naturally occurring L-amino acids
  SITE (124): Xaa equals any of the naturally occurring L-amino acids
VVESLSLQGSYAGKIHSIGDAFRNFKNLRSLDLSRNLITSLKGIQYLCSLQDLNLYYNNIPSLVEVSRLQPLPFLKELDLRLNPVVRKDTDYRLFAVYTXQTLXKLDDRTVREGERKAAKLHFXSVGQQ

SEQ ID NO: 3769 - protein, 74 aa, Homo sapiens
  SITE (57): Xaa equals any of the naturally occurring L-amino acids
  SITE (62): Xaa equals any of the naturally occurring L-amino acids
GPRSAWGQAASKSAGPPSVVWLLGHTVTISLKAEAGVEEAWEEAPWGNILDLFVIQXPHCWXGPRGGRTATPFM

SEQ ID NO: 3770 - protein, 87 aa, Homo sapiens
  SITE (54): Xaa equals any of the naturally occurring L-amino acids
  SITE (71): Xaa equals any of the naturally occurring L-amino acids
  SITE (81): Xaa equals any of the naturally occurring L-amino acids
CVELSCTERMLLEEIWVCVILHGNDPKNKVISDCSGLWKGHLEQWEKVWQRNKXIQVLEQALGLQPSHLTXGASFIILPAXKAYLPC

SEQ ID NO: 3771 - protein, 43 aa, Homo sapiens
  SITE (13): Xaa equals any of the naturally occurring L-amino acids
AGQKGAPVEQSLXREWYSLRQRLGEGAFPAERTGLWQKAPTHY

SEQ ID NO: 3772 - protein, 212 aa, Homo sapiens
VISFQIITDTIMDSSTAHSPVFLVFPPEITASEYESTELSATTFSTQSPLQKLFARKMKILGTIQILFGIMTFSFGVIFLFTLLKPYPRFPFIFLSGYPFWGSVLFINSGAFLIAVKRKTTETLIILSRIMNFLSALGAIAGIILLTFGFILDQNYICGYSHQNSQCKAVTVLFLGILITLMTFSIIELFISLPFSIWGATQRIVIVNNVVD

SEQ ID NO: 3773 - protein, 95 aa, Homo sapiens
LQMKSLAGTQGCSVKVQLQDQSPFHLTPTPILMLPEAHLLWFLTREQSAKSLHLVQLHFPTEKTWPREVHRLEGSNTAIGQTDIPRYTCYGPGRK

SEQ ID NO: 3774 - protein, 85 aa, Homo sapiens
  SITE (64): Xaa equals any of the naturally occurring L-amino acids
AEEQTERGLPTQAERRTSGQIDGRLAMHLTREVPDRPTTEWAGQSERRASEQMDRRMSGEAERXTSEQITHRLSKLSERRPSVAD

SEQ ID NO: 3775 - protein, 74 aa, Homo sapiens
ARAGHGLKVRAPPAQLKVKPTPALENLVPEVELPSLFPALLAKSMAGPSHMPLFVKEKSSAPPTKVFLITSFWG

SEQ ID NO: 3776 - protein, 170 aa, Homo sapiens
  SITE (105): Xaa equals any of the naturally occurring L-amino acids
  SITE (131): Xaa equals any of the naturally occurring L-amino acids
TASSQRNLGQILNMFLTAVNPQPLSTPSWQIETKYSTKVLTGNWMEERRKFTRDTDKTPQSIYRKEYIPFPDHRPDQISRWYGKRKVEGLPYKHLITHHQEPPHXYLISTYDDHYNRHGYNPGLPPLRTWXGQKLLWLPEKSDFPFLLPLQTMDSNKQLKQRQLKTQGLA

SEQ ID NO: 3777 - protein, 36 aa, Homo sapiens
SQHFERLRWVVCLSPGVQDQPGQHGETPSLPKIDEN

SEQ ID NO: 3778 - protein, 109 aa, Homo sapiens
  SITE (106): Xaa equals any of the naturally occurring L-amino acids
QSWPRGKDAPCYESDTDIYETVAAATSESTTVEPGKLDVGATEGQDLQHISNQKMPTGPPEDRLSLKFLPSSEEDNDDAKILPSPVQGSSEDNLSLVCLPRRKDDXCDG

SEQ ID NO: 3779 - protein, 44 aa, Homo sapiens
  SITE (8): Xaa equals any of the naturally occurring L-amino acids
  SITE (31): Xaa equals any of the naturally occurring L-amino acids
VMEIKLLXGGISNIGKNEWNGIKCLAPSGGXLEAGPILEKRRSW

SEQ ID NO: 3780 - protein, 145 aa, Homo sapiens
  SITE (96): Xaa equals any of the naturally occurring L-amino acids
  SITE (113): Xaa equals any of the naturally occurring L-amino acids
  SITE (114): Xaa equals any of the naturally occurring L-amino acids
AEQDYYKALHYFLKAAKAGSANAMAFIGKMYLEGNAAVPQNNATAFKYFSMAASKGNAIGLHGLGLLYFHGKGVPLNYAEALKYFQKAAEKGWPDXQFQLGFMYYSGSGIWKXXKLAFKYFYLASKSWQPLAIYYLAKVFSTGPG

SEQ ID NO: 3781 - protein, 213 aa, Homo sapiens
  SITE (7): Xaa equals any of the naturally occurring L-amino acids
REGKEKXFQRNMSTNNALRVFWKSREWNMKTSTFDSDEDILLLPKRKRFRKKKSRPVRHTKRHEEEQVYEQGTTLPCSICKHEIDLTGIFLHKKQHVALATLGFQWMGRKKPQPSVIAVQRQFMISKLLSSFMFTEKTLQSINNAFELLWKKQIPAYYKIFDNIDRSVIYSQKICHLLIKGVGICEDRNSTWKADMNDKFTVVSNFGNKPNVC

SEQ ID NO: 3782 - protein, 91 aa, Homo sapiens
SLPFCLCPSFVPEVSHRNQNSSPSALNLDSPPIKCSTATCAVVPTWSSIHPEMQILMRTVLVTELLSNLCPLVRTSAPGEETELHKVAVWV

SEQ ID NO: 3783 - protein, 81 aa, Homo sapiens
  SITE (29): Xaa equals any of the naturally occurring L-amino acids
  SITE (66): Xaa equals any of the naturally occurring L-amino acids
  SITE (68): Xaa equals any of the naturally occurring L-amino acids
  SITE (81): Xaa equals any of the naturally occurring L-amino acids
ELGSVGVACAISILLKGLSDELVLVDVDXGKLKGETMDLQHGSPFMKMPNIVFQQRFTWSLQTPTXGXHSSHARKKGNHAX

SEQ ID NO: 3784 - protein, 116 aa, Homo sapiens
RRAPEGERGAAGIRCVAYNNQSNRLLFQEQMALWKIYNLSANYFQEKFFPGHESRATEALCWAEGQRLFSAGLNGEIMEYDLQALNIKYAMDAFGGPIWSMAASPVALNFWLVVKM

SEQ ID NO: 3785 - protein, 94 aa, Homo sapiens
  SITE (63): Xaa equals any of the naturally occurring L-amino acids
  SITE (71): Xaa equals any of the naturally occurring L-amino acids
QWPKSCPVGCLHPLSHFSAFRVKLQDLWCLLGSDRVSRHPLSMQRVSTCSGGHVQRGATCSVXLFLAMLDXAAPEKQLPGFTQKAIQNLLEKVA

SEQ ID NO: 3786 - protein, 110 aa, Homo sapiens
  SITE (15): Xaa equals any of the naturally occurring L-amino acids
  SITE (30): Xaa equals any of the naturally occurring L-amino acids
  SITE (76): Xaa equals any of the naturally occurring L-amino acids
VPLWLVGCKRQSPPXQPSFFLSTQTLNLTXRWSVRPVTCQARAGELRDMLRGATGDKCGIWNLCSSLPPVSTTNLXRHSMARGEAPPLAHFVLQTARESRVSLSSPDSSW

SEQ ID NO: 3787 - protein, 38 aa, Homo sapiens
  SITE (3): Xaa equals any of the naturally occurring L-amino acids
  SITE (23): Xaa equals any of the naturally occurring L-amino acids
VIXLWSQTSRYQNQDSNLGIWLXVHTFNQLIHNVKYNC

SEQ ID NO: 3788 - protein, 100 aa, Homo sapiens
  SITE (40): Xaa equals any of the naturally occurring L-amino acids
  SITE (41): Xaa equals any of the naturally occurring L-amino acids
  SITE (53): Xaa equals any of the naturally occurring L-amino acids
  SITE (97): Xaa equals any of the naturally occurring L-amino acids
ARARADGLRGLGGGWTQDTQRGWTEGTQGRMDSGYSERMXXGDSGEDGLRILXEDGLRGLRAGWTEDTSGRWTEKTRGRVDLGYSRRPDLEDFGGRXNLG

SEQ ID NO: 3789 - protein, 91 aa, Homo sapiens
  SITE (13): Xaa equals any of the naturally occurring L-amino acids
PCGHKGVLQYFQXIVGTSTPSPTWTWHPLYSCQFYTNHRKKVELVQAGFSEITCRHATDVYNPQKRKETWKPSLSVTFFLMIVSAMKFNFK

SEQ ID NO: 3790 - protein, 53 aa, Homo sapiens
GQGLQNPLEKISLVPGYSMLSLTVSIEGHFPVLSGTIGYFGDLKKRGSHSILF

SEQ ID NO: 3791 - protein, 134 aa, Homo sapiens
  SITE (126): Xaa equals any of the naturally occurring L-amino acids
  SITE (128): Xaa equals any of the naturally occurring L-amino acids
  SITE (132): Xaa equals any of the naturally occurring L-amino acids
AELSFMIMSNTHKARLERRVTGSTNRWRLPKQPFSGDLLSLSQMCKALSIDFEEALRNPDRLCISQIQKFFFENFKNKDIQSGEADVILECLGFKWELHQPQFFQSETLAKFYLKALAQGNHTPLXEXEEFXGV

SEQ ID NO: 3792 - protein, 205 aa, Homo sapiens
  SITE (188): Xaa equals any of the naturally occurring L-amino acids
  SITE (199): Xaa equals any of the naturally occurring L-amino acids
PCQAVMVLPDENHREDALMRLNKAALELCQKPRPLQSNLLHQMCLQLWRDVIDSLVGHSMWLRSVLGLPEKETIYLNVPEEQDQKSPPIMEVKVPVGKAGKEERKGAAQEKKQLGIKDKEDKKGAKLLGKEDRPNSKKHKAKDDKKVIKSASQDRFSLEDPTPDIILSSQEPIDPLVMGKYTQRLDSXVRGLLDTLVTXLMVLGL

SEQ ID NO: 3793 - protein, 50 aa, Homo sapiens
IGFKSSPEAILKEKSSPRKEWRKRGQPHSLCDHEDCRHVVGSHVTSFSAS

SEQ ID NO: 3794 - protein, 83 aa, Homo sapiens
LVDMKTGQSPKSSEMTTLARQLTRLRVTCPSCRKLLQGWREQLVCFEKCRSIRIQNRTLKKLSFHVSKTAFDLMYKMSRSKGQ

SEQ ID NO: 3795 - protein, 40 aa, Homo sapiens
  SITE (39): Xaa equals any of the naturally occurring L-amino acids
PRACPRRVEGEEDRRSRIKLCPAWSLCRTVLSFTDKSRXI

SEQ ID NO: 3796 - protein, 75 aa, Homo sapiens
  SITE (42): Xaa equals any of the naturally occurring L-amino acids
  SITE (55): Xaa equals any of the naturally occurring L-amino acids
GVSLECFRKPFAGEGIREFQSYWDGSPRVFLSAIPGWDKSLXEEAAGSRFQPTFXPRGHFGYQVDPLVFCLNPRF

SEQ ID NO: 3797 - protein, 45 aa, Homo sapiens
GTSRILDLCSRIVGLCFRREGCLGCPVSVVNPLLAYPVTARNFLI

SEQ ID NO: 3798 - protein, 106 aa, Homo sapiens
  SITE (106): Xaa equals any of the naturally occurring L-amino acids
HEGKSVDSKVPSLQDTFDRERHKDPSPRDRDMQQLDSNLNSTRSQCNQVQDDLVETEKNLEESKNRSAISLLAAEEEINQLKKQLKSLQAQEDARHRKHRSEELRX

SEQ ID NO: 3799 - protein, 65 aa, Homo sapiens
PRPSGMLCTSRTWQRAYVLCSTSPSWIVDILPSLQISIVCDYFKQSEVEGPQISFKPGSQADLKP

SEQ ID NO: 3800 - protein, 79 aa, Homo sapiens
GTRVIKALLILTPIFGLTWGLGLATLLEEVSTVPHYIFTILNTLQVGDRGVAVFFAFLDGLSALPISSLGRYQGGAEET

SEQ ID NO: 3801 - protein, 58 aa, Homo sapiens
  SITE (17): Xaa equals any of the naturally occurring L-amino acids
KERRFGKAMSSQSLIGXPPGNLLEVEVNKLKVVTTNLCHTRTLPHPKSFLLINSGRPF

SEQ ID NO: 3802 - protein, 62 aa, Homo sapiens
  SITE (45): Xaa equals any of the naturally occurring L-amino acids
  SITE (50): Xaa equals any of the naturally occurring L-amino acids
  SITE (59): Xaa equals any of the naturally occurring L-amino acids
KAAESRSPCLPSGPSLEQNHCLEREKEKRVSVNMLALGETSMFLXRRTAXRSSWCSVSXFLL

SEQ ID NO: 3803 - protein, 67 aa, Homo sapiens
  SITE (18): Xaa equals any of the naturally occurring L-amino acids
NEIISMTDGPGASLTVEXSRNGSNLQKKGCSHFCQNCPKPHPLPLPLFSSIFLMNCLSANSFLQFVL

SEQ ID NO: 3804 - protein, 119 aa, Homo sapiens
  SITE (98): Xaa equals any of the naturally occurring L-amino acids
  SITE (103): Xaa equals any of the naturally occurring L-amino acids
  SITE (104): Xaa equals any of the naturally occurring L-amino acids
GQETMATLARLQARSSTVGNQYYFRNSVVDPFRKKENDAAVKIQSWFRGCQVRAYIRHLNRIVTIIQKWWRSFLGRKQYQLTVQVAYYDYDDGISTMXMAVQXXRGRWARLLGFRKYPL

SEQ ID NO: 3805 - protein, 155 aa, Homo sapiens
  SITE (96): Xaa equals any of the naturally occurring L-amino acids
  SITE (111): Xaa equals any of the naturally occurring L-amino acids
  SITE (118): Xaa equals any of the naturally occurring L-amino acids
ARELQWQGCDLTPLVGQLSLGQLQEVSKALQDTLASAGQIPFHAEPPETIRSLQERIKSLNLSLKEITTKVCMSEKFCSTLRKKVNDIETQLPALXEAKMHAISGNHFWTXKDLTEEXRSLTSEREGLEGLLSKLLVLSSRNVKKLGSVKEDYNR

SEQ ID NO: 3806 - protein, 91 aa, Homo sapiens
  SITE (11): Xaa equals any of the naturally occurring L-amino acids
  SITE (65): Xaa equals any of the naturally occurring L-amino acids
  SITE (75): Xaa equals any of the naturally occurring L-amino acids
KSIGVKVQASXFTCMWGKWKSQEQINLTLASRARSSRGQPLACCLKRKVGPKEGTGPGACLMARXLWLLADKSIXVSLPGFRRLGTVTIPF

SEQ ID NO: 3807 - protein, 54 aa, Homo sapiens
AEAHATVPGFSFCKQSFIRTQPCSFFYLLSVTTTKATWALKPKILLSGPLKKVC

SEQ ID NO: 3808 - protein, 132 aa, Homo sapiens
EIGPRGQEYGTRVKFPTSPHRHSLEMGRPRRGAPRNSARPRARQWQSRRLLYALHPHASRGSLFYNNLKVPPSAPNLPPTPRSAGKVNCGWRGIWGVWGAGRQGAGRMDVISGPELHSCPRAKRPFPAEVPN

SEQ ID NO: 3809 - protein, 71 aa, Homo sapiens
ARSVPSPATCVHLPFSHLRLQKQNQVGCLGRKTNKRPTRWSEMDQEQLCSISPLSFLKRRSIKESATLVHT

SEQ ID NO: 3810 - protein, 43 aa, Homo sapiens
DVISSAGNFCWCNISSKVEAGGRLQQVEGCLGSQAVMMIKTVA

SEQ ID NO: 3811 - protein, 92 aa, Homo sapiens
  SITE (2): Xaa equals any of the naturally occurring L-amino acids
SXPPPTPVQLSEQFSSDFLPLWAQSEALPQDLLKELLPGGKQTMLCPEMKIKLAMMKKNLPLEKNRPDSVISSKMFLSIHRLTLGKTSTAIS

SEQ ID NO: 3812 - protein, 114 aa, Homo sapiens
  SITE (14): Xaa equals any of the naturally occurring L-amino acids
  SITE (48): Xaa equals any of the naturally occurring L-amino acids
  SITE (72): Xaa equals any of the naturally occurring L-amino acids
GTSSSGARRLPVPXRGQEWMSLFRLRPASTPPQLDETLSERLWGLTEXFPERVRSAAGATFDLSLFVAQKMXRFSRAALWIGTTSFMILVLPVVFETEKLQMEHSSNCSSGRYF

SEQ ID NO: 3813 - protein, 72 aa, Homo sapiens
  SITE (7): Xaa equals any of the naturally occurring L-amino acids
  SITE (18): Xaa equals any of the naturally occurring L-amino acids
  SITE (35): Xaa equals any of the naturally occurring L-amino acids
SKRHRHXRENTGKKATWXEGRDGNDAATSQLQAKXCHGLLATTRKKLEEARKDSSVMPSEENGPANTLISDF

SEQ ID NO: 3814 - protein, 102 aa, Homo sapiens
QSCGRHFTKSYNLLIHERTHTDERPYTCDICHKAFRRQDHLRDHRYIHSKEKPFKCQECGKGFCQSRTLAVHKTLHMQTSSPTAASSAAKCSGETVICGGTA

SEQ ID NO: 3815 - protein, 95 aa, Homo sapiens
NEQQELLQAVQRLWHHGWQDSHLHGRGHRVQQSQVRSQKYGGGGEKNLRGSWPRKGSRGGTFAVGLPSTTGYLALCYPLSSRHSLIDRTKEAKSE

SEQ ID NO: 3816 - protein, 37 aa, Homo sapiens
  SITE (23): Xaa equals any of the naturally occurring L-amino acids
IRIKSTAKNSDDLYERIYHCVPXSLIWSFFVSWASQP

SEQ ID NO: 3817 - protein, 64 aa, Homo sapiens
LRSWTRITVALPWSGAKSSHSVWKANYLNPVEDSQMWLENLRRLPRGSSTSVRERAHKFHCCRT

SEQ ID NO: 3818 - protein, 45 aa, Homo sapiens
  SITE (22): Xaa equals any of the naturally occurring L-amino acids
EWRIGVNERIGEGIIRSTAGGXKRLADTALKRLPKCDSHVRLALM

SEQ ID NO: 3819 - protein, 103 aa, Homo sapiens
HEEALKSAAGKQLSYRHPAKMISSKPRLVVPYGLKTLLEGISRAVLKTNPSNINQFAAAYFQELTMYRGNTTMDIKDLVKQFHQIKVEKWFRRNDTTEEIRMF

SEQ ID NO: 3820 - protein, 62 aa, Homo sapiens
GTLTPLSDSSKKIDFHLHVLRRKGEHRMSGGSMYNSDTDEDEETEPSSSGQQIIENSITMIR

SEQ ID NO: 3821 - protein, 72 aa, Homo sapiens
LRVATEHDARAVGATWTPLSPLSGIIESKVFCGLSANPSSSACRRPRSHWNSTQHEIINNSGNVNLTITSYK

SEQ ID NO: 3822 - protein, 23 aa, Homo sapiens
GTSSLSLSLSLSLSLAGPVDCTW

SEQ ID NO: 3823 - protein, 87 aa, Homo sapiens
  SITE (38): Xaa equals any of the naturally occurring L-amino acids
KKIPRYLHQGKGNESDCRSGRQWAKTSGEKRGKLTLPXKSLSEVLSQQRPCLGERPYKYLKYSKSFGPNSLLMHQVSHQVENPYKCA

SEQ ID NO: 3824 - protein, 40 aa, Homo sapiens
AEGEISMRIRKCLLLVDNSSMVCTKERFSCDQREKSNLTP

SEQ ID NO: 3825 - protein, 63 aa, Homo sapiens
QKSVRVKENWLQMRTSLPKWTVFSVDHRGSLSTGLEKWLRTGEQGKHLQLFLDLFKRTGERWL

SEQ ID NO: 3826 - protein, 134 aa, Homo sapiens
  SITE (29): Xaa equals any of the naturally occurring L-amino acids
  SITE (82): Xaa equals any of the naturally occurring L-amino acids
  SITE (86): Xaa equals any of the naturally occurring L-amino acids
  SITE (89): Xaa equals any of the naturally occurring L-amino acids
  SITE (92): Xaa equals any of the naturally occurring L-amino acids
  SITE (97): Xaa equals any of the naturally occurring L-amino acids
  SITE (102): Xaa equals any of the naturally occurring L-amino acids
  SITE (125): Xaa equals any of the naturally occurring L-amino acids
FSTKGMTADEWAEKMPKGPPPTSPKATAXRDILARLHKAVTSHYHAITQEFENFDTMKTNTISREEFRAICNRRVQILTDEXFDRXWNXMPXMPRGXLNTRXSDKVSSRQSTPMALGLGGPKGQXLRSKTIAYA

SEQ ID NO: 3827 - protein, 63 aa, Homo sapiens
  SITE (5): Xaa equals any of the naturally occurring L-amino acids
  SITE (21): Xaa equals any of the naturally occurring L-amino acids
  SITE (25): Xaa equals any of the naturally occurring L-amino acids
  SITE (31): Xaa equals any of the naturally occurring L-amino acids
  SITE (43): Xaa equals any of the naturally occurring L-amino acids
  SITE (49): Xaa equals any of the naturally occurring L-amino acids
VVMIXQSHIQRPRCKAGRRKXKSQXWLSQKXTLFSLNMDLERXTQRIGXSKSGTFFQNPRGGR

SEQ ID NO: 3828 - protein, 110 aa, Homo sapiens
  SITE (86): Xaa equals any of the naturally occurring L-amino acids
ARVKNTLASSIMSAKRAELKKTHLSKNYKAVCLELKPEPTKTFDYKAVKQEGRFTKAGVTQDLKNELREVREELKEKMEEIKQIKXLMDKDFDKLHGICGNYEGNAERYG

SEQ ID NO: 3829 - protein, 82 aa, Homo sapiens
GTRTGGGCSVARLHHCTPVWATRGKLHLKKKRNSFIFYFSSDLSYAFSNYVCITAILFLSYSYSFLTVVFMPFHFTWYFVGF

SEQ ID NO: 3830 - protein, 91 aa, Homo sapiens
  SITE (42): Xaa equals any of the naturally occurring L-amino acids
  SITE (58): Xaa equals any of the naturally occurring L-amino acids
GRENPGIYPVVPRKTPPAELASAADLRKRQCHTQEQEEHPLXSACKLPATILNGKRSXSLPGNISTYRAFTWELGFRTLAFSFALFSFFIP

SEQ ID NO: 3831 - protein, 129 aa, Homo sapiens
  SITE (34): Xaa equals any of the naturally occurring L-amino acids
  SITE (92): Xaa equals any of the naturally occurring L-amino acids
  SITE (113): Xaa equals any of the naturally occurring L-amino acids
RQTARMMRTRGMMMHNEDNSCLPVPLFNQKKRNXQPLTSNPLKDDSGISTPSDNYDFPPLPTDWAWEAVNPELAPVMKTVDTGQIPHSVSRXLRSQDSVFNSIQSNTGRSQVXGATEMVQKYHLKLGIK

SEQ ID NO: 3832 - protein, 115 aa, Homo sapiens
  SITE (39): Xaa equals any of the naturally occurring L-amino acids
HERHPSLRPARTGIGRHFKLWLGLTHRPPPGSQVFYDFXWHRWKGHLCPPSSGTCLDTIVCFAIAPYALCDTHSQHLLLNTPVPRVVTLALLWICPFPVCTCPALLPEGGKSKRR

SEQ ID NO: 3833 - protein, 61 aa, Homo sapiens
  SITE (40): Xaa equals any of the naturally occurring L-amino acids
  SITE (57): Xaa equals any of the naturally occurring L-amino acids
KEGGQLTEGPQPFLSSQAGTSGLMKQFQEGKGSRMRETEXSNGQALGEPREGPHFPXIFQG

SEQ ID NO: 3834 - protein, 66 aa, Homo sapiens
  SITE (52): Xaa equals any of the naturally occurring L-amino acids
  SITE (62): Xaa equals any of the naturally occurring L-amino acids
KKYRVMYSLGISSPNLSLYQQAVSVELIRSSGITLAVLSSEKVIKTVWLVQXQLHNHRQEGXPQAS

SEQ ID NO: 3835 - protein, 84 aa, Homo sapiens
  SITE (49): Xaa equals any of the naturally occurring L-amino acids
NAMPTICFGFQCHVSSVPVFNSMQQPEVKTWGGVVTAAMVIALAVYMGXGICGFLTFGAAVDPDVLLSYPSEDMAVALPEPSSS

SEQ ID NO: 3836 - protein, 59 aa, Homo sapiens
  SITE (26): Xaa equals any of the naturally occurring L-amino acids
  SITE (43): Xaa equals any of the naturally occurring L-amino acids
  SITE (56): Xaa equals any of the naturally occurring L-amino acids
PGSWVISGNSNLLILTTLTVPYNPSXTPHRKIKPSGTGQKNWXQPGFKHCFGIVPXYLG

SEQ ID NO: 3837 - protein, 77 aa, Homo sapiens
  SITE (29): Xaa equals any of the naturally occurring L-amino acids
KMKSRGDWHWVRLCRALEAMVRTLNYIKXKKREAVEDFEQESHDLIYILRYKHIKYRFKIHKFLIIITSYLITIRGC

SEQ ID NO: 3838 - protein, 144 aa, Homo sapiens
  SITE (136): Xaa equals any of the naturally occurring L-amino acids
GWVLGLRLSVNTAGTTPVGVQMERHTSHPNRKVPAKEEANAVPLCRAKPSPSYINLQASSPPATFLNIQTTKLPSVKPKECLGLLECMYANLQLQTQLAQQQMAVLEHLQASVTQLAPGRGSNNSSLPALSPNPLXNHLPQFSK

SEQ ID NO: 3839 - protein, 53 aa, Homo sapiens
  SITE (30): Xaa equals any of the naturally occurring L-amino acids
  SITE (31): Xaa equals any of the naturally occurring L-amino acids
  SITE (53): Xaa equals any of the naturally occurring L-amino acids
PGVHLFEGNGAVHVEEDGNKGKLQDKESKXXDSSRGSHFRSFRFSNALISRVX

SEQ ID NO: 3840 - protein, 81 aa, Homo sapiens
  SITE (35): Xaa equals any of the naturally occurring L-amino acids
  SITE (75): Xaa equals any of the naturally occurring L-amino acids
SDLYRSLVKLLSSLQLFLLWSVCLPSCQLEKKLQXDTRQRLYNSILVLALGAWKVKSSQTTLFEPTLWLELHYKXCKDILL

SEQ ID NO: 3841 - protein, 113 aa, Homo sapiens
  SITE (102): Xaa equals any of the naturally occurring L-amino acids
  SITE (108): Xaa equals any of the naturally occurring L-amino acids
  SITE (109): Xaa equals any of the naturally occurring L-amino acids
KLHSDLERHPTPRLPFVDVATGSLGQGLGTACGMAYTGKYLDKASYRVFCLMGDGESSEGSVWEAFAFALPLQLGTISWRSSTWNRLGTKWALAPLEHGRRXLPELLXXLWVG

SEQ ID NO: 3842 - protein, 237 aa, Homo sapiens
  SITE (195): Xaa equals any of the naturally occurring L-amino acids
AEWRRWCWRWPWRTAPSDGWRLPPGCLPGTDGVVPRPPAARSAAARPRETPGHTQLPPGARRRPRLESEMAFNDCFSLNYPGNPCPGDLIEVFRPGYQHWALYLGDGYVINIAPVDGIPASFTSAKSVFSSKALVKMQLLKDVVGNDTYRINNKYDETYPPLPVEEIIKRSEFVIGQEVAYNLLVNNCEHFVTLXRYGEGVSEQANRAISTVEFVTAAVGVFSFLGLFPKGQRAKYY

SEQ ID NO: 3843 - protein, 77 aa, Homo sapiens
GRGQVNYNSQRVARLRDDHRSASKELVQNCTSKPRFSALHYLIQLREVNLRTRGRDRLTFSGRQSASTRATAIFAAC

SEQ ID NO: 3844 - protein, 100 aa, Homo sapiens
  SITE (4): Xaa equals any of the naturally occurring L-amino acids
  SITE (7): Xaa equals any of the naturally occurring L-amino acids
  SITE (8): Xaa equals any of the naturally occurring L-amino acids
  SITE (23): Xaa equals any of the naturally occurring L-amino acids
ARKXIIXXRHIWTSRNGILQQTXNQLHDGLRQSVVQSGRSEAGVDRISSQVVDPKLNHIFRPQIEQIIHEFLVAQKEAAVPALPPEPEGQDPPAPSQDTS

SEQ ID NO: 3845 - protein, 95 aa, Homo sapiens
  SITE (50): Xaa equals any of the naturally occurring L-amino acids
  SITE (73): Xaa equals any of the naturally occurring L-amino acids
  SITE (81): Xaa equals any of the naturally occurring L-amino acids
EADCMERLQLQRRLGCRTFHWFLANVYPSCTHLNPGPVSLGKLHNTGLGXCADCQAGRGTSWGCSPWCWFLAXTAGSNSTXSTTAGGRFHFGSPQ

SEQ ID NO: 3846 - protein, 117 aa, Homo sapiens
  SITE (43): Xaa equals any of the naturally occurring L-amino acids
  SITE (51): Xaa equals any of the naturally occurring L-amino acids
  SITE (72): Xaa equals any of the naturally occurring L-amino acids
  SITE (100): Xaa equals any of the naturally occurring L-amino acids
  SITE (115): Xaa equals any of the naturally occurring L-amino acids
  SITE (116): Xaa equals any of the naturally occurring L-amino acids
GCFCSQVVRTFLTARVPMECFTPTRIKTQVMKHTQPLKARPGXDQLAGCQXPSRDPRRSDKLARHKCINEVXSLECGLGLRTSTPWLVRVQCRSRMMVSXVEHQVAGPQKHLPSXXR

SEQ ID NO: 3847 - protein, 75 aa, Homo sapiens
  SITE (2): Xaa equals any of the naturally occurring L-amino acids
  SITE (55): Xaa equals any of the naturally occurring L-amino acids
AXGTSRAPWGRAPVQQRQRRGTGGCILQITEGTQADSYPSVSSFLWHSPHRQHFXDKAGHFPHHLLAEAVAHEED

SEQ ID NO: 3848 - protein, 53 aa, Homo sapiens
FPWEHPAYPHLWCVLFRGLDSLGIFLRHEVWFRIRGEHFAVPGQPKTSIAEFI

SEQ ID NO: 3849 - protein, 118 aa, Homo sapiens
  SITE (61): Xaa equals any of the naturally occurring L-amino acids
  SITE (79): Xaa equals any of the naturally occurring L-amino acids
  SITE (103): Xaa equals any of the naturally occurring L-amino acids
  SITE (118): Xaa equals any of the naturally occurring L-amino acids
ARGNICPTCRKPGGGHDSAPLRSVTSQIPCVCPRKTSSPKWPRPVKETLREILSQWTLQNXLSSSRGGVSCLGQNLDSXPKSIAWQPTCSLEVSLDGARVFLXPEGWESLVATAVGRX

SEQ ID NO: 3850 - protein, 91 aa, Homo sapiens
  SITE (74): Xaa equals any of the naturally occurring L-amino acids
RNGFTFTERSNGEPFEKMTLAQLKEAEDEFDEEDMQAVETYRKKRLQEWKALKKKQKFGELREISGNQYVNEVXNAEEDVWVIIHLYRSRT

SEQ ID NO: 3851 - protein, 81 aa, Homo sapiens
  SITE (14): Xaa equals any of the naturally occurring L-amino acids
  SITE (56): Xaa equals any of the naturally occurring L-amino acids
  SITE (61): Xaa equals any of the naturally occurring L-amino acids
  SITE (72): Xaa equals any of the naturally occurring L-amino acids
  SITE (75): Xaa equals any of the naturally occurring L-amino acids
  SITE (80): Xaa equals any of the naturally occurring L-amino acids
VLGDLPERSRRKGXKLYLNSFQSLKEQNQNCLNKYPGWREKLEAVGPQGSHGGPYXKMVLXERPWHPELQVXVKXFPGQXL

SEQ ID NO: 3852 - protein, 78 aa, Homo sapiens
  SITE (10): Xaa equals any of the naturally occurring L-amino acids
  SITE (68): Xaa equals any of the naturally occurring L-amino acids
  SITE (70): Xaa equals any of the naturally occurring L-amino acids
NSVPSQIGPXSSLPLLPSDILNSSSECLSPALESSVDFGNFKSGTPLQFGLTGSRFELEFHDHNFKAXQXSRGCFVGF

SEQ ID NO: 3853 - protein, 54 aa, Homo sapiens
  SITE (17): Xaa equals any of the naturally occurring L-amino acids
  SITE (21): Xaa equals any of the naturally occurring L-amino acids
  SITE (36): Xaa equals any of the naturally occurring L-amino acids
  SITE (39): Xaa equals any of the naturally occurring L-amino acids
  SITE (49): Xaa equals any of the naturally occurring L-amino acids
CTPTALLGVISSSPFLXIREXYHTVRVTPVGEFHGXFIXFLCGYGRNNXQGGCT

SEQ ID NO: 3854 - protein, 89 aa, Homo sapiens
  SITE (69): Xaa equals any of the naturally occurring L-amino acids
  SITE (87): Xaa equals any of the naturally occurring L-amino acids
QSNMGMNGIWKKTLKRFICDFKGFAKDEEIAKINMAVVGMASNFNHGVDKDDIDEHLEVVPEELYLMRXCWELGTEHIAEEQARERXNS

SEQ ID NO: 3855 - protein, 46 aa, Homo sapiens
  SITE (37): Xaa equals any of the naturally occurring L-amino acids
  SITE (44): Xaa equals any of the naturally occurring L-amino acids
GCESQHFASIHLHWCWRKKREMELFPTLGQQRSRMRXQEEVVLXTA

SEQ ID NO: 3856 - protein, 74 aa, Homo sapiens
  SITE (6): Xaa equals any of the naturally occurring L-amino acids
  SITE (53): Xaa equals any of the naturally occurring L-amino acids
  SITE (55): Xaa equals any of the naturally occurring L-amino acids
  SITE (57): Xaa equals any of the naturally occurring L-amino acids
KDTAQXFNKERKASKKGFLWPKESILPTVIGLENDHSPLPSKTQAGQQQDLLXRXKXNKSFRNRGRGPRAGLAS

SEQ ID NO: 3857 - protein, 106 aa, Homo sapiens
  SITE (10): Xaa equals any of the naturally occurring L-amino acids
STIDEYVHRXGRTGRCGNTGRAISFFDLESDNHLAQPLVKVLTDAQQDVPAWLEEIAFSTYIPGFSGSTRGNVFASVDTRKGKSTLNTAGFSSSQAPNPVDDESWD

SEQ ID NO: 3858 - protein, 141 aa, Homo sapiens
  SITE (37): Xaa equals any of the naturally occurring L-amino acids
  SITE (107): Xaa equals any of the naturally occurring L-amino acids
  SITE (122): Xaa equals any of the naturally occurring L-amino acids
  SITE (128): Xaa equals any of the naturally occurring L-amino acids
  SITE (138): Xaa equals any of the naturally occurring L-amino acids
LASSIMSAKRAELKKTHLSKNYKAVCLELKPEPTKVXSPFEAMQAARPEIHGEVTRSQGSFADPSGQDLSQTFDYKAVKQEGRFTKAGVTQDLKIELRGSERRAQGXNGRRLKQLKVLLDKXFVNFTXFWNFGGSFGXELA

SEQ ID NO: 3859 - protein, 174 aa, Homo sapiens
  SITE (49): Xaa equals any of the naturally occurring L-amino acids
  SITE (50): Xaa equals any of the naturally occurring L-amino acids
  SITE (51): Xaa equals any of the naturally occurring L-amino acids
  SITE (170): Xaa equals any of the naturally occurring L-amino acids
HHLLDACGELSGARQSPQARWAEENLPSDRRDLCLPPERGRDPVPDELXXXSEEDALYSNGLEPKENEPPSPLVSGIIDYNMPLTSTYLKQMKLRVMNSQEQDETSVSSEDFDMSDSTWMSADPHLAFSLSPARTRGCGARRTSQSRGRCCVEVESLSILVRWLFHKLGXYHPQ

SEQ ID NO: 3860 - protein, 66 aa, Homo sapiens
  SITE (15): Xaa equals any of the naturally occurring L-amino acids
EGAAKQLGTWTLKSXTVTCSQPHDLGKAPSHSQLEGGYRGHRGTALTGDVGGMGTQEVSCYQSLIP

SEQ ID NO: 3861 - protein, 79 aa, Homo sapiens
  SITE (47): Xaa equals any of the naturally occurring L-amino acids
CILLASKDYDACILTRTSPLFFLFRSGHRYQRMAHHYQEFVDLVQWXCKAEFSGIGIKGLGSRSFKGGKQHEKTLWRQL

SEQ ID NO: 3862 - protein, 81 aa, Homo sapiens
GRSEDKKPLEAGVWCWDRGGWDGSSRAVHLLFRGVAHPSLYLFPREDPPRLLFPRLSLLVCEQFWCYSATLLLAPLPASTC

SEQ ID NO: 3863 - protein, 60 aa, Homo sapiens
RKGAILTVQRQQLPPVTQAEKEPASSYLLLVAFLAPTPSLFLFSPGPLPLKPFYDLSCAT

SEQ ID NO: 3864 - protein, 102 aa, Homo sapiens
  SITE (76): Xaa equals any of the naturally occurring L-amino acids
TQERGTRPWQGEVEPDRLLSAAPRDSSRAREKRQHGSKGQGAEGVELVKLMSTVICMKQRDEEFLLTIRPFANRMXKSPCYIPIVSSATLWDRSTPMQRSSY

SEQ ID NO: 3865 - protein, 42 aa, Homo sapiens
  SITE (36): Xaa equals any of the naturally occurring L-amino acids
  SITE (37): Xaa equals any of the naturally occurring L-amino acids
GRGQSLSGLQSLHSLLLIHDLSKLQICQGSTKRSVXXRTLEL

SEQ ID NO: 3866 - protein, 62 aa, Homo sapiens
  SITE (40): Xaa equals any of the naturally occurring L-amino acids
  SITE (54): Xaa equals any of the naturally occurring L-amino acids
WRKITEHGFLLRTQSPKANHTPLTSISWEIGKWTFGNAGXTWGNAIISRFILWXPGQFGFLA

SEQ ID NO: 3867 - protein, 139 aa, Homo sapiens
  SITE (23): Xaa equals any of the naturally occurring L-amino acids
  SITE (133): Xaa equals any of the naturally occurring L-amino acids
HQVESHCWKLSGIPRDWQGIRAXVPVESGVPQPPDPPVQRDEEEEKEVENEDEDDDDSDKEKDEEDEVIDELFLKAPVNTAELTDLLIQQNHIGSVIKGTQCVEQIQELVLRFCEKNCEKSMVEQLDKFLNDXTKPVGL

SEQ ID NO: 3868 - protein, 57 aa, Homo sapiens
  SITE (56): Xaa equals any of the naturally occurring L-amino acids
VFRTSAIKMGRIFLDHIGGTRLFSCANCDTILTNRSELISTRFTGATGRAFLFNKXR

SEQ ID NO: 3869 - protein, 178 aa, Homo sapiens
  SITE (21): Xaa equals any of the naturally occurring L-amino acids
  SITE (105): Xaa equals any of the naturally occurring L-amino acids
  SITE (109): Xaa equals any of the naturally occurring L-amino acids
  SITE (112): Xaa equals any of the naturally occurring L-amino acids
  SITE (114): Xaa equals any of the naturally occurring L-amino acids
  SITE (119): Xaa equals any of the naturally occurring L-amino acids
  SITE (173): Xaa equals any of the naturally occurring L-amino acids
LCPSSPAVLDFQKKQPDDDSXPSTSNSQSDLFSEETTSDNNNTSITTATLSPSQQPLPTELNVTSPSKEECGPCTDTAHVSLITPTKRSCGTDSQSENEASPVKXHDYXRIXNXLRKPXDLNRRVDVGASSAKPNWSWCSRNWDPAAAVMCSVCYIAFPEQHDCYVSTTWAAXERKPS

SEQ ID NO: 3870 - protein, 64 aa, Homo sapiens
  SITE (64): Xaa equals any of the naturally occurring L-amino acids
HEQPLFRERPLRTHSRPFLTSMESLALRERAKKQINKQQTNKKKTKFQMAPGPSRRCRAHTGQX

SEQ ID NO: 3871 - protein, 150 aa, Homo sapiens
  SITE (32): Xaa equals any of the naturally occurring L-amino acids
  SITE (72): Xaa equals any of the naturally occurring L-amino acids
  SITE (110): Xaa equals any of the naturally occurring L-amino acids
  SITE (134): Xaa equals any of the naturally occurring L-amino acids
  SITE (136): Xaa equals any of the naturally occurring L-amino acids
  SITE (137): Xaa equals any of the naturally occurring L-amino acids
  SITE (138): Xaa equals any of the naturally occurring L-amino acids
  SITE (141): Xaa equals any of the naturally occurring L-amino acids
  SITE (146): Xaa equals any of the naturally occurring L-amino acids
  SITE (147): Xaa equals any of the naturally occurring L-amino acids
GTSRAPQLLRAFEPRWSSETRGGGEGESRLSXSRSRGFMRWPWKQPGRLPSLLVPSPERKVERPAGDQGRTXSPGLVNSWAPRSPGILEHAYLSQREGHGPCRARDPIFXSRREQRREHSHPHQPEFKPWTVPXEXXXPRXQLFPXXPLE

SEQ ID NO: 3872 - protein, 73 aa, Homo sapiens
KNVRGSLHKSVLITDGKTCPLEEHRTHSSCLCLEGAAWSCLKPPMSCSGGQNRASRGLSLSPHQVPDSLGSLE

SEQ ID NO: 3873 - protein, 105 aa, Homo sapiens
  SITE (38): Xaa equals any of the naturally occurring L-amino acids
  SITE (79): Xaa equals any of the naturally occurring L-amino acids
  SITE (102): Xaa equals any of the naturally occurring L-amino acids
DGLIRRLFRCGCQQYQTFPYNLATLFQQSPRLVTCHAXFLESVTMDSVQVWLLSSSEARTWKLGPMETTWARGRGKGPXFPKRKRPFFWKPKGTMVLGANMXFQG

SEQ ID NO: 3874 - protein, 129 aa, Homo sapiens
  SITE (122): Xaa equals any of the naturally occurring L-amino acids
AEAPQSHRPGTKAQLYGFPTGGPALPWDPLLYWINKRRRYGMNAAINTGPAPAVTKTETEVQNPDVLWDLDIPEGRSHADQDSNPKAEAPAPLQPALQLAPQQPQARSPFPLPIFQEVPLPXPCELPPC

SEQ ID NO: 3875 - protein, 146 aa, Homo sapiens
  SITE (115): Xaa equals any of the naturally occurring L-amino acids
  SITE (125): Xaa equals any of the naturally occurring L-amino acids
  SITE (126): Xaa equals any of the naturally occurring L-amino acids
DLLIPVLSPTQERCLWRWWWSCRSGRFLAQECSCLANKMCTSGSTSWNQYLETNSFPSAFPIMIQESMRFEKVFESAVDPGAVVDLLESFLARFELIQLVPPCGMSWPTYGGKHXRFSFPRAQAXXLRTLGGVREVFMKTVLGFPG

SEQ ID NO: 3876 - protein, 84 aa, Homo sapiens
  SITE (37): Xaa equals any of the naturally occurring L-amino acids
  SITE (53): Xaa equals any of the naturally occurring L-amino acids
  SITE (65): Xaa equals any of the naturally occurring L-amino acids
  SITE (82): Xaa equals any of the naturally occurring L-amino acids
GTRSINSQRAGIPALCRTLWLLVEDNHPYRWKMLEYXFSLQVCLSLGARQCLXVPLGPWTTMRRXCSPHKCSFSKVKGQEGXGQ

SEQ ID NO: 3877 - protein, 40 aa, Homo sapiens
  SITE (40): Xaa equals any of the naturally occurring L-amino acids
AEGPRTPAAGFHRDSSSRDPPSRAVLSRLVSSECNLRISX

SEQ ID NO: 3878 - protein, 109 aa, Homo sapiens
  SITE (53): Xaa equals any of the naturally occurring L-amino acids
  SITE (63): Xaa equals any of the naturally occurring L-amino acids
  SITE (76): Xaa equals any of the naturally occurring L-amino acids
  SITE (78): Xaa equals any of the naturally occurring L-amino acids
  SITE (101): Xaa equals any of the naturally occurring L-amino acids
  SITE (102): Xaa equals any of the naturally occurring L-amino acids
  SITE (107): Xaa equals any of the naturally occurring L-amino acids
RKSKTVEWSDGPHLALPVSGTQCWLFLARGAPRPALGLALGWRHQVTCPPVKXGSFTAPRRIXLKNVGQGLHRWFXKXSPQIRSISTVLRIIRKCTFLGPXXRQFWXLG

SEQ ID NO: 3879 - protein, 97 aa, Homo sapiens
  SITE (23): Xaa equals any of the naturally occurring L-amino acids
  SITE (39): Xaa equals any of the naturally occurring L-amino acids
  SITE (91): Xaa equals any of the naturally occurring L-amino acids
GTRKPWRALSSPSTRKNPRSFAXTQSSCTSPPGKGSFRXCSSCWWTELTPTSKWSTRISALHCTPRQRLDTWTSATCWFSSAGWEAQGRGXAFGDLW

SEQ ID NO: 3880 - protein, 64 aa, Homo sapiens
QLHALSRAQSGSRGLTVSGIERLVINTPPSLFSVTWGQKRKPAEHDCWPTCQSSQGNRMPAKAC

SEQ ID NO: 3881 - protein, 71 aa, Homo sapiens
CLKNHCFMHLYASLLFQAVGCTLPCYARETINKSGSKINLMVITGKIECSSNPQESRKKRMSRMRNRKQKT

SEQ ID NO: 3882 - protein, 97 aa, Homo sapiens
AYPPLTSPPAQDVRKHCKDFFPSYPSPHIPPWLLLYPTPMLSQVGVRETSFSAGSSVATAKAHPFPKVRKVSGLLLGSTLTSRVTEAGAQFLPHSSP

SEQ ID NO: 3883 - protein, 103 aa, Homo sapiens
  SITE (66): Xaa equals any of the naturally occurring L-amino acids
  SITE (97): Xaa equals any of the naturally occurring L-amino acids
  SITE (103): Xaa equals any of the naturally occurring L-amino acids
VLPYQGDLQGIASNTISQEELKRLQNPLEQVNDGKYSFENHQLAMDAENNIEKYPLNLQPLESKVXIIQRAWRELPAAARPLGEEEPVPTLCLLREXEQLLSX

SEQ ID NO: 3884 - protein, 198 aa, Homo sapiens
FPPHRPPQPEPSGPRPRIGTQEAQAPSSGGEWEPLGSPFTVQDLSCTLALTPCFPGLSMAGYQLWSPWTPLDESFQWLRHTTPTPSSKHPFKASPCFPHTPSDLEVQLCFQEVTLVLDSPFLESGVSPKLPCHTSELRTMNNKGLVRKPQPIRLSGVDSVFGRVITAQPPKWTGTFRSFRQVKPFAKSLAGSTSGPLD

SEQ ID NO: 3885 - protein, 55 aa, Homo sapiens
NEVFHNIWEDLQGILHLGKNNCQGIVIVKSSLYCNPQIIPLCRSRKSFNLPRDYV

SEQ ID NO: 3886 - protein, 69 aa, Homo sapiens
IVYSVYILSWSWHMVSCESEAPPLPWLPRPYSGADRMENANEPRNSGTEKLSNLLKITQSLSGKTGNGT

SEQ ID NO: 3887 - protein, 97 aa, Homo sapiens
  SITE (73): Xaa equals any of the naturally occurring L-amino acids
  SITE (80): Xaa equals any of the naturally occurring L-amino acids
GRAELVVSSVDEVKKESLENYARASHCLSPQVTHLFPSQPTLAGTNHIALPNCKGGQKVQHFLMVTGEHETSXQIWVGKXKRLVQKKTVSREKYIWE

SEQ ID NO: 3888 - protein, 114 aa, Homo sapiens
  SITE (1): Xaa equals any of the naturally occurring L-amino acids
  SITE (88): Xaa equals any of the naturally occurring L-amino acids
XAARAPARSPAWASTQASTPGAALAVQRESPESGLQKHYSNLCMEKSQKINPFILHILQEVDEEIKKGLAAGITLNIAGNNRLVPVEXVTGEDFWILSKILKNCLYINGFGCWI

SEQ ID NO: 3889 - protein, 142 aa, Homo sapiens
  SITE (77): Xaa equals any of the naturally occurring L-amino acids
  SITE (118): Xaa equals any of the naturally occurring L-amino acids
  SITE (122): Xaa equals any of the naturally occurring L-amino acids
VMETSSKGLLTQVTQFWNLLDDLAQSDPEGYEKFIQQQLKEGKQLCAAPEPQLCLQTRILKPKEKILFINLCQWTRXPAPQSTTHPVPLTVGKPEDTTEISDAYTVIDVAYNPDVLHXAEKXQVKKNQLIQMAMKCIGGNSS

SEQ ID NO: 3890 - protein, 82 aa, Homo sapiens
  SITE (68): Xaa equals any of the naturally occurring L-amino acids
RADAYLPPNRGDTQSQMYRPSTQRTKEDNCPGCPSCNHHGQTGTEFRTVRFYLARFTRHFSTDNLSTXACMSRCWRRKAPML

SEQ ID NO: 3891 - protein, 88 aa, Homo sapiens
  SITE (72): Xaa equals any of the naturally occurring L-amino acids
  SITE (88): Xaa equals any of the naturally occurring L-amino acids
HSSCSQFVLLCDTTSITRTASSSSSVIKFSLLDKCKKPENCAQPEVLCRPFEMLSNLHELLPNHLMETLYSXKSEEDKKKCENLNSLX

SEQ ID NO: 3892 - protein, 83 aa, Homo sapiens
  SITE (43): Xaa equals any of the naturally occurring L-amino acids
  SITE (50): Xaa equals any of the naturally occurring L-amino acids
  SITE (57): Xaa equals any of the naturally occurring L-amino acids
  SITE (65): Xaa equals any of the naturally occurring L-amino acids
TVLCLSRPHFPQGTLRNLATGNVATFSCAAVFLLHSFHSSLLXFFSLSPXHKTRNFXILLIFLYXVCLHTDGYLRASELSLPP

SEQ ID NO: 3893 - protein, 45 aa, Homo sapiens
  SITE (32): Xaa equals any of the naturally occurring L-amino acids
EPYVPWLSEAEPFSRASGMPGLFIGVLALWEXLEDMGSRIGKKRN

SEQ ID NO: 3894 - protein, 74 aa, Homo sapiens
  SITE (69): Xaa equals any of the naturally occurring L-amino acids
ATTVGLSGAGDALGGSPCHAACLAPTGPCSMAAASSLSGHLPADAVPKVWLPQRAPLIQPFKLTKQSLXNGKKK

SEQ ID NO: 3895 - protein, 60 aa, Homo sapiens
  SITE (37): Xaa equals any of the naturally occurring L-amino acids
  SITE (59): Xaa equals any of the naturally occurring L-amino acids
HSFVTLRYTYQLTIDKRALNQTWIQIRLGLKICKAWXNLLMSNQGLTVSEWLSLALTTXP

SEQ ID NO: 3896 - protein, 46 aa, Homo sapiens
  SITE (17): Xaa equals any of the naturally occurring L-amino acids
  SITE (35): Xaa equals any of the naturally occurring L-amino acids
  SITE (38): Xaa equals any of the naturally occurring L-amino acids
  SITE (39): Xaa equals any of the naturally occurring L-amino acids
NDIRCPSCMAVYLELMXDLLQLAVTSLPELMEGVXVPXXFQVLLLM

SEQ ID NO: 3897 - protein, 189 aa, Homo sapiens
QSPAPLSDPLSRGRCQMSTMGNEASYPAEMCSHFDNDEIKRLGRRFKKLDLDKSGSLSVEEFMSLPELRHNPLVRRVIDVFDTDGDGEVDFKEFILGTSQFSVKGDEEQKLRFAFSIYDMDKDGYISNGELFQVLKMMVGNNLTDWQLQQLVDKTIIILDKDGDGKISFEEFSAVVRDLEIHKKLVLIV

SEQ ID NO: 3898 - protein, 78 aa, Homo sapiens
  SITE (63): Xaa equals any of the naturally occurring L-amino acids
  SITE (71): Xaa equals any of the naturally occurring L-amino acids
VQPPRPCVWHHLAAVEGGTECFSASTDGQVMWWDIRKMSEPTEVVILDITKKEQLENALGAIXLGVRIYLXTKFMVGD

SEQ ID NO: 3899 - protein, 78 aa, Homo sapiens
SPHGTGISSRHNSSCPSHSMMQAEVAVPRCGHWALLVRTGQLGPDLQLTQPQDCHLAAQEPTEIIKTTSFITCLNLNP

SEQ ID NO: 3900 - protein, 59 aa, Homo sapiens
QCWHLSLLPCLCRVPPPRLPPSLHILLKITQSIVSPWSCYSCFLKGHEEGEKENRRAEL

SEQ ID NO: 3901 - protein, 86 aa, Homo sapiens
CLIHVKKGGQEPSCVQMVETVTTMAGQCREKHFMVTEPNPAGNSCDGEALEHFVSTVSVDGKAKVSARLLLEALNPLPGLTSQTLK

SEQ ID NO: 3902 - protein, 50 aa, Homo sapiens
  SITE (12): Xaa equals any of the naturally occurring L-amino acids
  SITE (33): Xaa equals any of the naturally occurring L-amino acids
CLKFLEPATHTXFLESEHWKGFLGREKSDLHSXRGVKLRMAGSLLRTGFN

SEQ ID NO: 3903 - protein, 64 aa, Homo sapiens
  SITE (57): Xaa equals any of the naturally occurring L-amino acids
SSLIGTPGEKLSCDHLNLALYSFPRCICLVSPFIWPFFLCRFSYGVSAEVYPCPAPXMLLGLYS

SEQ ID NO: 3904 - protein, 61 aa, Homo sapiens
  SITE (53): Xaa equals any of the naturally occurring L-amino acids
  SITE (58): Xaa equals any of the naturally occurring L-amino acids
RAFTSINTIRENTTSPNELNKAPGTNPGDTEICELSVRGLKIVVLRKFIEIQXNIEKXFIR

SEQ ID NO: 3905 - protein, 49 aa, Homo sapiens
LHFLLNYKIRRNQKSISINAHQHSGSLTSICIICSTFPPVIRDPLCPTE

SEQ ID NO: 3906 - protein, 124 aa, Homo sapiens
  SITE (60): Xaa equals any of the naturally occurring L-amino acids
TGAPGCPAGTGLGMPACPLKGCVQWPILTTQAISVVHSQCLVTPPSGTNAILGNSSSMKXHKPGWLLSRGAGGGARQQAKGACCTPSLHGHTESCSQLLGLGSPIPGGQLGLAAESFSHSMGPG

SEQ ID NO: 3907 - protein, 63 aa, Homo sapiens
  SITE (26): Xaa equals any of the naturally occurring L-amino acids
RCQSTSSLPTEGSNYYYLLDSYKNLXTEVKCSANTTSQWWFSCQNQVLAFQWTPLISQDDSLS

SEQ ID NO: 3908 - protein, 94 aa, Homo sapiens
  SITE (6): Xaa equals any of the naturally occurring L-amino acids
MGGLCXSPFLPLQDPCRTGGSPGQGIILTYTAGLVARPLIVLLTGDNSLPHQLKGRRAFKGTSLFKSINGKGSWRLSTCSFPQLPPLLLQCHLK

SEQ ID NO: 3909 - protein, 72 aa, Homo sapiens
  SITE (14): Xaa equals any of the naturally occurring L-amino acids
  SITE (20): Xaa equals any of the naturally occurring L-amino acids
  SITE (31): Xaa equals any of the naturally occurring L-amino acids
  SITE (55): Xaa equals any of the naturally occurring L-amino acids
  SITE (62): Xaa equals any of the naturally occurring L-amino acids
MPTMSHSAREAPSXLKVCSXSEVFTLSFHPXGPLPFMKQSLNILFLTDDHLLNFXQMCASVXLFSVVLENTE

SEQ ID NO: 3910 - protein, 59 aa, Homo sapiens
  SITE (51): Xaa equals any of the naturally occurring L-amino acids
APPGQQDLSFMRVMGLSVLSSLILSGLMDDGHRNVSEGMDCFTWEVPLIMXMMKSLWPG

SEQ ID NO: 3911 - protein, 106 aa, Homo sapiens
GETGLIFTAPFPSCNPVLRQKRVPVSHINFSPDFCSGERPLYNARYSHASMAAPGSYLGHLTTQPPHGIVHLLAWPSSSSPCPATLPLRGLCWEPWQLNRVLCSTV

SEQ ID NO: 3912 - protein, 35 aa, Homo sapiens
VDPKAQPGDNSTRITILTELYIQAVIFDHISRRKT

SEQ ID NO: 3913 - protein, 64 aa, Homo sapiens
  SITE (22): Xaa equals any of the naturally occurring L-amino acids
  SITE (23): Xaa equals any of the naturally occurring L-amino acids
  SITE (25): Xaa equals any of the naturally occurring L-amino acids
SGSSVEFFQTKEQPEKSSCRHXXGXLHRGACLRHAHSSTDKKAYTGDLPRHAHNGKVHLLTNVQ

SEQ ID NO: 3914 - protein, 56 aa, Homo sapiens
  SITE (35): Xaa equals any of the naturally occurring L-amino acids
APELIQCQVCHVTFFKANYKAKSGIEEDGETNSTXWCRSGNIMVTLGDTIHWRALP

SEQ ID NO: 3915 - protein, 79 aa, Homo sapiens
  SITE (72): Xaa equals any of the naturally occurring L-amino acids
GTGISQCLDGTFFEAYIFTECPSSLFPILPCFFLFPLHPLWICTNNAGFFSSPTCSSCCWIITIPSIGFKIXFSQIPYT

SEQ ID NO: 3916 - protein, 92 aa, Homo sapiens
NEDDDIQQLMGPCRSPSIFHLSISPPFPDNREATRTQGMQWGSTSTLCHNFIMIPPKSRAPGASRGQGGHFWTGFIHNKIKISNPYVSGAIC

SEQ ID NO: 3917 - protein, 149 aa, Homo sapiens
  SITE (126): Xaa equals any of the naturally occurring L-amino acids
  SITE (140): Xaa equals any of the naturally occurring L-amino acids
RNGGAIEFAQLMVKAASAAARGFPLRTLNDWFSSMGIYVITGEGNMCTPQMPCSVIVYGAPPAGYGAPPPGYGAPPAGYGAQPVGNEGPPVGYRASPVRYGAPPLGYGAPPAGYGAPPLGYGAPTXWIWNPTSRIWSPTXRIWSPTCRK

SEQ ID NO: 3918 - protein, 77 aa, Homo sapiens
  SITE (62): Xaa equals any of the naturally occurring L-amino acids
ARLTGVGGGDGGCSLASMVERWQGTSGFYHPVASSQEMEESSVARWRLDLQMAWFWAHLAAXGGRNRDCSLTRVVEP

SEQ ID NO: 3919 - protein, 81 aa, Homo sapiens
RSLHLFVLLCVGIERYSFLEEVISLFAFFPPSYEEAGCALFFSFIVILTGSTYLMKQRLKKLGLRTSVQACLFSGELPVPL

SEQ ID NO: 3920 - protein, 38 aa, Homo sapiens
  SITE (14): Xaa equals any of the naturally occurring L-amino acids
  SITE (23): Xaa equals any of the naturally occurring L-amino acids
QFFSIFTISCCVAXTGSFDSLSXYLEYSATLGMIFNIT

SEQ ID NO: 3921 - protein, 85 aa, Homo sapiens
  SITE (32): Xaa equals any of the naturally occurring L-amino acids
  SITE (39): Xaa equals any of the naturally occurring L-amino acids
  SITE (54): Xaa equals any of the naturally occurring L-amino acids
  SITE (59): Xaa equals any of the naturally occurring L-amino acids
  SITE (60): Xaa equals any of the naturally occurring L-amino acids
ALSSVKTRCFLPSPLHSSLLCSQEVAPRSPLXLCHLGQXRPCEIPGSIAGHKDXLRNGXXSPSRLESLYFKYRYINYAVKDIKSH

SEQ ID NO: 3922 - protein, 90 aa, Homo sapiens
VAWGNLLRSCSTSPWIQILLLSSISTLSTHPSVSNFIAGSITRWTAVVLQCLCSSNPSFTSSWPQSTRVVMLTIWIYQREAVKCFLSVKK

SEQ ID NO: 3923 - protein, 76 aa, Homo sapiens
  SITE (30): Xaa equals any of the naturally occurring L-amino acids
  SITE (73): Xaa equals any of the naturally occurring L-amino acids
  SITE (76): Xaa equals any of the naturally occurring L-amino acids
EHVNTYIFVLCNTLNLFLDGNRGKRVALSXDETKETENMRKKRRRIKLPESDSSEDEVFPDSPGAYEAESPSXPPX

SEQ ID NO: 3924 - protein, 106 aa, Homo sapiens
ELAQFTGFRASLLDMFLPPALERDMGCPSCMASSPVARCGMKSPALSPAPCEWSRAAGHFVSFVPHWTHHDILEKDSLELTAGSPPAPLALLMFRASVTGHPEHCW

SEQ ID NO: 3925 - protein, 55 aa, Homo sapiens
RPGSISAPNLSLCMHEANCSSPGETGECSFPDLRLHWIQAGEAAEEKRNADLLLS

SEQ ID NO: 3926 - protein, 59 aa, Homo sapiens
KTCPYSCDTFLLIGTKARKHEASNIEEGTSGSRDPGTAWPGPGHPTSTEFLKRTWKTLR

SEQ ID NO: 3927 - protein, 68 aa, Homo sapiens
ARLHLNNNNIHSDLCCRHHVRVTIDLQITGHLKPLKMCVFTYIYTNIYIEIKDRLLKNELEEYVPNSG

SEQ ID NO: 3928 - protein, 156 aa, Homo sapiens
  SITE (140): Xaa equals any of the naturally occurring L-amino acids
  SITE (141): Xaa equals any of the naturally occurring L-amino acids
PDGPLPGSDNNQEKKVRLSPAKMSTKNSTDLVEYVDKSHAFLPIIPNTQRGQLEDRLNNQARTIAFLLEQAFRIKEDISACLQGTHGFRKEESLARKLLESHIQTITSIVKKLSQNIEILEDQIRARDQAATGTNFAVHXXKHQTPTRSWEIFEEE

SEQ ID NO: 3929 - protein, 122 aa, Homo sapiens
  SITE (34): Xaa equals any of the naturally occurring L-amino acids
  SITE (54): Xaa equals any of the naturally occurring L-amino acids
  SITE (57): Xaa equals any of the naturally occurring L-amino acids
GSSPLPLWGGMAAEEEDEVEWVVESIAGFLRGPXWSIPILDFVEQKCEVFDDEXESXLTYTEIHQEYKELVEKLLEGYLKEIGINEDQFQEACTSPLAKTHTSQAILQPVLAAKDFTIFKAM

SEQ ID NO: 3930 - protein, 103 aa, Homo sapiens
YFQHRNLLDTAALRRWNELIYFSSELLGSASRLTHQICTMCHFRRLFLPSFSQTEDCSRDMVPVCLFPSTTLPETKAVFETIHQDFHLESSRMELIKFLKKFT

SEQ ID NO: 3931 - protein, 150 aa, Homo sapiens
  SITE (149): Xaa equals any of the naturally occurring L-amino acids
IGVSFEEAKSIITRAKLRLESAWEIAFIRQKSDNIQPENLSCTSLIEASGEYGPQASTLSLFSSPPEILIPKTSSTPKTNNDILSSCEIKTGYNKTVQIPITSENSTVGLSNTDVASAWTENYGLQEKISLNPSVRFKAEKLEMALNYXW

SEQ ID NO: 3932 - protein, 78 aa, Homo sapiens
VELPTFTESKENMVDLAPQLKGTKDEDFIQPPPVTSSPITPSTPISLPKGPITSSEEPTLQAKSQMTAQNSKASSKGA

SEQ ID NO: 3933 - protein, 173 aa, Homo sapiens
  SITE (56): Xaa equals any of the naturally occurring L-amino acids
  SITE (131): Xaa equals any of the naturally occurring L-amino acids
  SITE (171): Xaa equals any of the naturally occurring L-amino acids
REREREMIITTWIVYILARKGVGLPFLPITSSDIDVVESEAVSVLHHWLKKTEEEXSRGIKEKLSINHPSQGVREKMSTDSPPTHGQDIHVTRDVVKHHLSKSDLLANQSQEVLEERTRIQFIRWSHTRIXQVPSEMTEDIMRDRIEQVRRSISRLTDVSAQDFSMRPSSXDC

SEQ ID NO: 3934 - protein, 57 aa, Homo sapiens
  SITE (34): Xaa equals any of the naturally occurring L-amino acids
  SITE (51): Xaa equals any of the naturally occurring L-amino acids
KETWPGRRKVWVLTQSLSPAPETAHAPRFLKPKXICCLESSVVFAPVQFPXTQCTSA

SEQ ID NO: 3935 - protein, 68 aa, Homo sapiens
LPPITPSAALYHTPLDGPLIFIRHLLCARHGSKPFTCLNLLYPRKVDVLIIASWLTKRLRPKGLREIV

SEQ ID NO: 3936 - protein, 55 aa, Homo sapiens
DHEPTGRNKLWTQYYHVSSILRCVIFHILADLEPQHVTQSTVLDLIKNSIKKKKK

SEQ ID NO: 3937 - protein, 44 aa, Homo sapiens
CLNFSLILGFHALLSLTKERKLARRFMYKKVTTSKLSDTNVVYI

SEQ ID NO: 3938 - protein, 149 aa, Homo sapiens
  SITE (94): Xaa equals any of the naturally occurring L-amino acids
  SITE (119): Xaa equals any of the naturally occurring L-amino acids
  SITE (129): Xaa equals any of the naturally occurring L-amino acids
  SITE (137): Xaa equals any of the naturally occurring L-amino acids
  SITE (141): Xaa equals any of the naturally occurring L-amino acids
HGGLREEELEKMKEERERIGAKHQELREKQARGLLDYATGAIGSVYDMDDDEMDPNYARVNHFREPCTSANVFRSPSPPRAGPFGYPRDGHPLXPERDHLEGLYAKVNKPYHPLVPADXFSVHKLDLSXWTSSGKNXRQLXISFSQITS

SEQ ID NO: 3939 - protein, 309 aa, Homo sapiens
  SITE (254): Xaa equals any of the naturally occurring L-amino acids
  SITE (292): Xaa equals any of the naturally occurring L-amino acids
IINVTKSDAGSYTCIATNHFGTASSTGNLVVKDPTRVMVPPSSMDVTVGESIVLPCQVTHDHSLDIVFTWSFNGHLIDFDRDGDHFERVGGQDSAGDLMIRNIQLKHAGKYVCMVQTSVDRLSAAADLIVRGPPGPPEAVTIDEITDTTAQLSWRPGPDNHSPITMYVIQARTPFSVGWQAVSTVPELIDGKTFTATVVGLNPWVEYEFRTVAANVIGIGEPSRPSEKRRTEEALPEVTPANVSGGGGSKSELXITWETVPEELQNGRGFGYVVAFRPYGKMIWMLTVLASXDASRYVFRNESVHPSLL

SEQ ID NO: 3940 - protein, 97 aa, Homo sapiens
SGGAGPAQPLPGGAEVVRSLASRRTWATRMRWDCISPHPSIGSPRTPQKLLTSTVQFTGAARARKAKSAWRNTSQACKTRWHVHSCIDWFVPCVLSA

SEQ ID NO: 3941 - protein, 67 aa, Homo sapiens
SCHCENPTEMPWSLQIRVSVAERPHCMTPVSACWTSLSGAWHLMTSVYMLCLLFFMWPLHFVLWVSA

SEQ ID NO: 3942 - protein, 100 aa, Homo sapiens
  SITE (14): Xaa equals any of the naturally occurring L-amino acids
QLQPLETRLRKIQXKSYSYRKASELGVYAAQRGGDGDILVRGCQLLSPRQATAVGFHWDLYQALVQEARLQLTVSKSAIFHTLSTGVVCGNKEKRELGQS

SEQ ID NO: 3943 - protein, 31 aa, Homo sapiens
SWQWCFFLALFLYILIKYKSHVHYPKNPNCP

SEQ ID NO: 3944 - protein, 48 aa, Homo sapiens
  SITE (40): Xaa equals any of the naturally occurring L-amino acids
NIHINKMWVLQHICDYTTMKEQKGGDGIILSYISYSVKGXCSNFWMHM

SEQ ID NO: 3945 - protein, 73 aa, Homo sapiens
  SITE (61): Xaa equals any of the naturally occurring L-amino acids
  SITE (62): Xaa equals any of the naturally occurring L-amino acids
GATYPVTFLLRAEVPEALEMVKELLRVILAKKSAKSGDLYHKGILFICLSIKPQYFLPAWXXQLSPYPYFIFF

SEQ ID NO: 3946 - protein, 61 aa, Homo sapiens
  SITE (54): Xaa equals any of the naturally occurring L-amino acids
LGWLNGTFIFSLVFILSFMVLSPTNYRWKMFKASAMKKLISSNTVSEGDWSRTXCRYPNPE

SEQ ID NO: 3947 - protein, 382 aa, Homo sapiens
  SITE (51): Xaa equals any of the naturally occurring L-amino acids
  SITE (381): Xaa equals any of the naturally occurring L-amino acids
ELSKSGAALDNMWAPPAAIMGDGPTKKVGNQAPLQTQALQTASLRDGPAKXAVWVRHTSSEPQEPTESKAAKERPKQEVTKAVVVDLGTGYCKCGFAGLPRPTHKISTTVGKPYMETAKTGDNRKETFVGQELNNTNVHLKLVNPLRHGIIVDWDTVQDIWEYLFRQEMKIAPEEHAVLVSDPPLSPHTNREKYAEMLFEAFNTPAMHIAYQSRLSMYSYGRTSGLVVEVGHGVSYVVPIYEGYPLPSITGRLDYAGSDLTAYLLGLLNSAGNEFTQDQMGIVEDIKKKCCFVALDPIEEKKVPLSEHTIRYVLPDGKEIQLCQERFLCSEMFFKPSLIKSMQLGLHTQTVSCLNKCDIALKRDLMGNILLCGGSTMLSGXP

SEQ ID NO: 3948 - protein, 23 aa, Homo sapiens
YHYIKTSMKKMSKKKKKKKKKKK

SEQ ID NO: 3949 - protein, 80 aa, Homo sapiens
  SITE (57): Xaa equals any of the naturally occurring L-amino acids
PLKYLSQKNGYYHTITSVEATDKAPEESGLYLLRWFLHMLRHTVPSNLPQRFCRKVXALWGFPSLVLTAFTGKTPLNSAF

SEQ ID NO: 3950 - protein, 77 aa, Homo sapiens
ISELCEEGIPEIKLAIHGMVFGKYLPSTTEGNSVYLFEESAETQVHSSATKRRKQFSSVRGQTQHDGQKAELCWLSV

SEQ ID NO: 3951 - protein, 102 aa, Homo sapiens
  SITE (49): Xaa equals any of the naturally occurring L-amino acids
  SITE (59): Xaa equals any of the naturally occurring L-amino acids
  SITE (76): Xaa equals any of the naturally occurring L-amino acids
  SITE (77): Xaa equals any of the naturally occurring L-amino acids
  SITE (78): Xaa equals any of the naturally occurring L-amino acids
  SITE (92): Xaa equals any of the naturally occurring L-amino acids
  SITE (100): Xaa equals any of the naturally occurring L-amino acids
GHLLLKSKIVLFLIGSEASGPQLLPVRALNEVFIGESLSSRASYYEISXDDGPWEKQKXSRAQFVVTGTGSKAWSXXXNRFATPVLKKFFLXFAKQQNFXFF

SEQ ID NO: 3952 - protein, 97 aa, Homo sapiens
  SITE (59): Xaa equals any of the naturally occurring L-amino acids
ITLYKLYKKGSHIFEALLANPEGSGLRIQDNNNLFLSLGLQEKILKKLKTVENKMKNLXGIIVAQKPATKRDCSSEPYCSCSDCQSPLSTSGFTSPI

SEQ ID NO: 3953 - protein, 151 aa, Homo sapiens
  SITE (135): Xaa equals any of the naturally occurring L-amino acids
  SITE (147): Xaa equals any of the naturally occurring L-amino acids
GCPPGLHTRCLIAPGQQLQSCQGRPSGVCSDSAIVHQQIVGKDQLFQGAFLGSETRNMEFKRGSGEYLSLAFKHHVRRYVCAFLNSEGGSLLVGVEDSGLVQGIRCSHRDEDRARLLVDSILQGLKLRSFPMLHXNLIPVISTSETXVPLR

SEQ ID NO: 3954 - protein, 61 aa, Homo sapiens
  SITE (22): Xaa equals any of the naturally occurring L-amino acids
  SITE (53): Xaa equals any of the naturally occurring L-amino acids
  SITE (59): Xaa equals any of the naturally occurring L-amino acids
SIQSSHLEDPALQLQPGDRDRXTAHHTGWFQSFSKPRTPGCRGRRGSAEQAPXLQDILXLI

SEQ ID NO: 3955 - protein, 90 aa, Homo sapiens
GFKKSAKEHISLRFNECASNRSTWAATFRPEETAANLLILLRDCPQTLGNTLPAKELLTHVLKLHGKKSMPKMLLQLIKPSRENRAVRYQ

SEQ ID NO: 3956 - protein, 103 aa, Homo sapiens
  SITE (84): Xaa equals any of the naturally occurring L-amino acids
LGHPVYGEEAWKSATPVCEAPRQHQLYHCQRDEYPPPARRQQETLDVGSFQRLPQLDHPNLIQRKAISGYAGFIPRFTWVMGLXYRDGVMQAMDEFDKSQFLF

SEQ ID NO: 3957 - protein, 38 aa, Homo sapiens
  SITE (6): Xaa equals any of the naturally occurring L-amino acids
  SITE (8): Xaa equals any of the naturally occurring L-amino acids
RKRISXQXEKMGTWLHKSDYLSDVFFCLIKLRDLKEPN

SEQ ID NO: 3958 - protein, 83 aa, Homo sapiens
  SITE (17): Xaa equals any of the naturally occurring L-amino acids
  SITE (55): Xaa equals any of the naturally occurring L-amino acids
  SITE (63): Xaa equals any of the naturally occurring L-amino acids
  SITE (68): Xaa equals any of the naturally occurring L-amino acids
  SITE (79): Xaa equals any of the naturally occurring L-amino acids
  SITE (80): Xaa equals any of the naturally occurring L-amino acids
  SITE (81): Xaa equals any of the naturally occurring L-amino acids
QVLRNSPRFSVLFVTVXVCFGGEVHKAIFNMSVCLLATSCLPLMWIAGELGLHHXLWAHSGSXLIKSXFAMVTSLRYQXXXGA

SEQ ID NO: 3959 - protein, 61 aa, Homo sapiens
  SITE (19): Xaa equals any of the naturally occurring L-amino acids
  SITE (23): Xaa equals any of the naturally occurring L-amino acids
  SITE (34): Xaa equals any of the naturally occurring L-amino acids
  SITE (40): Xaa equals any of the naturally occurring L-amino acids
  SITE (57): Xaa equals any of the naturally occurring L-amino acids
  SITE (59): Xaa equals any of the naturally occurring L-amino acids
IFSLGNDYFSLEFDSGINXLYFXFYQGKYYSNGXNYNFIXVRLLFLIWILSQFLGFXSXGV

SEQ ID NO: 3960 - protein, 105 aa, Homo sapiens
  SITE (95): Xaa equals any of the naturally occurring L-amino acids
  SITE (97): Xaa equals any of the naturally occurring L-amino acids
  SITE (104): Xaa equals any of the naturally occurring L-amino acids
RGGSDWAVQFPENWRRSRAVGRDFGRFAGPGFSLRVREVLPLAGDWAAGASQCPLMGPRAWACFPKDQQLSCKPLLLPAGAGWLAFPFRLHSDSXGXQEGRGSXL

SEQ ID NO: 3961 - protein, 93 aa, Homo sapiens
LAWMPAIAAAPKVEATRTGWMRMAQRLWSCWPQSKSDTMGSLHESCPWIDNLNHTSSSMDPGQHTKSRQVKTEEISPGLQLPPERSLLLMAEA

SEQ ID NO: 3962 - protein, 29 aa, Homo sapiens
IFFILYYYYHVQNVTYPQRYFGGNSSNIL

SEQ ID NO: 3963 - protein, 66 aa, Homo sapiens
TMLLGPYIYSLHACHWATSFSTHCVSSGMTKINWAPSTLPMHFKCLHHHICYSILLHQDIFPGHHE

SEQ ID NO: 3964 - protein, 106 aa, Homo sapiens
  SITE (86): Xaa equals any of the naturally occurring L-amino acids
  SITE (94): Xaa equals any of the naturally occurring L-amino acids
  SITE (96): Xaa equals any of the naturally occurring L-amino acids
LSDNQVADVAEEKFETRATLSLQACLACSEDRHFKHREAQEHCLSLELKSRIQRALSEHALCPELVSCGSTQASMAGPQTGAIVWXVFSRWSTXGXLHTWLLILPL

SEQ ID NO: 3965 - protein, 37 aa, Homo sapiens
INTFGSFKTEREHILLIAIDSLHKKSGYTGVSRGPAW

SEQ ID NO: 3966 - protein, 53 aa, Homo sapiens
VRIFKIVMFSLPALSGCQWSSATGCCIEQASDKGIGLNGPLFKLTYRSLMEGL

SEQ ID NO: 3967 - protein, 209 aa, Homo sapiens
GVWVRWGRTMEEKPSKVSLKSSDRQGSDEESVHSDTRDLWTTTTLSQAQLNMPLSEVCEGFDEEGRNISKTRGWHSPGRGSLDEGYKASHKPEELDEHALVELELHRGSSMEINLGEKDTASQIEAEKSSSMSSLNIAKHMPHRAYWAEQQSRLPLPLMELMENEALEILTKALRSYQLGIGRDHFLTKELQRYIEGLKKRRSKRLYVN

SEQ ID NO: 3968 - protein, 113 aa, Homo sapiens
RHQRIHSEEKPFDCVDCGKAFSAQEQLKRHLRIHTQESSYVCDECGKALTSKRNLHQHQRIHTGEKPYECSKYEKAFGTSSQLGHLEHVYSGEKPVLDICRFGLPEFFTPFYW

SEQ ID NO: 3969 - protein, 90 aa, Homo sapiens
RARPSLPRSFPVTPMHQTKVDRPLSYGQPHVFLMEGTEYLPEILDTRRHAVSGCLEASPEREDSKSRISSGISNISMLCALYKQHLYNLS

SEQ ID NO: 3970 - protein, 53 aa, Homo sapiens
  SITE (45): Xaa equals any of the naturally occurring L-amino acids
  SITE (51): Xaa equals any of the naturally occurring L-amino acids
HPLWRLTTFHQVFNLSREEYNGEHKIHFIFITMGRILLLSSLGQXSEDFSXGS

SEQ ID NO: 3971 - protein, 89 aa, Homo sapiens
LDMFFWVNEISGEITYPPQKADAPAVSPESPQKKPPFQPRSVQEAPCSPQGPPAQRPALAPPSKPSLKDSGSRNPCPSAPTWARPKPEE

SEQ ID NO: 3972 - protein, 53 aa, Homo sapiens
SPSTCCCWRVREKCCIQGRPAFPNPIGASFLDMMSESGEKQGEKNLNPAEEKV

SEQ ID NO: 3973 - protein, 54 aa, Homo sapiens
  SITE (42): Xaa equals any of the naturally occurring L-amino acids
VSKGGSVRACVPEVPCCMSLRQDLTPTTRLLFGIHISISIVXTPSSGFSFCFFT

SEQ ID NO: 3974 - protein, 49 aa, Homo sapiens
VFHPTANISWCTCCLTSRMTPRYKIWLSTDQRPIETLNQKSKFLLDRVS

SEQ ID NO: 3975 - protein, 164 aa, Homo sapiens
  SITE (103): Xaa equals any of the naturally occurring L-amino acids
  SITE (128): Xaa equals any of the naturally occurring L-amino acids
  SITE (152): Xaa equals any of the naturally occurring L-amino acids
  SITE (156): Xaa equals any of the naturally occurring L-amino acids
ESSLSPLSQGAMEMESAAASTRFHQPHMERKMSAMACEIFNELRLEGKLCDVVIKVNGFEFSAHKNILCSCSSYFRALFTSGWNNTEKKVYNIPGISPDMMNXSLSMHTPGPCLSHRTMWRNCLLLQXNLTSWVSQGLLRSSSSQSLCLDNXIGIXKSRLLLLA

SEQ ID NO: 3976 - protein, 62 aa, Homo sapiens
  SITE (54): Xaa equals any of the naturally occurring L-amino acids
EYLEFERDLMPGTWLTHVISELWEAEAGGFTRSGDRGLSWANMVETCLLKKKKXLARGDGMH

SEQ ID NO: 3977 - protein, 72 aa, Homo sapiens
  SITE (18): Xaa equals any of the naturally occurring L-amino acids
  SITE (29): Xaa equals any of the naturally occurring L-amino acids
  SITE (45): Xaa equals any of the naturally occurring L-amino acids
HHEDMAGGAGIFAPDNVXCETAPRSRVRXLGLSGGSRRKQLPMTXWLAGAQAHIREATEGSVLALCALALRC

SEQ ID NO: 3978 - protein, 98 aa, Homo sapiens
ETVSLILLCKYKVTLLNTVPWKRGKSSRQPPAQATAGPTWPYSIARGSKPVKAPCPRMILSGQRDGPSLVGLITLISSFLLLQGSLVPPTKRLSTLLD

SEQ ID NO: 3979 - protein, 105 aa, Homo sapiens
  SITE (40): Xaa equals any of the naturally occurring L-amino acids
SLWFVLDTQHAFQKEMTQQLMCQIIMCHSEKDNCTHRQVXIRSNECSSFQRQQRLFILASYCKYSIVFIITQTEARNTGFYLIFLHLELYSDDSLNSKLSHVKHK

SEQ ID NO: 3980 - protein, 85 aa, Homo sapiens
FGLKQKCVMNLDSLKSVLSGSWPTLLQHQSEARLSRFSSDRKILKHGLTCSLELSTPELDPDGSLRSLQEDKDRRLGKDHGQADP

SEQ ID NO: 3981 - protein, 65 aa, Homo sapiens
  SITE (15): Xaa equals any of the naturally occurring L-amino acids
  SITE (26): Xaa equals any of the naturally occurring L-amino acids
  SITE (50): Xaa equals any of the naturally occurring L-amino acids
CPLGPAGHEEDALPXELEHSIPCCGXGSLKDHLVNFAWAGFLLNNLQNWXTCNSHRGKGDHDPPT

SEQ ID NO: 3982 - protein, 79 aa, Homo sapiens
HFGINGTMKEAVHWRFQVVMEGFQFMQTSVKMSFVIGEDIGNFTSQNRVSLLFRIVHCCCCRCVFFQVEKQQQISTRKL

SEQ ID NO: 3983 - protein, 102 aa, Homo sapiens
  SITE (89): Xaa equals any of the naturally occurring L-amino acids
WNSLKQNADQQDTEAMPDYKKQLRNLKEEIAVLSAEKSALQGRSSRSRSPSPAPRSRSSAAQICQPLHRCQVRRPSPNRSKLSNVARKXALLSRSAIPIPRP

SEQ ID NO: 3984 - protein, 34 aa, Homo sapiens
LKLQASHRKKDSTLTILLATQYLVSALNIEGMHI

SEQ ID NO: 3985 - protein, 85 aa, Homo sapiens
GDCSSIKYLHCSLVRDLSQRMELSQAQIPDPQKLESGIPGYPEVTVSTQSGVLDASLGQRSQAIKALNAWIYHHLKSPVTVMEQK

SEQ ID NO: 3986 - protein, 183 aa, Homo sapiens
IAPGVWEQQSLLSTLLNPEKRNKFKEQQPNTYVGFKEFSRKCSEKWRSISKHEKAKYEALAKLDKARYQEEMMNYVGKRKKRRKRDPQAPRRPPSSFLLFCQDHYAQLKRENPNWSVVQVAKATGKMWSTATDLEKHPYEQRVALLRAKYFEELELYRKQCNARKKYRMSARNRCRGKRVRQS

SEQ ID NO: 3987 - protein, 316 aa, Homo sapiens
  SITE (18): Xaa equals any of the naturally occurring L-amino acids
  SITE (241): Xaa equals any of the naturally occurring L-amino acids
AVAGVTPRRPSPHGCRRXKALQCALALEISSVTCPGVVLKDKEDIYLSICVFGQYKKTQCVPATFPLVFNARMVFEKVFPDAVDPGDVVTQLEYDTAVFELIQLVPPVGETLSTYDENTRDFMFPGPNQMSGHHDSNRQVTMRRISGLRGNAPRLEFSTTSVITECLISSRKCHTQDKFIYHLAPVEKSHGRLQNRTSRSQKKKSKSPERSKYCINAKNYEQPTISSKSHSPSPYTKRRMXELSEDTRRRLAHLNLGPYEFKKETDKPPFVIRHVDPPSPRADTLLGSSGRDCERDGWSRVHNDHSHLGCCRTQGL

SEQ ID NO: 3988 - protein, 147 aa, Homo sapiens
  SITE (146): Xaa equals any of the naturally occurring L-amino acids
PGVRMIPVEIKEAGGTTTSNNPEEATLQNLLAQESCCKFPSSQELEDASCCSLKKDSNPMVICQLKGGTQMLCIDNSRTRELKALHLVPQYQDQNNYLQSDVPKPMTALVGRFLPASTKLNLITQQLEGALPSVVNGSAFPSGSTXP

SEQ ID NO: 3989 - protein, 106 aa, Homo sapiens
  SITE (55): Xaa equals any of the naturally occurring L-amino acids
  SITE (78): Xaa equals any of the naturally occurring L-amino acids
  SITE (94): Xaa equals any of the naturally occurring L-amino acids
GALASFNRRLEARPVGGAVPAQGRARRQKSPPFSSLVEKSTCSCKVRLFESGARXGGKLPLCAHWWIREPITRKSPRXGRLIGARTRALHRTSXRVQQSYGDPLPV

SEQ ID NO: 3990 - protein, 106 aa, Homo sapiens
  SITE (98): Xaa equals any of the naturally occurring L-amino acids
PCFFPGEGSHFLEGRFSKYGLRTSSVENAGNSLEKQVFNPRPRIRNSGWSPAMCVLTSPRATPVLARVAKPLLYGASEIHHSGTSERMRPYRPGREAXYTDIQSPQ

SEQ ID NO: 3991 - protein, 464 aa, Homo sapiens
  SITE (310): Xaa equals any of the naturally occurring L-amino acids
  SITE (397): Xaa equals any of the naturally occurring L-amino acids
  SITE (399): Xaa equals any of the naturally occurring L-amino acids
KTTMNADFLLPYYTAQSGSSMSMFNTTMGKLQRQLYKGEYDIFKYAPIFESDFIQITKRGEVIDVHNRVRMVTMGIARTSPILPLPDVMLLARPATGCEEYAGHGQATKRKKRKAAKNLELTRLLPLRFVRISVQDHEKQQLRLKFATGRSCYLQLCPALDTRDDLFAYWEKLIYLLRPPMESNSSTCGIPAEDMMWMPVFQEDRRSLGAVNLQGKGDQDQVSIQSLHMVSEVCGATSAAYAGGEGLQNDFNKPTNVLNASIPKTSTELAEEPATGGIKEAAAAGAAAGAATGTVAGALSVAAANSAPGXVSAAIAGAATIGAGGNKGNMALAGTASMAPNSTKVAVAGAAGKSSEHVSSASMSLSREGSVSLAIAGVVLTSRTAAEADMDAAAGPXVXTRQSKSSLSGQHGRERTQASAEGCKEGRERREKDRALGRSSIGAGQVKAAQNQGETRIAQKSFSR

SEQ ID NO: 3992 - protein, 143 aa, Homo sapiens
  SITE (44): Xaa equals any of the naturally occurring L-amino acids
  SITE (85): Xaa equals any of the naturally occurring L-amino acids
NWSEREAMQKSEGSGGTQLKNRATGNYDQRTSSSTQLKHRNAVXGSKSSLSTSSPESARKLHPRPSDKLNPKTINPFGEQSRVPXAFAAIYSKGGIPCRLVHGSVKHRLQWECPPESLSFDPLLITLAEVNMPSLEYLSENKH

SEQ ID NO: 3993 - protein, 64 aa, Homo sapiens
DRYEPCISECLERKTSKLGGPCLLIIFQEFKTVISSFQMQLKLHHPVHLARFLQHILIATSRPF

SEQ ID NO: 3994 - protein, 165 aa, Homo sapiens
  SITE (113): Xaa equals any of the naturally occurring L-amino acids
  SITE (114): Xaa equals any of the naturally occurring L-amino acids
  SITE (115): Xaa equals any of the naturally occurring L-amino acids
  SITE (133): Xaa equals any of the naturally occurring L-amino acids
  SITE (162): Xaa equals any of the naturally occurring L-amino acids
LVPISCLERQLNIARDMKDRALESDAACGLGGVYQQMGEYDTALQYHQLDLQIAEETNNPTCQGRAYGNLGLTYESLGTFERAVVYQEQHLSIAAQMNDLAAKTVSYSSLGRXXXALQNYSQAVMYLQEGLRXAEQLGRREDEAKIRHGLGLFLWASGNLEXAQH

SEQ ID NO: 3995 - protein, 218 aa, Homo sapiens
  SITE (108): Xaa equals any of the naturally occurring L-amino acids
  SITE (112): Xaa equals any of the naturally occurring L-amino acids
  SITE (136): Xaa equals any of the naturally occurring L-amino acids
  SITE (153): Xaa equals any of the naturally occurring L-amino acids
  SITE (202): Xaa equals any of the naturally occurring L-amino acids
GVTSSVPCLPLPNILLMASVKWHQGQNQTWNRPSIAPNIFLKRILPLRFVELQVCDHYQRILQLRTVTEKIYYLKLHPDHPETVFHFWIRLVQILQKGLSITTKDPRXLVTXCLVPKNCSSPSGDLKLVQKKLQAXQPSESLIQLMTKGESEXLSQIFADLHQQNQLRSSRKVETNKNSSGKDSSREDSIPCTCDLRWRASXTYGEWERENPSGLQPL

SEQ ID NO: 3996 - protein, 119 aa, Homo sapiens
  SITE (93): Xaa equals any of the naturally occurring L-amino acids
  SITE (94): Xaa equals any of the naturally occurring L-amino acids
  SITE (107): Xaa equals any of the naturally occurring L-amino acids
  SITE (109): Xaa equals any of the naturally occurring L-amino acids
TRRETYLHQAHGHAGETAKAKPSPVSPWTFLEVCRAVTFGHRDGAQLPGLPSPLPPYSVLCQLRRPETQHQRVPTPTDLGALDNCSAASLHLXXEPFSSGRVGDPRXRXEPDQARVMRY

SEQ ID NO: 3997 - protein, 152 aa, Homo sapiens
  SITE (17): Xaa equals any of the naturally occurring L-amino acids
  SITE (57): Xaa equals any of the naturally occurring L-amino acids
  SITE (61): Xaa equals any of the naturally occurring L-amino acids
  SITE (103): Xaa equals any of the naturally occurring L-amino acids
  SITE (124): Xaa equals any of the naturally occurring L-amino acids
  SITE (139): Xaa equals any of the naturally occurring L-amino acids
  SITE (143): Xaa equals any of the naturally occurring L-amino acids
GRDGYSGPPRREPLPPXRDPYLGPRDEGYSSRDGYSSRDYREPRGFAPSPGEYTHRXYGHXSVRDDCPLRGYSDRDGYGGRDRDYGDHLSRGSHREPFESYGXLRGAAPGRGTPPSYGGGGRYXEYRGYSPDAYSGGRXSYSXSYGPERPLL

SEQ ID NO: 3998 - protein, 153 aa, Homo sapiens
  SITE (128): Xaa equals any of the naturally occurring L-amino acids
  SITE (132): Xaa equals any of the naturally occurring L-amino acids
ILLKTSEDGSVCFNLLLRFYFSFIRLFAMSLADLTKTNIDEHFFGVALENNRRSAACKRSPGTGDFSRNSNASNKSVDYSRSQCSCGSLSSQYDYSEDFLCDWSEKAINRNYLKQPVVKEKEKKKYNXSKIXQSKGQKEISVEKKHTWECITL

SEQ ID NO: 3999 - protein, 146 aa, Homo sapiens
TMPSKSTSSHVKQSSNLTANDLPPQGILSQDTSSQDMLFHDMTSQDMQSLDMLSQDTPSHAMPPQDIPSQDMLSQALSAHAILPEASTSHIVQFPEIQHLLQQPPDLQPENTEPQNQQILQMSYQDIRSEVMEETKGMGNLRRELP

SEQ ID NO: 4000 - protein, 177 aa, Homo sapiens
  SITE (19): Xaa equals any of the naturally occurring L-amino acids
EKAASESASTPWPLGTPSXSGYSLLEPTTTPGGSSRSRNSEDAEVAAGSWSSLGPLEMPPETQPDQKMCVPTRKKACLCLHALPLPFLTTYKYSLSEEVREEGGGPCLAFLRLSSIPSRSSSERGAAVNCDNCYALALKTWQVGDGGGDCDLTESSRGQGGTQGHSTGSPRAPRHEV

SEQ ID NO: 4001 - protein, 113 aa, Homo sapiens
  SITE (51): Xaa equals any of the naturally occurring L-amino acids
  SITE (90): Xaa equals any of the naturally occurring L-amino acids
  SITE (99): Xaa equals any of the naturally occurring L-amino acids
  SITE (100): Xaa equals any of the naturally occurring L-amino acids
  SITE (102): Xaa equals any of the naturally occurring L-amino acids
  SITE (106): Xaa equals any of the naturally occurring L-amino acids
WHKARNELTQTGYITSGAVCLHAKLVSHTGLDIHLGLFLDQSTSMYLTMWXVYVGQAGLKLLNSSDLPASAPKCWDYRCEPLHLTRERMXFCSFSNTSXXLXLSMXLKFLIEN

SEQ ID NO: 4002 - protein, 173 aa, Homo sapiens
  SITE (148): Xaa equals any of the naturally occurring L-amino acids
  SITE (162): Xaa equals any of the naturally occurring L-amino acids
GIMSGKTKARRAAMFFRRCSEDASGSASGNALLSEDENPDANGVTRSWKIILSTMLTLTFLLVGLLNHQWLKETDVPQKSRQLYAIIAEYGSRLYKYQARLRMPKEQLELLKKESQNLENNFRQILFLIEQIDVLKALLRDMKDGMDXITTGTPMETCGGPXPHRGSVKLGQL

SEQ ID NO: 4003 - protein, 81 aa, Homo sapiens
AAVSLRPRRERGDLEAVVKDAESKLSVALRQREQVLVRVLQRRPALVRGGSGRGRAVFCAPGLFRKLLDKIRRTSWADIIR

SEQ ID NO: 4004 - protein, 64 aa, Homo sapiens
  SITE (58): Xaa equals any of the naturally occurring L-amino acids
EDTRHNGHGAKSTCWTLVPSTSKLSIRLRDLECIPHTLKMRKGEFLKVCVCVSLLICXGFCILR

SEQ ID NO: 4005 - protein, 57 aa, Homo sapiens
YTSLPILPASRWPIAEADGRMSTEQVLLCIWLFSASSERDALLISCLSDSFNMMLSI

SEQ ID NO: 4006 - protein, 336 aa, Homo sapiens
  SITE (314): Xaa equals any of the naturally occurring L-amino acids
  SITE (336): Xaa equals any of the naturally occurring L-amino acids
QRLRKSAKTRRVTQRKPSSGPVCWLCLREPGDPEKLGEFLQKDNISVHYFCLILSSKLPQRGQSNRGFHGFLPEDIKKEAARASRKICFVCKKKGAAINCQKDQCLRNFHLPCGQERGCLSQFFGEYKSFCDKHRPTQNIQHGHVGEESCILCCEDLSQQSVENIQSPCCSQAIYHRKCIQKYAHTSAKHFFKCPQCNNRKEFPQEMLRMGIHIPDRRWCLILCATCGSHGTHRDCSSLRSNSKKWECEECSPAAATDYIPENSGDIPCCSSTFHPEEHFCRDNTLEENPGLSWTDWPEPFLLEKARSPLVARXATPGGPRVQESLTGCKKSKYTX

SEQ ID NO: 4007 - protein, 84 aa, Homo sapiens
TTQVAAYFFICVDLALALFEESELLPLPFLATSIAEVLCLTAYFGRLVHFAKVTPQMVFWKDTKDICTMVTTVASVHCSTCKSL

SEQ ID NO: 4008 - protein, 92 aa, Homo sapiens
  SITE (65): Xaa equals any of the naturally occurring L-amino acids
LGFQSASVSGSLGRGAAAGRLGHQGGSRASEAPESPLVRQRLNLNSQAVRLSIVREFARSQRSSXSTTSVTWSARGQLGRHPSTKKVNRPSR

SEQ ID NO: 4009 - protein, 133 aa, Homo sapiens
PVATRSRLPLFQPSSPSPILHPPRPIPEVLRPPRLSFCRVAQGFHPSARGMASTPMGNEGEKKSSWPSQAAPSLRGGPASLSRSEEYLSQISAELMEEALCTACCHLNPVPIKKKQSQDQATQISKRAFFTKT

SEQ ID NO: 4010 - protein, 102 aa, Homo sapiens
  SITE (56): Xaa equals any of the naturally occurring L-amino acids
TCGLSDPDLPTYPFVLAAPRTHECLSQTPPFTASSLRGSDKHRIEPMGPRSPDAHXPGLFMFEPILEEKCENACSEHGGQAGSIRCQGAKHNGKGGADAAEG

SEQ ID NO: 4011 - protein, 100 aa, Homo sapiens
  SITE (79): Xaa equals any of the naturally occurring L-amino acids
  SITE (80): Xaa equals any of the naturally occurring L-amino acids
  SITE (82): Xaa equals any of the naturally occurring L-amino acids
LRYLPRPDCLQCFFQQDALTWNNEIHCSFCETKQETAVRASISKAPKIIIFHLKRFDIQGTTKRKLRTDIHYPLTNLDXXPXICSIFRKYPKYNLCAVVD

SEQ ID NO: 4012 - protein, 55 aa, Homo sapiens
  SITE (14): Xaa equals any of the naturally occurring L-amino acids
  SITE (43): Xaa equals any of the naturally occurring L-amino acids
  SITE (53): Xaa equals any of the naturally occurring L-amino acids
KGSATHNFPGVPAXSVQWTMATQRMTGGEKMPCRSDSQDEDVXEEQPPVYIQXVL

SEQ ID NO: 4013 - protein, 125 aa, Homo sapiens
  SITE (88): Xaa equals any of the naturally occurring L-amino acids
  SITE (94): Xaa equals any of the naturally occurring L-amino acids
  SITE (106): Xaa equals any of the naturally occurring L-amino acids
  SITE (120): Xaa equals any of the naturally occurring L-amino acids
EGELNEKQKMELEQNVVLVQQQSKELSVLKEKMAQMSSLVEKKDRELKPLRRHSGLPRETQTPAEHREGTEPRKKTQTCDTSLQIEPXHTGGLXQQPRAEFLHDLXVKCKGSRHQEVINXQKKAF

SEQ ID NO: 4014 - protein, 87 aa, Homo sapiens
IPLKATCEPGCKFGECVGPNKCRCFPGYTGKTCSQGYLTMTGDNFGCHNWMWEVLPASSEWSPGMPLNILQCTGQSPQQIMICVNGS

SEQ ID NO: 4015 - protein, 84 aa, Homo sapiens
  SITE (10): Xaa equals any of the naturally occurring L-amino acids
  SITE (46): Xaa equals any of the naturally occurring L-amino acids
  SITE (47): Xaa equals any of the naturally occurring L-amino acids
  SITE (79): Xaa equals any of the naturally occurring L-amino acids
KPPDIILQPXVYPGKCWAFPGSQGHTLIKLATKIIPTAVTMEHISXXVSPSGNIFQCTQGIFCLCKKLSKFAFRLADRXWLARN

SEQ ID NO: 4016 - protein, 46 aa, Homo sapiens
VLCRGHLTRLTLVPALLCGLGVRIKSSELLRGDREADFSSSLRMAF

SEQ ID NO: 4017 - protein, 136 aa, Homo sapiens
RCFVLSEARKFDRAAMPNRKASRNAYYFFVQEKIPELRRRGLPVARVADAIPYCSSDWALLREEEKEKYAEMAREWRAAQGKDPGPSEKQKPVFTPLRRPGMLVPKQNVSPPDMSALSLKGDQALLGGIFYFLEHF

SEQ ID NO: 4018 - protein, 95 aa, Homo sapiens
RCGRTDPINLKYQREEEGEDTPSTRSRSGVKGLKTTRKAKRPLRGSSSQKAGETNTPAGKPKKARGPILRGRYHRLKEKMKKEEADKEQSETSVL

SEQ ID NO: 4019 - protein, 96 aa, Homo sapiens
  SITE (20): Xaa equals any of the naturally occurring L-amino acids
  SITE (83): Xaa equals any of the naturally occurring L-amino acids
  SITE (95): Xaa equals any of the naturally occurring L-amino acids
AWGLVLRWHTCEVSLRQRWXPSEPELTQPNLRPPESRHSSFYQCTPSPLPSELVCLQGSSRSQAGRGWGKEGVQDLAGSFHPXLRGLTSWLPSQXH

SEQ ID NO: 4020 - protein, 173 aa, Homo sapiens
  SITE (137): Xaa equals any of the naturally occurring L-amino acids
  SITE (168): Xaa equals any of the naturally occurring L-amino acids
LEEYQALTFLTRNEILCIHDTFLKLCPPGKYYKEATLTMDQVSSLPALRVNPFRDRICRVFSHKGMFSFEDVLGMASVFSEQACPSLKIEYAFRIYDFNENGFIDEEDLQRIILRLLNSDDMSEDLLMDLTNHVLSXSDLDNDNMLSFSEFEHAMAKSPDFMTPFGFXSGDLM

SEQ ID NO: 4021 - protein, 55 aa, Homo sapiens
  SITE (1): Xaa equals any of the naturally occurring L-amino acids
XTYASPGTVIFYCQFFLNLTYLLSLPFMYRFLLHLFSFPIFYVIKNPSHLTYNPI

SEQ ID NO: 4022 - protein, 70 aa, Homo sapiens
  SITE (5): Xaa equals any of the naturally occurring L-amino acids
  SITE (65): Xaa equals any of the naturally occurring L-amino acids
PEYLXYFIFFFSLPLLYSIFYLNNDMQIGCHYLGYFSHYLCRNLNGYLQDRVSKSLNLSGIKIMXKGFSD

SEQ ID NO: 4023 - protein, 139 aa, Homo sapiens
  SITE (134): Xaa equals any of the naturally occurring L-amino acids
  SITE (139): Xaa equals any of the naturally occurring L-amino acids
NCVSYLFVNIWANPAKPSKSQLFEKPAVFQLCETQLLLQPRTYVIPAGSAFICLLCPKWMAPTLTRLLPLACSAAALQPSVASLPRSHFSAFLEIWQAPEREITSIHLNLKKKKKKKKKKKKKKKKKKKKKKKXKKKKX

SEQ ID NO: 4024 - protein, 88 aa, Homo sapiens
FDGTPTFFSGVNIKKFFLLKRGNIVLMSGSSSKRNHLNARVCTAAEWFCVQLLRGHGHRCLHLGQVAPPFQRQLITKVCTHTNFSLSS

SEQ ID NO: 4025 - protein, 148 aa, Homo sapiens
  SITE (60): Xaa equals any of the naturally occurring L-amino acids
  SITE (80): Xaa equals any of the naturally occurring L-amino acids
  SITE (127): Xaa equals any of the naturally occurring L-amino acids
  SITE (129): Xaa equals any of the naturally occurring L-amino acids
  SITE (137): Xaa equals any of the naturally occurring L-amino acids
AWGTVVVTLATLMVVTVDAKIYERCELAARLERAGLNGYKGYGVGDWLCMAHYESGFDTXFVDHNPDGSSEYGIFQLNSXWWCDNGITPTKNLCHMDCHVHQTTMSLSSPQTCSIAIFWMTSRCAKXIXSSQNGAFXLDFLEATLVWP

SEQ ID NO: 4026 - protein, 163 aa, Homo sapiens
  SITE (156): Xaa equals any of the naturally occurring L-amino acids
RTRRVPTKPKKSASFPVTGTSIRRLTWPSLQISPANIKKKVYHMDMEAQRKNLQLLSEESELRLPHYLRSKALELTTTTMELGALRLQYLCHKYIFYRRLQSLRQEAINHVQIMKETEASYKAQNLYIFLENIDRLQSLRLQAWTDKQKGLEEKHXRVPEQAW

SEQ ID NO: 4027 - protein, 153 aa, Homo sapiens
  SITE (44): Xaa equals any of the naturally occurring L-amino acids
  SITE (57): Xaa equals any of the naturally occurring L-amino acids
  SITE (61): Xaa equals any of the naturally occurring L-amino acids
  SITE (80): Xaa equals any of the naturally occurring L-amino acids
FDSFYQELDLDSLNEDLLSQSMPHARTETSVGTYESHSTSELEXLTEPEQRELKTKXTKLXAEIVTLRHVLAAKERRCGXLKRKLGLTALVGLRQNLSKSWLDVRFSTPYVKQKTSAALSTMGTLICRKLGGVKKSATLRSFEGNPKGEGSRI

SEQ ID NO: 4028 - protein, 117 aa, Homo sapiens
DACESFSHLGTHTLLLDHAVAVWFEVVNMDFSRLHMYSPPQCVPENTGYTYALSSSYSSDALDFETEHKLDPVFDSPRMSRRSLRLATTACTLGDGEAVGADSGTSSAVSLKNRAAR

SEQ ID NO: 4029 - protein, 104 aa, Homo sapiens
  SITE (100): Xaa equals any of the naturally occurring L-amino acids
FRAKVFKHLYPKLTSMSCSAETRGVLSGGPIIIRDTRRSGLPSVTHIPLERISVWGTTIYPVELWPNLHQCFANFWDLTRRIYIQGLEFIQKCILKKMTXLNRF

SEQ ID NO: 4030 - protein, 136 aa, Homo sapiens
  SITE (47): Xaa equals any of the naturally occurring L-amino acids
  SITE (128): Xaa equals any of the naturally occurring L-amino acids
YLHSHQQCRRGLTMLSGVLWWSGVAIHRILGMDCKSLESRLCVSSLXCKELRSCRYCPYNKMKLDKLKINDFSWTHYTAEFCRVNHYPEIWKGRCTHRSSAEIQLPEIEAGIRNTLKEPGLLGHRITXSISYIDDD

SEQ ID NO: 4031 - protein, 63 aa, Homo sapiens
VHLLALPSSPPGGDENFQALVMDNSVSLEPSFLLALQNHKKSSRIIEILNSIGQTGTSKISDI

SEQ ID NO: 4032 - protein, 124 aa, Homo sapiens
  SITE (35): Xaa equals any of the naturally occurring L-amino acids
  SITE (85): Xaa equals any of the naturally occurring L-amino acids
  SITE (87): Xaa equals any of the naturally occurring L-amino acids
  SITE (124): Xaa equals any of the naturally occurring L-amino acids
VVEPCRCDGSVRYTHQLCLLKWISERGSWTCELCXYRYHVIAIKMKQPCQWQSISITLVEKVQMIAVILGSLFLIASVTWLLWSXFXPYAVWQRKDILFQICYGMDGFMDLGGIGLIGHEGTGX

SEQ ID NO: 4033 - protein, 64 aa, Homo sapiens
EQKLELHRGGGRSRTSGSPGLQEFGTSRRLGDGNDLNMEKSSPAALLDFPLEQCLCNYSRELLP

SEQ ID NO: 4034 - protein, 213 aa, Homo sapiens
  SITE (90): Xaa equals any of the naturally occurring L-amino acids
VLDVAAGMIKPGVTTEEIDHAVHLACIARNCYPSPLNYYNFPKSCCTSVNEVICHGIPDRRPLQEGDIVNVDITLYRNGYHGDLNETFFXGEVDDGARKLVQTTYECLMQAIDAVKPGVRYRELGNIIQKHAQANGFSVVRSYCGHGNPQAFSYSSQCTPLCLKIKQLGVMEVGPCIYNWSQWFVEGGWQDGNLGQMVGTAVDKRRESGLLQF

SEQ ID NO: 4035 - protein, 131 aa, Homo sapiens
QDPNQQAHNICELPPKRPGLKRICLRKHQPCCLQPVRCVQSLRNHHGWPLYSLLSQSRDRRMAHFQRLQRHSHVLQPSAHQRRLPALLRTGQPALPNVAPGATSLLPSPWWPRSLNFLKRQKQNNNNNTQT

SEQ ID NO: 4036 - protein, 151 aa, Homo sapiens
WTLKQRPPNMCSTSGCDLEEIPLDDDDLNTIEFKILAYYTRHHVFKSTPALFSPKLLRTRSLSQRGLGNCSANESWTEVSWPCRNSQSSEKAINLGKKKSSWKAFFGVVEKEDSQSTPAKVSAQGQRTLEYQDSHSSSGQVLSNVEQVLGA

SEQ ID NO: 4037 - protein, 304 aa, Homo sapiens
  SITE (73): Xaa equals any of the naturally occurring L-amino acids
  SITE (233): Xaa equals any of the naturally occurring L-amino acids
  SITE (258): Xaa equals any of the naturally occurring L-amino acids
  SITE (259): Xaa equals any of the naturally occurring L-amino acids
  SITE (296): Xaa equals any of the naturally occurring L-amino acids
  SITE (302): Xaa equals any of the naturally occurring L-amino acids
RGENKHTTNMNLNPPTSALQIEGKGSHIMARNVSCFLVRHTPHPRRVCHIKGLNNIPICTVNDDENAFGTLWXVGQSNYLEKNRIPFANCSYPSSTAVQESPVRGMSPAPNGAKVPPRPHSEPSRKIKECFKTSSENPLVIKKEEIKAKRPPSPPKACSTPGSCSSGMTSTKNDVKANTICIPNYLDQEIKILAKLCSILHTDSLAEVLQWLLHATSKEKEWVSALIHSELAXINLVTHHRRNTSMEPAAETGKPPTXXSPPTGKLPPKFYCKIQKVLYQEDSRKGINPTQVASQXILKKTXEV

SEQ ID NO: 4038 - protein, 103 aa, Homo sapiens
  SITE (60): Xaa equals any of the naturally occurring L-amino acids
  SITE (62): Xaa equals any of the naturally occurring L-amino acids
RRAIKSDKSYLSLWRDNLWPHPLHYILRACRRAVIKYFQGYRLLQELIKAIELLSTKMHXLXTEVCMQSLRGGPLRPISESAVSMSPCQEFLQHTLCDFKILK

SEQ ID NO: 4039 - protein, 32 aa, Homo sapiens
RLSTELLPLPGNNEVMFYHPTFPARVVSEKSS

SEQ ID NO: 4040 - protein, 141 aa, Homo sapiens
  SITE (64): Xaa equals any of the naturally occurring L-amino acids
  SITE (122): Xaa equals any of the naturally occurring L-amino acids
  SITE (123): Xaa equals any of the naturally occurring L-amino acids
GWLAGENRPFSNRNPCVLFSAPSCCRRWGPSHGTVHVPHAGKGMHVQGIPGLLGAQLLTKPGLXVRPWSPAGRSTFRSGDGTRRDGSLPGCFHGHLMKPLLRESDRRDSPSPPPLVSDDHLXXKALRSSERGSVGRCRGRL

SEQ ID NO: 4041 - protein, 245 aa, Homo sapiens
  SITE (86): Xaa equals any of the naturally occurring L-amino acids
  SITE (89): Xaa equals any of the naturally occurring L-amino acids
  SITE (99): Xaa equals any of the naturally occurring L-amino acids
  SITE (116): Xaa equals any of the naturally occurring L-amino acids
  SITE (147): Xaa equals any of the naturally occurring L-amino acids
  SITE (172): Xaa equals any of the naturally occurring L-amino acids
DCEECKKPIESDSKDLCYKDRHWHEGCFKCTKCNHSLVEKPFAAKDERLLCTECYSNECSSKCFHCKRTIMPGSRKMEFKGNYWHXTCXVCENCRQPIXTKPLISKESGNYCVPCXEKEFAHYCNFCKKVITSGGITFCDQLWHKEXFLCSGCRKDLCEEQFMSRDDYPFCXDCYNHLYANKCVACSKPISGLTGAKFICFQDSQWHSECFNCGKCSVSLVGKGFLTQNKEIFCQKCGSGMDTDI

SEQ ID NO: 4042 - protein, 52 aa, Homo sapiens
ISQFSIIYFISNRGDVYSLYVMALVLFLNCFILFNELLDGITSGALAKIIKK

SEQ ID NO: 4043 - protein, 103 aa, Homo sapiens
  SITE (93): Xaa equals any of the naturally occurring L-amino acids
RRGALIPNGESLLKRSPNVELSFPQRSEGSNVFSGRKTGTLFLTSYRVIFITSCSISDPMLSFMMPFDLMTNLTVEQPVFAANFIKGTIQAAXYGGWERTSYF

SEQ ID NO: 4044 - protein, 64 aa, Homo sapiens
  SITE (17): Xaa equals any of the naturally occurring L-amino acids
  SITE (23): Xaa equals any of the naturally occurring L-amino acids
  SITE (56): Xaa equals any of the naturally occurring L-amino acids
GRHYFNEIGQYDKDMDXRGRENXELSLRIWMCGGQLFIIPCSRVGHISKKQTGKPXYNHQCYDT

SEQ ID NO: 4045 - protein, 124 aa, Homo sapiens
  SITE (109): Xaa equals any of the naturally occurring L-amino acids
GQHLFQSPPGGRPHAPFPFGRFLLCVGGGSPSGAGNRGTPAGVSSWTVAILWQDWVATLAQRPDPHAHNFLGFQTYLSFFPQPARNWILKSRSLKIPRICPLPIARALXSKSYPALWRVQCKPH

SEQ ID NO: 4046 - protein, 210 aa, Homo sapiens
  SITE (118): Xaa equals any of the naturally occurring L-amino acids
  SITE (123): Xaa equals any of the naturally occurring L-amino acids
  SITE (138): Xaa equals any of the naturally occurring L-amino acids
  SITE (186): Xaa equals any of the naturally occurring L-amino acids
  SITE (201): Xaa equals any of the naturally occurring L-amino acids
  SITE (205): Xaa equals any of the naturally occurring L-amino acids
GIWKPQMAKLLQPPPKFLPSEWHIANKNQYHRADAQRSRSERLVAESQRLVDEIEKTTRKSQSDVNKKLEQRLEEVQFWKKELDDKLEQLVNVTDDLLIYKIRLEKALETLKEPLHIXETCLXYREKRIGIDLVHDTXEHELIKEAEIIQGIMALLTRTLEEASEQIRMNRSAKYNLEKDLKDKFXALTIDDICFSLNNNXQTSXILRTP

SEQ ID NO: 4047 - protein, 288 aa, Homo sapiens
  SITE (207): Xaa equals any of the naturally occurring L-amino acids
  SITE (237): Xaa equals any of the naturally occurring L-amino acids
  SITE (274): Xaa equals any of the naturally occurring L-amino acids
KFEAMLVQQNRSDKSSCDECKEKKQQIDTVFGEKSVITLSSIFTKDLVEKHNLPWSLGGKTQIEPENKITLCKIHTKSPKCHGTGVQNEGKQPSETPTLSDEKQWHDVSVYLGLTNCPSSKHPEKLDVECQDQMERSEISCCQKNEACLGESGMCDSKCCHPSNFIIEAPGHMSDVEWMSIFKPSKMQRIVRLKSGCTCSESICGTXHDSPASELIAIQDSHSLGSSKSALREDETXSSSNKKNSPTSLLIYKDAPAFNEKASIVLPSQDDFSXTSKLQRLLRNLVRW

SEQ ID NO: 4048 - protein, 181 aa, Homo sapiens
CGSVSQDLRQFWVAEGGTISDPRAADFLFSCDASHPDTLRIYQSLDYIEDNATVFHAYYLSAVANAKIKNSVALGHFILPPACLQKEIRRKIGSFIWEQDQHFLIEKHDEVTPNEIKTLRENSELATEHKKELSKSPEKHFIRTPVVEKQMYFPLQNYPGNNMVTGYISIDAMKEIPWGAT

SEQ ID NO: 4049 - protein, 56 aa, Homo sapiens
  SITE (11): Xaa equals any of the naturally occurring L-amino acids
  SITE (29): Xaa equals any of the naturally occurring L-amino acids
  SITE (53): Xaa equals any of the naturally occurring L-amino acids
ARAARAVSFRXPADVFREFFGGQDPFSFXLLGNPLENILGGSEELLGKQKQSXCTP

SEQ ID NO: 4050 - protein, 79 aa, Homo sapiens
  SITE (51): Xaa equals any of the naturally occurring L-amino acids
  SITE (54): Xaa equals any of the naturally occurring L-amino acids
STPSVYRVCWQHWARAPGMSSQEFMAVSLWRATLQMNFLVEGESDSGRIVXDLXDVFIPFISAHPCQLLCSPLLRSLPE

SEQ ID NO: 4051 - protein, 159 aa, Homo sapiens
  SITE (107): Xaa equals any of the naturally occurring L-amino acids
  SITE (115): Xaa equals any of the naturally occurring L-amino acids
  SITE (124): Xaa equals any of the naturally occurring L-amino acids
  SITE (137): Xaa equals any of the naturally occurring L-amino acids
QKSTKILLPSTGSHASSEIENVREVQRAGILFFRIMLLELQESIQLLNSMEFVSLLLYDHTLVTEPNSPQDSKSMELEANVKLVRDILKAVILFFHPELEFSSDFGXWDKCKFYXNKYLVNNIXAFDPTAKHVEVNXQLIDEYIRDHSQLKYGNLVMVH

SEQ ID NO: 4052 - protein, 46 aa, Homo sapiens
  SITE (14): Xaa equals any of the naturally occurring L-amino acids
KSLAFSQSLSEILXYLGWKTTFLKVGLYSWALLGVLFHLNLNWPGF

SEQ ID NO: 4053 - protein, 157 aa, Homo sapiens
  SITE (55): Xaa equals any of the naturally occurring L-amino acids
  SITE (59): Xaa equals any of the naturally occurring L-amino acids
  SITE (72): Xaa equals any of the naturally occurring L-amino acids
  SITE (155): Xaa equals any of the naturally occurring L-amino acids
KVFLELMESEGPPESESSEFFSQQEEENEEEEAQEPEETGPKNPLLQPALTGDVXGLQXIFEDPENPHHEQXMQLLLEEDIVGRNLLYAACMAGQSDVIRALAKYGVNLNEKTTRGYTLLHCAAAWGRLETLKALVELDVDIRSFELSGRKGSRXCC

SEQ ID NO: 4054 - protein, 203 aa, Homo sapiens
  SITE (185): Xaa equals any of the naturally occurring L-amino acids
SERLRLGGGSNGGGGRLRAPGLRRSSSCPSSHIEGRKDNFGEKMASNNHWFQSSQVPSFAQMLKKNLPVQPATKTITTPTGWSSESYGLSKMASKVTQVTGNFPEPLLSKNLSSISNPVLPPKKIPKEFIMKYKRGEINPVSALHQFAQMQRVQLDLKETVTTGNVMGPYFAFCAVVDGIQYKTXLGQNKKESRSNAAKLALE

SEQ ID NO: 4055 - protein, 90 aa, Homo sapiens
SLLGTHYIPIHDKQPGQKSSLHMCHLVSKTCCPLWTDWPIPDHCSPLSSIPDGNKRDSLTVSKDVILSLTSKFDFIEQPINVVSPSLSSK

SEQ ID NO: 4056 - protein, 151 aa, Homo sapiens
  SITE (14): Xaa equals any of the naturally occurring L-amino acids
  SITE (111): Xaa equals any of the naturally occurring L-amino acids
  SITE (115): Xaa equals any of the naturally occurring L-amino acids
  SITE (138): Xaa equals any of the naturally occurring L-amino acids
  SITE (142): Xaa equals any of the naturally occurring L-amino acids
  SITE (144): Xaa equals any of the naturally occurring L-amino acids
  SITE (146): Xaa equals any of the naturally occurring L-amino acids
HKGGAQKKGRGMGXASPPAPARRHLLVLLLLLSTLVIPSAAAPIHDADAQESSLGLTGLQSLLQGFSRLFLKGNLLRGIDSLFSAPMDFRGLPGNYHKEENQEHQLGNNTXSSHXRSTRYPGWRRRRPWYPSRRPRTXSHRXPXPXGLLDH

SEQ ID NO: 4057 - protein, 50 aa, Homo sapiens
  SITE (50): Xaa equals any of the naturally occurring L-amino acids
GIRHELWSQLLGRLRHKNGLNLGGEGCGEPGSRHCTPAWATEQDRDSISX

SEQ ID NO: 4058 - protein, 163 aa, Homo sapiens
  SITE (29): Xaa equals any of the naturally occurring L-amino acids
  SITE (119): Xaa equals any of the naturally occurring L-amino acids
AIVPVVTSPAMGNYSSHKRTKAPKQARKXRPADMDKAWWKSFLNHLTRKKPATRIVLILPLDKRQPLANAGQRIDYASGAGLGSPAAPRLRGAGEGSEREPRMPVLLLLRRQEARRPEXGGARAALSWPRLLSRFRSPGKAPREAGPAEEQPRKRCRCPRPQL

SEQ ID NO: 4059 - protein, 63 aa, Homo sapiens
TRKNVATFFSYAIRICLFKNISKRLIFNLQCLPLKLIRTNSKSQNSILFSRINNLWVKNHNLF

SEQ ID NO: 4060 - protein, 143 aa, Homo sapiens
  SITE (65): Xaa equals any of the naturally occurring L-amino acids
  SITE (126): Xaa equals any of the naturally occurring L-amino acids
  SITE (131): Xaa equals any of the naturally occurring L-amino acids
NEQQELLQAVQRLWHHGWQDSHLHGRGHRVQQSQGQERPNHHVFNSFKEAVKELGQKRFKGKSPXEVLENIYGLMEGKDPATTGATKATTVGAVDRLTDTSKYTGTHKELFDESGKGKGIAGREEXLDTQXLGSGYKGSGTYH

SEQ ID NO: 4061 - protein, 139 aa, Homo sapiens
  SITE (90): Xaa equals any of the naturally occurring L-amino acids
  SITE (97): Xaa equals any of the naturally occurring L-amino acids
  SITE (106): Xaa equals any of the naturally occurring L-amino acids
  SITE (107): Xaa equals any of the naturally occurring L-amino acids
  SITE (112): Xaa equals any of the naturally occurring L-amino acids
  SITE (116): Xaa equals any of the naturally occurring L-amino acids
  SITE (118): Xaa equals any of the naturally occurring L-amino acids
  SITE (125): Xaa equals any of the naturally occurring L-amino acids
  SITE (127): Xaa equals any of the naturally occurring L-amino acids
  SITE (130): Xaa equals any of the naturally occurring L-amino acids
  SITE (134): Xaa equals any of the naturally occurring L-amino acids
  SITE (136): Xaa equals any of the naturally occurring L-amino acids
  SITE (139): Xaa equals any of the naturally occurring L-amino acids
EMANLRRLLKAAAQSLRTGPLHPLPQVETLPTKGQAPKQALPPPEHPLGATAGRKTQKMTMYLETQGALMPSPRGPLMQRGRPPGCTQKXLLLSKKXPLWAQGLQXXGPVKXMTYXRXRHFGSLXPXEAXGKGXRXWPX

SEQ ID NO: 4062 - protein, 78 aa, Homo sapiens
  SITE (63): Xaa equals any of the naturally occurring L-amino acids
TPKRRNHFTVPEENNSYKFFRQKYRCNCIWEAITLLHRRLEGLGELRELHVENQRLPLGKSFXLIQELFILWQNPSVY

SEQ ID NO: 4063 - protein, 89 aa, Homo sapiens
INRFAFCFLFSIIYAENRLFHSFLSTFLSFFHTFFLSFLSSWFLYASFVTPYSYMSGIHNLFMPLFLCSLIVGPLKFSGILLKGIEYPY

SEQ ID NO: 4064 - protein, 73 aa, Homo sapiens
LAAQSQRTSLDRLYGNTVPRTVAQRQEGEKMHLQAHFVFFLLLVKICWLGQLTPSHIRVVSPGPFGSHWGSQI

SEQ ID NO: 4065 - protein, 48 aa, Homo sapiens
ARAVSVERLQLFIAHLDLVQGHVKEEGALTLLLALSFVTIKFHAIDQI

SEQ ID NO: 4066 - protein, 47 aa, Homo sapiens
  SITE (27): Xaa equals any of the naturally occurring L-amino acids
  SITE (46): Xaa equals any of the naturally occurring L-amino acids
KLPSKPQDSFFPYSQWEPIFLLPHCIXPKSFAVWRQQPRHGISSWXV

SEQ ID NO: 4067 - protein, 77 aa, Homo sapiens
FHFLDDPQSSRSTDLNILRSSLETGLCLSSVKGLLSIHPVGSHYPFRTSVVSWPFHRLFHCPSEAVVSLLPSPTSSD

SEQ ID NO: 4068 - protein, 161 aa, Homo sapiens
  SITE (32): Xaa equals any of the naturally occurring L-amino acids
  SITE (33): Xaa equals any of the naturally occurring L-amino acids
  SITE (152): Xaa equals any of the naturally occurring L-amino acids
  SITE (161): Xaa equals any of the naturally occurring L-amino acids
LKCSGCPSLFSMAEIHTPYSSLKKLLSLLNGXXAVSGIILVGLGIGGKCGGASLTNVLGLSSAYLLHVGNLCLVMGCITVLLGCAGWYGATKESRGTLLFCILSMVIVLIMEVTAATVVLLFFPIVGDVALEHTFVTLRKNYRGYNEPDDYXTQWNLAWRX

SEQ ID NO: 4069 - protein, 104 aa, Homo sapiens
HGVKHLFSNVIETIFISPLLHLLCGDLLISLFLSFFFFSLLPIQSSFFTNIPWGILLSSAEKPVLLKPYFLLPGPVDLLFSLNQEDLSHVTPGVSALYMCTLKV

SEQ ID NO: 4070 - protein, 373 aa, Homo sapiens
  SITE (9): Xaa equals any of the naturally occurring L-amino acids
  SITE (13): Xaa equals any of the naturally occurring L-amino acids
  SITE (19): Xaa equals any of the naturally occurring L-amino acids
  SITE (21): Xaa equals any of the naturally occurring L-amino acids
  SITE (113): Xaa equals any of the naturally occurring L-amino acids
  SITE (206): Xaa equals any of the naturally occurring L-amino acids
  SITE (306): Xaa equals any of the naturally occurring L-amino acids
WPALLSQLXCPPXPKPVNXTXGSSSRISGTLRITIALIRNWITFPFSWGSLPFLKNSSHQVTEQQTAQKFNNLLKEIKDILKNMAGFEEKITEAKELFEETNITEDVSAHKEXIRGLDKINEMLSTNLPVSLAPEKEDNEKKQEMILETNITEDVSAHKENIRGLDKINEILSTNLPVSLAPEKEDNEKKQQMIMENQNSENTAQXFARDLVNRLEEKKVLNETQQSQEKAKNRLNVQEETMKIRNNMEQLLQEAEHWSKQHTELSKLIKSYQKSQKDISETLGNNGVGFQTQPNNEVSAKHELEXQVKKLSHDTYSLQLMAALLENECQILQQRVEILKELHHQKQGTLQEKPIQINYKQDKKNQKPSEAKK

SEQ ID NO: 4071 - protein, 93 aa, Homo sapiens
  SITE (38): Xaa equals any of the naturally occurring L-amino acids
FGRVTFAHFTQILWASRLTPRFLICHLIAADDIPPRQXRITMPIGQPSKIKLKEFEITFMAWQAESKLALDSCSLISMHCISHPLRAGGTWGI

SEQ ID NO: 4072 - protein, 88 aa, Homo sapiens
GSFCPARSRERETLRGRDKETWRQGLGGAGPAPRVEPGGSQAGGIHWLRDQTLPMPTPVAGGRGPGLAQGSPVPASVRAAGLCRTVLP

SEQ ID NO: 4073 - protein, 111 aa, Homo sapiens
  SITE (65): Xaa equals any of the naturally occurring L-amino acids
NSAELLGRKKLARAPGLCPRDACARAPSPRGLIVHPPAWAAGQGRGRVGPQPVPSSPPGAPPWLXAPPRVGVFGLHLSPGAEVETRQSSGLPPRCLWTGSRVCMAPRGSGE

SEQ ID NO: 4074 - protein, 54 aa, Homo sapiens
SLGRWGRCWVGSLELQSVIQRSGPVRGFTGRGMSSYERRLSAGLWGALGMYGLP

SEQ ID NO: 4075 - protein, 44 aa, Homo sapiens
  SITE (33): Xaa equals any of the naturally occurring L-amino acids
ARRCQRGVTGSSCMGQEQGHHGQEEQGLSRSTXRSREDPWPVSF

SEQ ID NO: 4076 - protein, 99 aa, Homo sapiens
  SITE (87): Xaa equals any of the naturally occurring L-amino acids
EATPSLPQENDNLFFVNPIPLGKALTCCTVEVRTLDDRLLNIPINDIIHPKYFKKVPGEGMPLPEDPTKKGDLFIFFDIQFPTRLTXQKKQMLRQALLT

SEQ ID NO: 4077 - protein, 148 aa, Homo sapiens
  SITE (137): Xaa equals any of the naturally occurring L-amino acids
  SITE (143): Xaa equals any of the naturally occurring L-amino acids
GLKPGKFLTGYFSWQSSQDERLTVDSMRRKNYKALCQMYEKIQPLLENLHRNFTETRNNIARDIQKIYDKDPLGNVLIDKKRLEKILLLSYVCNTQAEYQQGFHEMMMLFQLMVEHDHETFWLFQFFLQKTEHSCVXQHWAWXRNLGH

SEQ ID NO: 4078 - protein, 148 aa, Homo sapiens
PSWQSLWTNMLEPLGSKTETLDLRAEMPITCPTQNEPFLRTPRNSNYTYPIKPAIENWGSDFLCTEWKASNSVPTSVHQLRPADIKVVAALGDSLTTAVGARPNNSSEPTHILEGTLLGALEGMGNLGDSHHTAQHSEEVQPLPPWLL

SEQ ID NO: 4079 - protein, 62 aa, Homo sapiens
VTSLRSHSICLLKLGLDLRHLEPKASRTLHVCLLAAKDSFPSYRGWPLVWGHTGGSQATCPR

SEQ ID NO: 4080 - protein, 110 aa, Homo sapiens
  SITE (100): Xaa equals any of the naturally occurring L-amino acids
  SITE (101): Xaa equals any of the naturally occurring L-amino acids
PASGKNSPGLFAHKTVIRMHHHRPHRGAVRFPTQLLGALLACSQPFLPLSDIRSLDPGMRRWTSRRWACERQPGVQILLALQLSGLVNISGALHLPIWQXXACSSSRKLP

SEQ ID NO: 4081 - protein, 77 aa, Homo sapiens
ARAGSEAQERERRPTKGWLESQGHELSGKCDPGHGLVHHPDLHLFLQQGSAVRRHRTSPHKSPASPSAIALRPDKCN

SEQ ID NO: 4082 - protein, 91 aa, Homo sapiens
  SITE (60): Xaa equals any of the naturally occurring L-amino acids
  SITE (68): Xaa equals any of the naturally occurring L-amino acids
SKAHSWRGCHCLHRTLPSQGPGTAPDALREWPTLGLYPLQPVIYPKSQGPKAPRFRVLRXTREHASCXPGKPSLTFNLNGFSRTSLAGNHF

SEQ ID NO: 4083 - protein, 196 aa, Homo sapiens
  SITE (38): Xaa equals any of the naturally occurring L-amino acids
QSGEVGADHINILALGWVGVEPQKCSQAHSYQEPMSKXRGLPPEVREPGPGVELGVENGLLCQLIHSPEFNLFSNSVVFESNFIQVTKPGNWRDVCEGSATVILGVTSSVPSLPLPNVLLMANVTWPQGPFTTWSTTGDAPVINLSRLLPLKYVELRIYDWLQRILRVRTVTEKIYYLKLHEKHPEIGGFNSGSPW

SEQ ID NO: 4084 - protein, 35 aa, Homo sapiens
  SITE (11): Xaa equals any of the naturally occurring L-amino acids
AEVLSFGWDCXPHRTVWERPHAFCADLRLKPSSCF

SEQ ID NO: 4085 - protein, 353 aa, Homo sapiens
  SITE (2): Xaa equals any of the naturally occurring L-amino acids
  SITE (8): Xaa equals any of the naturally occurring L-amino acids
  SITE (21): Xaa equals any of the naturally occurring L-amino acids
  SITE (24): Xaa equals any of the naturally occurring L-amino acids
VXLGRPAXPTPWPPSWAASPXKPXTSGQSGLQTFIGEAARVLPELTLVQPLRSGIVVDWDAAELIWRHLLEHDLRVATHDHPLLFSDPPFSPATNREKLVEVAFESLRSPAMYVASQSVLSVYAHGRVSGLVVDTGHGVTYTVPVFQGYNLLHATERLDLAGNHLTAFLAEMLLQAGLPLGQQDLDLVENIKHHYCYVAFDFQKEQARPEQEYKRTLKLPDGRTVTLGKELFQCPELLFNPPEVPGLSPVGLSTMAKQSLRKLSLEMRADLAQNVLLCGGSSLFTGFEGRFRAELLRALPAETHVVVAAQPTRNFSVWIGGSILASLRAFQSCWVLREQYEEQGPYIVYRKCY

SEQ ID NO: 4086 - protein, 37 aa, Homo sapiens
  SITE (29): Xaa equals any of the naturally occurring L-amino acids
  SITE (35): Xaa equals any of the naturally occurring L-amino acids
GSRSRIKWDVLGRKTNKRPTRWSENGIRXQLCSIXTF

SEQ ID NO: 4087 - protein, 92 aa, Homo sapiens
ALLPVSLLASSFMTEVVVALLMCPLPLNSNGAEMWRQLILCKPSCDVRDLLDLLLGSLKEKPVTKEGRASIVPLAPRPVRAPVRQQLHGGGG

SEQ ID NO: 4088 - protein, 100 aa, Homo sapiens
  SITE (56): Xaa equals any of the naturally occurring L-amino acids
  SITE (87): Xaa equals any of the naturally occurring L-amino acids
PLHHLLNQRGLQSKPHFCTPESWKCWFGFRGVLRREEGTGRPIAVREPYRSPGDGXPGPHPRRPQGAAGTLGHCGLGGGSYPGAGKXVVDSQLQPLPLGH

SEQ ID NO: 4089 - protein, 267 aa, Homo sapiens
  SITE (115): Xaa equals any of the naturally occurring L-amino acids
RAPDHRPLLPRPSDQLGPCAHLASTFPLLSPTPLAMANYYEVLGVQASASPEDIKKAYRKLALRWHPDKNPDNKEEAEKKFKLVSEAYEVLSDSKKRSLYDRAGCDSWRAGGGAXTPYHSPFDTGYTFRNPEDIFREFFGGLDPFSFEFWDSPFNSDRGGRGHGLRGAFSAGFGEFPAFMEAFSSFNMLGCSGGSHTTFSSTSFGGSSSGSSGFKSVMSSTEMINGHKVTTKRIVENGQERVEVEEDGQLKSVTVNGKEQLKWMDSK

SEQ ID NO: 4090 - protein, 54 aa, Homo sapiens
HERIQGSGTLHGFSHLPGSWNISLMDEGELLYSYGVKDEFLGVLSNELFAGRVK

SEQ ID NO: 4091 - protein, 90 aa, Homo sapiens
  SITE (11): Xaa equals any of the naturally occurring L-amino acids
  SITE (46): Xaa equals any of the naturally occurring L-amino acids
SSNGQICHTVXFIQSCVLLLKAKESSLMHRMKIQNAHKMKEAGAEXPSFYSALLRIQPKIVHCWRPMRRTFKSYDEAGTGLLTSQISGRS

SEQ ID NO: 4092 - protein, 90 aa, Homo sapiens
  SITE (33): Xaa equals any of the naturally occurring L-amino acids
  SITE (35): Xaa equals any of the naturally occurring L-amino acids
ARARTSAGRSSPTWLGRHHGLPRPEHHLLRLSXTXHPRCSWASPYDPKKYDVWSMGFVLLRHGHRVHALRRIRTSPACPGARNAALFYSR

SEQ ID NO: 4093 - protein, 142 aa, Homo sapiens
NHRAGEGQLGVTRSLMGRKEHESPSQPHLCGWEDSQKPSVPSHGPKTPSCKGVKAPHSSRPRAWKQDLEQSLAAAYVPVVVDSKGQNPDKLRFNFYTSQYSNSLNPFYTLQKPTCGYLYRRDTDHTRKRFDVPPANLVLWRS

SEQ ID NO: 4094 - protein, 115 aa, Homo sapiens
  SITE (54): Xaa equals any of the naturally occurring L-amino acids
  SITE (65): Xaa equals any of the naturally occurring L-amino acids
  SITE (72): Xaa equals any of the naturally occurring L-amino acids
KGLLRGKALLLQLRELRKSLYQTLPPREPPAQHTGERPYSCNWESCSWSFFRSXELRRHMRVHTXYRPYKCXQCSREFMRSDHLKQHQKTHRPGPSDPQANNNNGEQDSPPAAGP

SEQ ID NO: 4095 - protein, 71 aa, Homo sapiens
  SITE (26): Xaa equals any of the naturally occurring L-amino acids
  SITE (59): Xaa equals any of the naturally occurring L-amino acids
GWRPVPAHHVIVTVPLGLSTFSVGSXPDLSLSSWRLCRMKKYFVSHPSAPESDRKPTAXRAQERPAVSLAQ

SEQ ID NO: 4096 - protein, 199 aa, Homo sapiens
  SITE (31): Xaa equals any of the naturally occurring L-amino acids
  SITE (37): Xaa equals any of the naturally occurring L-amino acids
PPALPYPLKKKNGKILYECNICGKSFGQLSXLKVHLXVHSGERPFQCALCQKSFTQLAHLQKHHLVHTGERPHKCSVCHKRFSSSSNLKTHLRLHSGARPFQCSVCRSRFTQHIHLKLHHRLHAPQPCGLVHTQLPLASLACLAQWHQGALDLMAVASEKHMGYDIDEVKVSSTSQGKARAVSLSSAGTPLVMGQDQNN

SEQ ID NO: 4097 - protein, 64 aa, Homo sapiens
  SITE (14): Xaa equals any of the naturally occurring L-amino acids
  SITE (48): Xaa equals any of the naturally occurring L-amino acids
GTRERERESRHMVXSIVGHLKFQASFSRGQPEEVLCGGGGPVQAGGPXAALPFRAWADHRVGLR

SEQ ID NO: 4098 - protein, 143 aa, Homo sapiens
  SITE (1): Xaa equals any of the naturally occurring L-amino acids
  SITE (2): Xaa equals any of the naturally occurring L-amino acids
XXRHAGGLHPAGLQASDLSRCLHSHLHPCDQYLGDQRPPQGDPPDRAHPQGPEPAATLPDRPGGGVSAARREHPGPAVCQRHPGVVQAEVAGGAGQAGREDEGADDGEGAAPAAAAAARACVLHLLCPVRALGSRQDGTALST

SEQ ID NO: 4099 - protein, 75 aa, Homo sapiens
  SITE (34): Xaa equals any of the naturally occurring L-amino acids
  SITE (47): Xaa equals any of the naturally occurring L-amino acids
  SITE (70): Xaa equals any of the naturally occurring L-amino acids
LLSSTTDLRAGALKEHSHPSIALEARRWAEPCQXKAEPGGRSLRFLXAWLRSPPASCKRPACLKTGRPKXAGNFP

SEQ ID NO: 4100 - protein, 123 aa, Homo sapiens
  SITE (71): Xaa equals any of the naturally occurring L-amino acids
  SITE (75): Xaa equals any of the naturally occurring L-amino acids
  SITE (78): Xaa equals any of the naturally occurring L-amino acids
LVWQPAHAWGRMYYSNGDIYEGQWENDKPNGEGMLRLKNGNRYEGCWERGMKNGAGRFFHLDHGQLFEGFXVDNXAKXGTMIDFGRDEAPEPTQFPIPEVKILDPDGVLAEALAMFRKTEEGD

SEQ ID NO: 4101 - protein, 191 aa, Homo sapiens
  SITE (118): Xaa equals any of the naturally occurring L-amino acids
  SITE (169): Xaa equals any of the naturally occurring L-amino acids
GHEPRGRTGYYLFTQGKKGRLTSLTNISNMEIMPEGSLLIKDPLPSQTGLYHCWNKNGRQVVQYEIDFQDVTTLHITHKDLGQRPLQNETLHLGSKQLIFTWWEPWQDCNRCEEPGEXKRLGYRYIEEPLEEAMPCWLYLGEVLVWSSRLRPELQVEACHVQCTNNTQXRVDYVFLTLQLDEKQNLVARCP

SEQ ID NO: 4102 - protein, 278 aa, Homo sapiens
  SITE (17): Xaa equals any of the naturally occurring L-amino acids
  SITE (176): Xaa equals any of the naturally occurring L-amino acids
GTSPFKHESYHQRSPSXLLALPAWCRVLETFLELIQQPSCKVVLGTALLLGGGGLMLWVQRKRRRKETSECPSDKDKSPESHKAKNESWIKSHFSRLSEEKLALDNNASASGNATQTESGSEEVSSTVHIETFTTRHGEVGSALHRESFTSRQKTSGPSVIQEIHQESGKAPSTDXATWAAVAACTKEIDTQGRHLAHSMLQRAIAYQHSGHLESKDINQEELRALEEVEMKLQKNFLTQRENTIAGANHTHTFYGHSHHSHHGHPSHQSHSLPNRRH

SEQ ID NO: 4103 - protein, 390 aa, Homo sapiens
ARAHTPGPARTRQLLEAPPGPTSTRHLEPLAPMDPLRRSPSPCLSSQPSSPSTPPCEMLGPVGIEAVLDQLKIKAMKMGFEFNIMVVGQSGLGKSTMVNTLFKSKVWKSNPPGLGVPTPQTLQLHSLTHVIEEKGVKLKLTVTDTPGFGDQINNDNCWDPILGYINEQYEQYLQEEILITRQRHIPDTRVHCCVYFVPPTGHCLRPLDIEFLQRLCRTVNVVPVIARADSLTMEEREAFRRRIQQNLRTHCIDVYPQMCFDEDINDKILNSKLRDRIPFAVVGADQEHLVNGRCVLGRKTKWGIIEVENMAHCEFPLLRDLLIRSHLQDLKDITHNIHYENYRVIRLNESHLLPRGPGWVNLAPASPGQLTTPRTFKVCRGAHDDSDDEF

SEQ ID NO: 4104 - protein, 109 aa, Homo sapiens
  SITE (15): Xaa equals any of the naturally occurring L-amino acids
LTGSSRSSPVPSLLXFNSMILYCVPKLRLMGQKFSVREKMDISGLQVQDIVKPNTAHTFIITGRKRSLELQTRTEEEKKEWIQIIQATIEKHKQNSETFKAFGGAFSQV

SEQ ID NO: 4105 - protein, 155 aa, Homo sapiens
  SITE (30): Xaa equals any of the naturally occurring L-amino acids
  SITE (65): Xaa equals any of the naturally occurring L-amino acids
  SITE (110): Xaa equals any of the naturally occurring L-amino acids
SLPSHPTPFGCSGAHPQCLEVEESSSAPQXGEDSVQMSITCDCKEPDKCCWRHKQCTGHIIYPFXSDCVRHSLHLHSVNHCNCNSRLKDSSEDSSSSRGAGPTCFHVIEXPCFELTTEEEHVERFRYCWCKSYRPVSVAVIHHSLYHECWADDLN

SEQ ID NO: 4106 - protein, 156 aa, Homo sapiens
  SITE (98): Xaa equals any of the naturally occurring L-amino acids
  SITE (99): Xaa equals any of the naturally occurring L-amino acids
  SITE (108): Xaa equals any of the naturally occurring L-amino acids
EPRPTYFISSTVGKRCPEAADAGDTRKWTLVGHELLNTEAPLKLVNPLKHGIVVDWDCVQDIWEYIFRTAMKILPEEHAVLVSDPPLSPSSNREKYAXXMFETFGIPXMHVTSQSLLSIYSYGKTSGLVVESGHGVSHVVPISEGDVLPGLTSRAD

SEQ ID NO: 4107 - protein, 83 aa, Homo sapiens
  SITE (78): Xaa equals any of the naturally occurring L-amino acids
APAHLTQARPGFLGSQCSRSRPTPPPPSSHPHGSGTQPLSSLGLLGYLAQVGLTCPFPGSSRDKLVDTQRQSYSVPHXPCVFP

SEQ ID NO: 4108 - protein, 163 aa, Homo sapiens
  SITE (117): Xaa equals any of the naturally occurring L-amino acids
  SITE (136): Xaa equals any of the naturally occurring L-amino acids
SLAHPRARQGARLLSQVAESPIPGLRRRPQPFARGGLPLSKGHWEWDGLISGVAFYWALQTVLGKGSRLRQLGVKFLGRRSCAAPPAPVRPRQPPTLVSPSPLTPPTAPSRGCHRLXMLQLSTCWVSLWGTVSARXGWLWLLVSLGGAVRWIREEAPRGELSV

SEQ ID NO: 4109 - protein, 141 aa, Homo sapiens
AVIETLNKALDLQSRILKRVPLEQPEMIPSQKQLAASICIQFAEHYLAEKEYDKAVQSYKDVFSYLPTDNKVMLELAQSYLLQGHLDLCEQHCAILLQTEQNHETASVLMADLMFRKQNMKRPSIFTTKSWRKRQTIFWYS

SEQ ID NO: 4110 - protein, 58 aa, Homo sapiens
  SITE (28): Xaa equals any of the naturally occurring L-amino acids
  SITE (56): Xaa equals any of the naturally occurring L-amino acids
HRLCGCHFSPTFLLDLENGLGPGMIAHXCNPSSWEAKEGGSLEPRSLRTAWATWWXPV

SEQ ID NO: 4111 - protein, 138 aa, Homo sapiens
  SITE (88): Xaa equals any of the naturally occurring L-amino acids
  SITE (120): Xaa equals any of the naturally occurring L-amino acids
  SITE (131): Xaa equals any of the naturally occurring L-amino acids
GTRLLACHPSPLTRGQVTLGPECLRSQCEGSSLARGGAQGGSGPALVSGGSLRILLLTFFLPGRSQPGTDRSCLARGPALRNLGRNVXSPHMGRGPIPSGPLGGDRVSSSSHGTGTGSVXVPRDRAMSKVXFYSKLEN

SEQ ID NO: 4112 - protein, 62 aa, Homo sapiens
  SITE (18): Xaa equals any of the naturally occurring L-amino acids
LRRSPFPRCSLSVPGAFXGTLWICFLISLWGTAWGASRFSLKDRAGRTLSSLQICPESPRCR

SEQ ID NO: 4113 - protein, 69 aa, Homo sapiens
  SITE (45): Xaa equals any of the naturally occurring L-amino acids
SGAKVKRSQLVFSSETVDFGLLQERVCVCVYVCACAISLFYCHVXGLAWLMNRAVLYFPATPAHAFLPP

SEQ ID NO: 4114 - protein, 335 aa, Homo sapiens
  SITE (2): Xaa equals any of the naturally occurring L-amino acids
  SITE (279): Xaa equals any of the naturally occurring L-amino acids
  SITE (309): Xaa equals any of the naturally occurring L-amino acids
  SITE (312): Xaa equals any of the naturally occurring L-amino acids
  SITE (314): Xaa equals any of the naturally occurring L-amino acids
  SITE (319): Xaa equals any of the naturally occurring L-amino acids
RXQEQFGGNPFATATTDNATTTTSQPSRMENCDPLPNPWTSTHGGSGSRQGRQDGDQDAPDIRNRFPNFLGIIRLYDYLQQLHENPQSLGTYLQGTASALSQSQEPPPSVNRVPPSSPSSQEPGSGQPLPEESVAIKGRSSCPAFLRYPTENSTGQGGDQDGAGKSSTGHSTNLPDLVSGLGDSANRVPFAPLSFSPTAAIPGIPEPPWLPSPAYPRSLRPDGMNPAPQLQDEIQPQLPLLMHLQAAMANPRALQALRQIEQGLQVLATEAPRLLLWFXPCLAGTGSVARGIESREDPLCLRILSKSTXEGXQXWTLQXWASFPSFLPYAGRNLS

SEQ ID NO: 4115 - protein, 37 aa, Homo sapiens
  SITE (9): Xaa equals any of the naturally occurring L-amino acids
  SITE (26): Xaa equals any of the naturally occurring L-amino acids
SGGGLTVCXLFDVGWGGQKEGSGHCXGNMGAPLARGP

SEQ ID NO: 4116 - protein, 176 aa, Homo sapiens
  SITE (48): Xaa equals any of the naturally occurring L-amino acids
  SITE (92): Xaa equals any of the naturally occurring L-amino acids
  SITE (103): Xaa equals any of the naturally occurring L-amino acids
  SITE (119): Xaa equals any of the naturally occurring L-amino acids
  SITE (121): Xaa equals any of the naturally occurring L-amino acids
  SITE (141): Xaa equals any of the naturally occurring L-amino acids
  SITE (153): Xaa equals any of the naturally occurring L-amino acids
  SITE (172): Xaa equals any of the naturally occurring L-amino acids
  SITE (174): Xaa equals any of the naturally occurring L-amino acids
GRGEPDPHTMASVVVKTIWQSKEIHEAGDTPTGCRSCSQLVPEAPRSXPAGPRGSRRKRRPCRSRGGAQMSHQPMHWCLNLKRSSACTNVFXVQPGRHGAHWXPRGQIPQWKTFSGQFXLXGPLASLTLPWDPDDADITEXLSWGSTVVLVPXQRFPLTILKGKDQPGLNQXVXFF

SEQ ID NO: 4117 - protein, 98 aa, Homo sapiens
RVSCLGREVTATMSLGIMEEEDLAEYFRLQYGERLLQMLQKLPNVEGASESPSIWLLEKKKETEIMHQTMVQKKKMFQRRMGNPGTCAGRNWALRKPN

SEQ ID NO: 4118 - protein, 267 aa, Homo sapiens
  SITE (248): Xaa equals any of the naturally occurring L-amino acids
  SITE (262): Xaa equals any of the naturally occurring L-amino acids
  SITE (263): Xaa equals any of the naturally occurring L-amino acids
  SITE (264): Xaa equals any of the naturally occurring L-amino acids
ARGEVRYVKEPYIQSRFYRAPEILLGLPFCEKVDVWSLGCVMAELHLGWPLYPGNNEYDQVRYICETQGLPKPHLLHAACKAHHFFKRNPHPDAANPWQLKSSADYLAETKVRPLERRKYMLKSLDQIETVNGGSVASRLTFPDREALAEHADLKSMVELIKRMLTWESHERISPSAALRHPFVSMQQLRSAHETTHYYQLSLRSYRLSLQVEGKPPTPVVAAEDGTPYYCLAEEKEAAGMGSVAGSXPFFREEKAPGMQRXXXPAG

SEQ ID NO: 4119 - protein, 102 aa, Homo sapiens
  SITE (87): Xaa equals any of the naturally occurring L-amino acids
AREKAVKFLANFYINGGKHWTHGHLRQTQPEPTQPKASVLLLGPEPGMAWDETQPPKMKEIPVGLRLQTGTPQESLPTYTQTLRELXGGGRRHGRLCGSRAK

SEQ ID NO: 4120 - protein, 110 aa, Homo sapiens
  SITE (49): Xaa equals any of the naturally occurring L-amino acids
  SITE (107): Xaa equals any of the naturally occurring L-amino acids
ARGPYGDFHDGQCGGFIRALLPGNTPGAPYARQPDGASVHWLPPRQAPXFDITYTLEYSRLKNKHYFDCVKRGTRRMPCFLFRDIFLPLVLDSRFGGQEIPAFSRAXMFC

SEQ ID NO: 4121 - protein, 67 aa, Homo sapiens
  SITE (22): Xaa equals any of the naturally occurring L-amino acids
GFPGNRSQGHPGGMTQLPRALXAQGAAGTMNRAPPWFQALGQTGTCGARTQEDPEEMEGSKQNHAQW

SEQ ID NO: 4122 - protein, 35 aa, Homo sapiens
DTSNYSLGLVLPPYSTFYLQANLSDQILQVKYFEF

SEQ ID NO: 4123 - protein, 166 aa, Homo sapiens
  SITE (151): Xaa equals any of the naturally occurring L-amino acids
  SITE (155): Xaa equals any of the naturally occurring L-amino acids
GDGRAQAMERNDIINFKALEKELQAALTADEKYKRENAAKLRAVEQRVASYEEFRGIVLASHLKPLERKDKMGGKRTVPWNCHTIQGRTFQDVATEISPEKAPLQPETSADFYRDWRRHLPSGPERYQALLQLGGPRLGCLFQTECGIWTXLGNXWWHLLDTWGPA

SEQ ID NO: 4124 - protein, 47 aa, Homo sapiens
RGGGRPGTPGRGEASAGRGLWRSSDSRPCPLSSALGCPTAQSLHAPW

SEQ ID NO: 4125 - protein, 152 aa, Homo sapiens
  SITE (4): Xaa equals any of the naturally occurring L-amino acids
  SITE (43): Xaa equals any of the naturally occurring L-amino acids
  SITE (123): Xaa equals any of the naturally occurring L-amino acids
  SITE (142): Xaa equals any of the naturally occurring L-amino acids
GHVXQNQVYKGLIALLPCESPKAQQLSLQTLRTAQPIIGTTHXSIVDCVLKVLGTMHLEVQYEAIELIKDLVGYDVRQALLKGLVALLIPSVKEISKLQAKILSDPSVLQLTPSLPMFLQQAXAQGIGVLRERHEMRGALTXVCVANGRHGN

SEQ ID NO: 4126 - protein, 88 aa, Homo sapiens
  SITE (11): Xaa equals any of the naturally occurring L-amino acids
ASSWRLRPPPXQALSPQKQSFVLEVLSGCLEYRKLLTVVVDAFYVEDGRLCLRVDHSRFEVICYLATFLLEELGFQLFCNIIKSQPVG

SEQ ID NO: 4127 - protein, 147 aa, Homo sapiens
  SITE (9): Xaa equals any of the naturally occurring L-amino acids
  SITE (10): Xaa equals any of the naturally occurring L-amino acids
  SITE (11): Xaa equals any of the naturally occurring L-amino acids
  SITE (60): Xaa equals any of the naturally occurring L-amino acids
  SITE (87): Xaa equals any of the naturally occurring L-amino acids
HECCPAQPXXXLHQNWQAGLPLRRGWGRRGRGGTLSSPRGRSRQPSSVELDGPRKVASHXAAASTLWSLRGGPRRAGLGPGPWAPHXPHGGSWRPLQSPKGLGRSWAVRVSSAGWSAVMCQPRHSYDVLHDIELPQEMGTATSLEIF

SEQ ID NO: 4128 - protein, 201 aa, Homo sapiens
  SITE (111): Xaa equals any of the naturally occurring L-amino acids
  SITE (127): Xaa equals any of the naturally occurring L-amino acids
  SITE (128): Xaa equals any of the naturally occurring L-amino acids
  SITE (163): Xaa equals any of the naturally occurring L-amino acids
  SITE (176): Xaa equals any of the naturally occurring L-amino acids
ARVLGSHPGDTGEPEGQREKGKVEQPQEEDGITSDPGLLSYIDKLCSQEDFVTKVEAVIHPRFLEELLSPDPQMDFLALSQELEQEEGLTLAQLVEKRLLSLKEKGCGRAXPRHGTARLDSSPSEFXXGQEAAREVPDPQQRVNGGNLPPQTGCPGTLRDRAXCALAWPGPKTLLXFWDVKDSPRLERLSGQPLLPRTTRP

SEQ ID NO: 4129 - protein, 56 aa, Homo sapiens
  SITE (19): Xaa equals any of the naturally occurring L-amino acids
  SITE (21): Xaa equals any of the naturally occurring L-amino acids
  SITE (30): Xaa equals any of the naturally occurring L-amino acids
  SITE (52): Xaa equals any of the naturally occurring L-amino acids
RWSSNAFNLAVAEGGELPXWXLMGKRTVIXHCMVGQVVYCTRVSSQAVALAXEKTD

SEQ ID NO: 4130 - protein, 94 aa, Homo sapiens
  SITE (88): Xaa equals any of the naturally occurring L-amino acids
  SITE (91): Xaa equals any of the naturally occurring L-amino acids
CAHCPVAWAPDTDDEKPHQYPAICSYHWDVPEDWEGFQHTQGTWVPWSQDAPESPPQTIRFQPTVEERPLKTGIWSELGLRAYVYPVXPPXSQP

SEQ ID NO: 4131 - protein, 244 aa, Homo sapiens
EGKAAGMFNPHALDSPAVIFDNGSGFCKAGLSGEFGPRHMVSSIVGHLKFQAPSAEANQKKYFVGEEALYKQEALQLHSPFERGLITGWDDVERLWKHLFEWELGVKPSDQPLLATEPSLNPRENREKMAEVMFENFGVPAFYLSDQAVLALYASACVTGLVVDSGDAVTCTVPIFEGYSLPHAVTKLHVAGRDITELLMQLLLASGTPSPASWTRVSWTTSKRSCATWPWSPRRSFPGGRRRS

SEQ ID NO: 4132 - protein, 275 aa, Homo sapiens
  SITE (233): Xaa equals any of the naturally occurring L-amino acids
  SITE (239): Xaa equals any of the naturally occurring L-amino acids
  SITE (240): Xaa equals any of the naturally occurring L-amino acids
  SITE (241): Xaa equals any of the naturally occurring L-amino acids
  SITE (243): Xaa equals any of the naturally occurring L-amino acids
  SITE (251): Xaa equals any of the naturally occurring L-amino acids
  SITE (252): Xaa equals any of the naturally occurring L-amino acids
  SITE (261): Xaa equals any of the naturally occurring L-amino acids
  SITE (263): Xaa equals any of the naturally occurring L-amino acids
  SITE (265): Xaa equals any of the naturally occurring L-amino acids
  SITE (270): Xaa equals any of the naturally occurring L-amino acids
GLLVDTARTWLPTQPQRKCAVRVQSRPTPILPLIYIRENVSACAGLHNSIRSLEHVQAQLTLSYSRRGDLEISLTSPMGTRSTLVAIRPLDVSTEGYNNWVFMSTHFWDENPQGVWTLGLENKGYYFNTGTLYRYTLLLYGTAEDMTARPTGPQVTSSACVQRDTEGLCQACDGPAYILGQLCLAYCPPRFFNHTRLVTAGPGHTAAPALRVCSSCMPPATPAAAAPRGTAPXVPHPSXXXKXQGLLHGTXXPRQPAPGFXTXPXGPQQXVGPSL

SEQ ID NO: 4133 - protein, 37 aa, Homo sapiens
HAGTSAVGGFPSEGLCLETSRRSSVPGLRRSCVFLDQ

SEQ ID NO: 4134 - protein, 91 aa, Homo sapiens
  SITE (37): Xaa equals any of the naturally occurring L-amino acids
  SITE (57): Xaa equals any of the naturally occurring L-amino acids
  SITE (75): Xaa equals any of the naturally occurring L-amino acids
  SITE (79): Xaa equals any of the naturally occurring L-amino acids
  SITE (87): Xaa equals any of the naturally occurring L-amino acids
GTSLTGEAQSRWPRRGGSGAMAEAPGPSGESRGHSAXQLPAEKTVGGPSRGCSSSVXQSVPVGAPGHLHSQRADXGTSXRRSSETPXTNAA

SEQ ID NO: 4135 - protein, 121 aa, Homo sapiens
HPPHSTACQVHHQHRGGSDNQETMSSDDKSKSNDPKTEPKNCDPKCEQKCESKCQPSCLKKLLQRCFEKCPWEKCPAPPKCLPCPSQSPSSCPPQPCTKPCPPKCPSSCPHACPPPCPPPE

SEQ ID NO: 4136 - protein, 115 aa, Homo sapiens
  SITE (2): Xaa equals any of the naturally occurring L-amino acids
  SITE (27): Xaa equals any of the naturally occurring L-amino acids
  SITE (54): Xaa equals any of the naturally occurring L-amino acids
  SITE (60): Xaa equals any of the naturally occurring L-amino acids
  SITE (80): Xaa equals any of the naturally occurring L-amino acids
  SITE (115): Xaa equals any of the naturally occurring L-amino acids
GXGRLPGLAAFKMRLMISTFFSPTFLXRMASALQHLAHVAPHGPVLCCCEVDLXTQHRSXRRGAREALHSPGRQPVTLLXEPGAKVWGAQAILILPGPRFRSGVVPMLPLRTLDX

SEQ ID NO: 4137 - protein, 65 aa, Homo sapiens
  SITE (4): Xaa equals any of the naturally occurring L-amino acids
AEAXWHKVHSEAERLEARFQDVRGQLEKLKADIQLLFTKAHCDSSMIDDLLGVKTSMGDRDMGLF

SEQ ID NO: 4138 - protein, 43 aa, Homo sapiens
RECDVTRPQRAQPPGWTGNPGSPFLEGDISAWHIVDAQRTSAD

SEQ ID NO: 4139 - protein, 74 aa, Homo sapiens
  SITE (74): Xaa equals any of the naturally occurring L-amino acids
FYSWRAQWSRAIWDARKVEGAPLPGHVVSRKMAKAGCPEWKGWQHVPGWDSDLKMRSLGWAGRSGREGPTSRVX

SEQ ID NO: 4140 - protein, 111 aa, Homo sapiens
  SITE (86): Xaa equals any of the naturally occurring L-amino acids
  SITE (110): Xaa equals any of the naturally occurring L-amino acids
AWTWDQEGVAGRDGGAENPGPLRPPPPPVSPNPSLQQPWRRPGPALPGFVGWPCLGPISSAHSVQSQRPFPVPGAGGSGPTVGGRXSRVFLFQPGAESERHLGAETRRPXR

SEQ ID NO: 4141 - protein, 83 aa, Homo sapiens
  SITE (37): Xaa equals any of the naturally occurring L-amino acids
  SITE (61): Xaa equals any of the naturally occurring L-amino acids
EEGAPPWEPDPHTMASVVVKTIWQSKEIHEAGDTPTXVESCSQLVPEAPRRVTSRPRGSRXKRRPCRSTGWSPRCPISPCTGA

SEQ ID NO: 4142 - protein, 69 aa, Homo sapiens
  SITE (37): Xaa equals any of the naturally occurring L-amino acids
SRHTIIVVEITALGVRPCPAPPLSSCVFLGEPLSHLXLGFHICAGGEQQCPPRSVAVWMNYGLHMVGAA

SEQ ID NO: 4143 - protein, 143 aa, Homo sapiens
  SITE (82): Xaa equals any of the naturally occurring L-amino acids
  SITE (98): Xaa equals any of the naturally occurring L-amino acids
  SITE (121): Xaa equals any of the naturally occurring L-amino acids
  SITE (125): Xaa equals any of the naturally occurring L-amino acids
  SITE (131): Xaa equals any of the naturally occurring L-amino acids
  SITE (136): Xaa equals any of the naturally occurring L-amino acids
  SITE (142): Xaa equals any of the naturally occurring L-amino acids
GRPSGSPLSLRLLALGPWGSDGSQAESPMCGRLKDSSEDSSSSRGAGPTCSHVIESPCFELTPEEEHVERFRYGWCKSYRPXSVAVIHHPLYHECGAXDLNEEEEEGGGGKASPPFPDTGXGPGXPASPWXLRHPXNGPTWXP

SEQ ID NO: 4144 - protein, 211 aa, Homo sapiens
  SITE (126): Xaa equals any of the naturally occurring L-amino acids
  SITE (134): Xaa equals any of the naturally occurring L-amino acids
GPAAGRRERWGPGSPVLDLVLALWVHESCRGQVSRAHASWKPRAWVLEASVQSAVRGGVQRAILTQLRPAELRRFLRTVQLRVRLGLPGAGKTRSCWTQATELVPPAPSLQCSLGGRRKPRGTAWXQRCREHSXCPAFQLWPQWPGQSSWVPGLPLWTRDQGPRAHSSPEPRACKAQSKAHKRRLRARPAGSWKSRPRPMALPSSGPERSR

SEQ ID NO: 4145 - protein, 72 aa, Homo sapiens
  SITE (31): Xaa equals any of the naturally occurring L-amino acids
  SITE (35): Xaa equals any of the naturally occurring L-amino acids
  SITE (37): Xaa equals any of the naturally occurring L-amino acids
  SITE (50): Xaa equals any of the naturally occurring L-amino acids
RRRHGINDEDDVENLGKEDEDKSFDMPHSWXEQIXIXPEAFETRCPNGKXGDSVQEGKAGESGPRTSIAMAL

SEQ ID NO: 4146 - protein, 270 aa, Homo sapiens
HEGSHCSRILLLSLKQLYTELLQEHGPQGLNELPAFIEMRDLARRFALSFGPQQLQNRDLVVMLHKEGIQFSLSELPPAGSSNQPPNLAFLELLSEFSPRLFHQDKQLLLSYLEKCLQHVSQAPGHPWGPVTTYCHSLSPVENTAETSPQVLPSSKRRRVEGPAKPNREDVSSSQEESLQLNSIPPTPTLTSTAVKSRQPLWGLKEMEEEDGSELDFAQASARRRHREVKVLGSTIFPDSTQPFRSWPGQPADATQPYGRGRGRRVRNPG

SEQ ID NO: 4147 - protein, 132 aa, Homo sapiens
  SITE (90): Xaa equals any of the naturally occurring L-amino acids
  SITE (117): Xaa equals any of the naturally occurring L-amino acids
AWCEDPLVEEGNGRAPGRGRGARGREGGVGGRGRGQPEAAGGQRDGGRGAAAGSGGGRSRERRSVSYCPLRQESSTQQVALLRRADSGFXGWLGPLALLGGLTAPTDKKRSFRRSRXCLRSATTAGRGACLS

SEQ ID NO: 4148 - protein, 143 aa, Homo sapiens
  SITE (104): Xaa equals any of the naturally occurring L-amino acids
NISSAHQSLSQRAHWRRRGSIHQPAPRLQDRASVCMGVTGAHGFPCCGKGSVEVAEMRDDLSQHQIQEEQELEADMLEQKPQLQVDLDLDPDPDPDPELEIGQXPALLESELYPALKLEAELDTEANSNEESYFEEPMQLYSR

SEQ ID NO: 4149 - protein, 207 aa, Homo sapiens
  SITE (121): Xaa equals any of the naturally occurring L-amino acids
  SITE (162): Xaa equals any of the naturally occurring L-amino acids
  SITE (189): Xaa equals any of the naturally occurring L-amino acids
  SITE (193): Xaa equals any of the naturally occurring L-amino acids
  SITE (194): Xaa equals any of the naturally occurring L-amino acids
AGLQDDIPPLNDLQADRAGWSGDPAALLLLTEEGKIYSLVVNETQLDQPRSYTVQLALRKVSHYLPHLRVACMTSNQSSTLYVTDQGGVYFEVHTPGVYRDLFGTLQAFDPLDQQMPLALXLPAKILFCALGYNHLGLVDEFGRIFMQGNNRYGQLGTGDKXDRGEPTQVPLCAVPSVPTGSAIHLSSXGIEXXAPIATSSRRVWAS

SEQ ID NO: 4150 - protein, 165 aa, Homo sapiens
  SITE (77): Xaa equals any of the naturally occurring L-amino acids
  SITE (78): Xaa equals any of the naturally occurring L-amino acids
  SITE (104): Xaa equals any of the naturally occurring L-amino acids
  SITE (108): Xaa equals any of the naturally occurring L-amino acids
  SITE (136): Xaa equals any of the naturally occurring L-amino acids
  SITE (138): Xaa equals any of the naturally occurring L-amino acids
EEDKMEAQLGYMDEKDPGAQKPRQPLEVQALPAALDRVESEDKHESPASKERAREERPEETEKAPPSPEQLPREEVXXEKEKILDKLELSLIHSRGDSSELRPXDTKXEEKEPIETQQNGDKEEDDEGKKEDKKGXFXLCSTSRTGVHGLHTFCRTRSGLFILWE

SEQ ID NO: 4151 - protein, 114 aa, Homo sapiens
  SITE (66): Xaa equals any of the naturally occurring L-amino acids
  SITE (73): Xaa equals any of the naturally occurring L-amino acids
  SITE (80): Xaa equals any of the naturally occurring L-amino acids
  SITE (87): Xaa equals any of the naturally occurring L-amino acids
  SITE (98): Xaa equals any of the naturally occurring L-amino acids
PKRVRVQRSPGGFCRRCGWGGRALPEQPPARQPAQRVQRWRLQRVELSHPPHAEDTDSDGEEPQLXFTEPQQXLDVFREXEEQNLFXDPEQPGDGEDXGGAEPQPETQPSSAWT

SEQ ID NO: 4152 - protein, 191 aa, Homo sapiens
  SITE (139): Xaa equals any of the naturally occurring L-amino acids
  SITE (157): Xaa equals any of the naturally occurring L-amino acids
  SITE (160): Xaa equals any of the naturally occurring L-amino acids
SSGQLPEHGSLLIPLSPMFLTVKLLLGQRCSLKVSGQESVATLKRLVSRRLKVPEEQQHLLFRGQLLEDDKHLSDYCIGPNASINVIMQPLEKMALKEAHQPQTQPLWHQLGLVLAKHFEPQDAKAVLQLLRQEHEERXQKISLEHLEQLAQYLLAXEPXVEPAGERELEAKARPQSSCDMEEKEEAAADQ

SEQ ID NO: 4153 - protein, 122 aa, Homo sapiens
  SITE (61): Xaa equals any of the naturally occurring L-amino acids
  SITE (70): Xaa equals any of the naturally occurring L-amino acids
  SITE (73): Xaa equals any of the naturally occurring L-amino acids
  SITE (79): Xaa equals any of the naturally occurring L-amino acids
  SITE (92): Xaa equals any of the naturally occurring L-amino acids
INKLKPAYLGCGSFWQCSTLRQGSVRHYCQRREAPGRRSLPEVSGEHCGKRPPFPSKCFLXQSFGYLDFXTTXTEPSLXSNDEPEAPGRLLXHQSQMKLCVIETCCSHLCKEAMDACNESFC

SEQ ID NO: 4154 - protein, 191 aa, Homo sapiens
  SITE (164): Xaa equals any of the naturally occurring L-amino acids
  SITE (191): Xaa equals any of the naturally occurring L-amino acids
FKCDSKLPAIDQTSVKQKHKSTMTVRKAEKVDPSEPSPGGSSKHPLFCVEYTPYCSVFAFSPVLQPNTNYCCLLLPLVPPASPVAQEPPDCPLPLVTVPSFTSTASPPRTPCPSPPPRCATSPSPAPLRLRPLCCAFRAPEGPVGFTSCGKSLLQGTQHSASRXEGTSGFRKAGGQERGQRPHQEQYQAGX

SEQ ID NO: 4155 - protein, 161 aa, Homo sapiens
  SITE (40): Xaa equals any of the naturally occurring L-amino acids
  SITE (84): Xaa equals any of the naturally occurring L-amino acids
  SITE (94): Xaa equals any of the naturally occurring L-amino acids
  SITE (96): Xaa equals any of the naturally occurring L-amino acids
  SITE (98): Xaa equals any of the naturally occurring L-amino acids
  SITE (105): Xaa equals any of the naturally occurring L-amino acids
  SITE (136): Xaa equals any of the naturally occurring L-amino acids
  SITE (137): Xaa equals any of the naturally occurring L-amino acids
  SITE (139): Xaa equals any of the naturally occurring L-amino acids
  SITE (141): Xaa equals any of the naturally occurring L-amino acids
  SITE (143): Xaa equals any of the naturally occurring L-amino acids
  SITE (145): Xaa equals any of the naturally occurring L-amino acids
AAAISFLQKHADPLHDLSFDNSDLVMLKSLLAGLSLPSRXDRTDRGLDEEGEEESSAGSLPLVSVSLFTPLTAAEMAPYMKRLXRGQTVEGESXPXSXTPDLLEXLSDIDEMSRRRPEILSFFFDQPAAADELRPXXCXPXPXLXPALRSCRTAPALQPLS

SEQ ID NO: 4156 - protein, 235 aa, Homo sapiens
  SITE (208): Xaa equals any of the naturally occurring L-amino acids
  SITE (221): Xaa equals any of the naturally occurring L-amino acids
  SITE (223): Xaa equals any of the naturally occurring L-amino acids
  SITE (228): Xaa equals any of the naturally occurring L-amino acids
  SITE (231): Xaa equals any of the naturally occurring L-amino acids
  SITE (234): Xaa equals any of the naturally occurring L-amino acids
KTSSFPDSRSPGLYTTWTLSTSSVSSQGSISEGDPRQSRPFKSVFVPTAIVNPVRSTAGPGTLGQGSLRKGRSSMRKNGSLQRPLQSGIPTLVVGSLRRSPTMVLRPQQFQFYQPQGIPSSPSAVVVEMGSKPALTGEPALTCISRGSEARIHSAASSLIMEDKEIPIKSEPLPKPAASAPPSILVKPENSRNGIEKQVKTVRFQNYXPSPPNITLPSQLXEXLNRQXPLXRPXW

SEQ ID NO: 4157 - protein, 253 aa, Homo sapiens
  SITE (130): Xaa equals any of the naturally occurring L-amino acids
RNDTKEDVFVHQTAIKRNNPRKFLRSVGDGETVEFDVVEGEKGAEATNVTGPGGVPVKGSRYAPNRRKSRRFIPRPPSVAPPPMVAEIPSAGTGPGSKGERAEDSGQRPRRWCPPPFFYRRRFVRGPRPXNQQQPIEGTDRVEPKETAPLEGHQQQGDERVPPPRFRPRYRRPFRPRPRQQPTTEGGDGETKPSQGPADGSRPEPQRPRNRPYFQRRRQQAPGPQQAPGPRQPAAPETSAPVNSGDPTTTILE

SEQ ID NO: 4158 - protein, 182 aa, Homo sapiens
  SITE (133): Xaa equals any of the naturally occurring L-amino acids
  SITE (154): Xaa equals any of the naturally occurring L-amino acids
  SITE (159): Xaa equals any of the naturally occurring L-amino acids
  SITE (170): Xaa equals any of the naturally occurring L-amino acids
  SITE (181): Xaa equals any of the naturally occurring L-amino acids
LVPNSAREVTSGMVLGGQEAPGSFCLCLNRAWNHAETLDPPGMGGPQDGRDAPVLLSASPSLGSLELQDLTTRYLPRGMCIYLDPKEAEHLGTSSSLHLRHKQAQLQALETTAKVLKQRVDSLTAKLQGAEAXDTVRDPAVGLLRSCPHSLPAXPTLAXPTLATPACPGXLGPNWGRGAPXE

SEQ ID NO: 4159 - protein, 256 aa, Homo sapiens
  SITE (175): Xaa equals any of the naturally occurring L-amino acids
  SITE (182): Xaa equals any of the naturally occurring L-amino acids
  SITE (185): Xaa equals any of the naturally occurring L-amino acids
  SITE (189): Xaa equals any of the naturally occurring L-amino acids
  SITE (213): Xaa equals any of the naturally occurring L-amino acids
  SITE (243): Xaa equals any of the naturally occurring L-amino acids
  SITE (251): Xaa equals any of the naturally occurring L-amino acids
  SITE (254): Xaa equals any of the naturally occurring L-amino acids
ANLRSGPVPGGPAVGTMLPSSIQISGEPLSGAEVRDICRGLRDNAVRLLSLRGCRLCDRDFGRICRALAGATSLAQLNLNLGVVSSPSRIKQLAEALRTNRSIQSLFLHGSPLTDAGLALLNPALALHPALVALDLGDCMLGDEAINLICGLLPPDGAKSGLKELTLSANPGITXKGWSRLXIAXAHSXQVRVLNLDYNPLGDHVAGMLAVAXASSRTLEGLDLEGTRAHQPSQLRTLLDNGXKITPQVCXTWXLA

SEQ ID NO: 4160 - protein, 282 aa, Homo sapiens
EAMATEAPVNIAPPECSTVVSTAVDSLIWQPNSLNMHMIRPKSAKGRTRPSLQKSQGVEVCAHHIPSPPPAIPYELPSSQKPGACAPKSPNQGASDEIPELQQQVPTGASSSLNKYPVLPSINRKNLEEEAVETVAKKASSLQLSSIRALYQDETGTMKTSEEDSRARACAVERKFIVRTKKQGSSRAGNLEEPSDQEPRLLLAVRSPTGQRFVRHFRPTDDLQTIVAVAEQKNKTSYRHCSIETMEVPRRRFSDLTKSLQECRIPHKSVLGISLEDGEGWP

SEQ ID NO: 4161 - protein, 167 aa, Homo sapiens
KFLRSVGDGETVEFDVVEGEKGAEATNVTGPGGVPVKGSRYAPNRRKSRRFIPRPPSVAPPPMVAEIPSAGTGPGSKGERAEDSGQRPRRWCPPPFFYRRRFVRGPRPPNQQQPIEGTDRVEPKETAPLEGHQQQGDERVPPPDSGPGTEGLSAQATPAAYHRRWGW

SEQ ID NO: 4162 - protein, 149 aa, Homo sapiens
  SITE (7): Xaa equals any of the naturally occurring L-amino acids
  SITE (8): Xaa equals any of the naturally occurring L-amino acids
  SITE (63): Xaa equals any of the naturally occurring L-amino acids
  SITE (77): Xaa equals any of the naturally occurring L-amino acids
  SITE (108): Xaa equals any of the naturally occurring L-amino acids
  SITE (124): Xaa equals any of the naturally occurring L-amino acids
  SITE (126): Xaa equals any of the naturally occurring L-amino acids
  SITE (129): Xaa equals any of the naturally occurring L-amino acids
  SITE (147): Xaa equals any of the naturally occurring L-amino acids
  SITE (148): Xaa equals any of the naturally occurring L-amino acids
LGEIKKXXRRPSGSSTWPGLLSEPLTPLAHATFPAWASCGSQGWKPDLGQGPDFFLLASVPPXPVPGSAFLSPRPRXAERLARSVPYPTPWAVRFLASLCRVRGTAPXDSPRPRSGSRLTRALXFXRAXCAFFLPGVIFGLFPLMAXXT

SEQ ID NO: 4163 - protein, 306 aa, Homo sapiens
  SITE (70): Xaa equals any of the naturally occurring L-amino acids
QWPPAPSEGYRTYPSGKQLSRSDQPTWTWPRVLSSLMATPPFRLIRKMFSFKVSRWMGLACFRSLAASSXSIRQKKLMHKLQEEKAFREEMKIFREKIEDFREEMWTFRGKIHAFRGQILGFWEEERPFWEEEKTFWKEEKSFWEMEKSFREEEKTFWKKYRTFWKEDKAFWKEDNALWERDRNLLQEDKALWEEEKALWVEERALLEGEKALWEDKTSLWEEENALWEEERAFWMENNGHIAGEQMLEDGPHNANRGQRLLAFSRGRRSQHAGAGPCGPDSPGLGFKSRVSPCAGENTHSLVSLL

SEQ ID NO: 4164 - protein, 45 aa, Homo sapiens
RAMTSSGCFFPGTLQGLHKARKHHVTEMLKSIDAAKPHSETENYE

SEQ ID NO: 4165 - protein, 123 aa, Homo sapiens
  SITE (98): Xaa equals any of the naturally occurring L-amino acids
  SITE (99): Xaa equals any of the naturally occurring L-amino acids
AIPIKFSEKQQASHYLYVRAHGVRQGTKSTWPQKRTLFVLNVPPYCTEESLSRLLSTCGLVQSVELQEKPDLAESPKESRSKFFHPKPVPGFQVAYVXXQKPSGVSAALALKGPLLVSQRATL

SEQ ID NO: 4166 - protein, 57 aa, Homo sapiens
HGASERTFWLAADSRFPGPLHPPLPTGHLNGEGVGGEPGRSQSTLVTPHLQRALPLS

SEQ ID NO: 4167 - protein, 85 aa, Homo sapiens
  SITE (4): Xaa equals any of the naturally occurring L-amino acids
  SITE (17): Xaa equals any of the naturally occurring L-amino acids
  SITE (18): Xaa equals any of the naturally occurring L-amino acids
  SITE (24): Xaa equals any of the naturally occurring L-amino acids
  SITE (59): Xaa equals any of the naturally occurring L-amino acids
  SITE (67): Xaa equals any of the naturally occurring L-amino acids
  SITE (82): Xaa equals any of the naturally occurring L-amino acids
NTDXLCVPSLQGVTLTXXWGSRRXSHWLSDSHCTTCFALISVTQLISFCHGFPLGLCVXNFWSFLLXMCPLTPCVWGIGMLXLFL

SEQ ID NO: 4168 - protein, 127 aa, Homo sapiens
VYQKTYWASYNIPSFETVFNASGLQALVAQYGDWFSYDGSPRAQIFRRNQSLVQDMDSMVRLMRYNDFLHDPLSLCKACNPQPNGENAISAAPTSTRQWLLPLPGPASALPWGYRCEGDQACHWPGS

SEQ ID NO: 4169 - protein, 291 aa, Homo sapiens
  SITE (89): Xaa equals any of the naturally occurring L-amino acids
  SITE (252): Xaa equals any of the naturally occurring L-amino acids
PQESPRGRPAPPAAPYMALPGYPLGNVDDSRSKDSPAGEPQGQVPLTADVLAVSSSVASTDWQDIDQASFKTATPRAISTSGDKDKSAXVPEHGQKTPRKITPLLPSQNPSPLQVSMSLQNPAWDRQVQDARTSQSLVVFPSHLLGKDKMSQMASVPEREPESAPSAPSAELQSTQHMEAQPVESDADHVTAGANGQHGPQAASTTKSAEEKAEHPKAPHPEAEALPSDESPVAMGANVVDSLGDLQTWFFXHLQQAVCPRRLAPTRWPWGEGPWTPACTRPVRRTATCAP

SEQ ID NO: 4170 - protein, 314 aa, Homo sapiens
  SITE (214): Xaa equals any of the naturally occurring L-amino acids
  SITE (215): Xaa equals any of the naturally occurring L-amino acids
  SITE (216): Xaa equals any of the naturally occurring L-amino acids
  SITE (218): Xaa equals any of the naturally occurring L-amino acids
HLLRLLSLSQGGEKRSGIHCQEGLPPGFPTSFFTAVLEAHRRPLKRWSPAHSPPHPPPATPTVPNASSALSSVFFPSREMVVVMKFFRWVRRAWQRIISWVFFWRQKIKPTISGHPDSKKHSLKKMEKTLQVVETLRLVELPKEAKPKLGESPELADPCVLAKTTEETEVELGQQGQSLLQLPRTAVKSVSTLMVSALQSGWQMCSWKSSVSSXXXSXQVRTQSPLKTPEAELLWEVYLVLWAVRKHLRRLYRRQERHRRHHVRCHAAPRPNPAQSLKLDAQSPSRGNPRPLESPDLTLTWGPISAPSFHVFQL

SEQ ID NO: 4171 - protein, 233 aa, Homo sapiens
  SITE (151): Xaa equals any of the naturally occurring L-amino acids
  SITE (179): Xaa equals any of the naturally occurring L-amino acids
  SITE (208): Xaa equals any of the naturally occurring L-amino acids
VEPTQPTPQLLLRQASKFPPAQFLAVSELSERQMLLGGESILRDSYMRKLPKAVVSAAQAGLLRQQEELDRKAAELERKERELQNTVANLHVRQNNWPPLPSWCPVKPCFYQDFSTEIPADYQRICKMLYYLWMLHSVTLFLNLLACLAWXSGNKLQGSGLWPLHPVVSDLHSLCLPLXVPDPSIRPLGPTTLSTSLGSSLEFFWQIXDLHHPVGWHSWPGGQRLDGKPCYTG

SEQ ID NO: 4172 - protein, 225 aa, Homo sapiens
  SITE (204): Xaa equals any of the naturally occurring L-amino acids
  SITE (218): Xaa equals any of the naturally occurring L-amino acids
  SITE (222): Xaa equals any of the naturally occurring L-amino acids
VHITFLRGSFKSSCVSLTLHRQMVPASITDMLLEGNVASILEVMQKFSGWPEVQLRAMKRLLKMPADQLGLPWPPELVEVVVTTMELHDRVLDVQLCACSLLLHLLGQALVHHPEAKAPCNQAITSTLLSALQSHPEEEPLLVMVYSLLAITTTQESESLSEELQNAGLLEHILEHLNSSLESRDVCASGLGLLWALLLDGIIXNKAPLGEGPRTSSXRWLXTYP

SEQ ID NO: 4173 - protein, 80 aa, Homo sapiens
RQWRPLRPRDDPQAGFRIRQWRPLRPREDPQEGFRIRQWRPLRPREDPQAGSGSGNGAHSDPVKTLRRVPAPAMAPTQTP

SEQ ID NO: 4174 - protein, 187 aa, Homo sapiens
  SITE (144): Xaa equals any of the naturally occurring L-amino acids
  SITE (165): Xaa equals any of the naturally occurring L-amino acids
GGRYVDPVNPSRCPKRLVNMDGPMRPRSASLVDFQFGVVATETIEDALLHLAQQNEQAVREASGRLGRFREPQIVEFVFLLSEQWCLEKSVSYQAVEILERFMVKQAENICRQATIQPRDNKRESQNWRALKQQLVNKFTLRLXSCVQLASKLSFRNKIISNITXLNFLQASRLSTHLKKNCLESEL

SEQ ID NO: 4175 - protein, 139 aa, Homo sapiens
  SITE (83): Xaa equals any of the naturally occurring L-amino acids
ASGWPTAMRTAGRGSCRTHWAFPTACSSCTVCGCPLSRTAPPSCWPCWPLMSSLSSSPPSSPKPVRASWRRLPWALQSLQAMXGCHGTQSAPAKSLRLTLCSQPFSILGFGDIVVPGFLVAYCCRFDVQVCSRQIYFVA

SEQ ID NO: 4176 - protein, 60 aa, Homo sapiens
  SITE (44): Xaa equals any of the naturally occurring L-amino acids
YRAGHNEKGVPGTERGHGTCLSLSAEPGTRRTSEGDLSPSQNHXSPCRSRRPRGWVGCTS

SEQ ID NO: 4177 - protein, 299 aa, Homo sapiens
  SITE (269): Xaa equals any of the naturally occurring L-amino acids
SELMKEPILWKHGNLRNVLILMDQSAWDSNATLRQMAIRGLGNTASGAPHKVKKHKQLMLESIIRGLYHLARTEVVCESLKALKKILELLTDRDVSFYFKEIVLQTRTFFEDEQDDVRLTAIFLFEDLAPLTGRRWKIFFAEEIKKSLISFLLHLWDPNPKIGVACRDVLMVCIPFLGLQELYGVLDRLLDQDLPRARDFYRQFCVKLAKKNQEILWILHTHSFTFFTSTWEVIRSAAVKLTDAVVLNLTSQYVELLDREQLTTRLQAXRQDPCISVQRAAEAALQTLLRRCKETSIPL

SEQ ID NO: 4178 - protein, 48 aa, Homo sapiens
  SITE (11): Xaa equals any of the naturally occurring L-amino acids
  SITE (17): Xaa equals any of the naturally occurring L-amino acids
  SITE (26): Xaa equals any of the naturally occurring L-amino acids
NKGSGWAFLGXTMETFXKTRKTAPRXDHYIWAPRRQKLFWALKNFWKF

SEQ ID NO: 4179 - protein, 219 aa, Homo sapiens
  SITE (171): Xaa equals any of the naturally occurring L-amino acids
  SITE (192): Xaa equals any of the naturally occurring L-amino acids
  SITE (217): Xaa equals any of the naturally occurring L-amino acids
LPFPRRLCPPLLQRRNLYSSLPHPRRLCNLTYPIPDGAEPPASRGKLPGDFDVLPTGIPGRAVLERSQSGGKPEPVVTVRTQETDVVEMTTQAKSPESPFTVTKKESKDILISQTEEVTLEAFRGQGKLEDWAHWAKLEERSPDLPGVRSKELEQRKRWVKAKELAVEGPXQEHSRPFSVEALTLTKLMITXNFKEQRSKSALAHFLLALATSQRRXRQ

SEQ ID NO: 4180 - protein, 188 aa, Homo sapiens
LTREQLVVMAGGPPNTKAEMEMSLAEELNHGRQGENQEHLVIAEMMELGSRSRGASQKKQKLEQKAAGSASAKRVWNMTATRPKKMGSQLPKPRMLRESGHGDAHLQEYAGNFQGIRFHYDRNPGTDAVAQTSLEEFNVLEMEVMRRQLYAVNRRLRALEEQGATWRHRETLIIAVLVSAALPTCGCG

SEQ ID NO: 4181 - protein, 174 aa, Homo sapiens
VFPSPPPLSMTRLCLPRPEAREDPIPVPPRGLGAGEGSGSPVRPPVSTWGPSWAQLLDSVLWLGALGLTIQAVFSTTGPALLLLLVSFLTFDLLHRPAGHTLPQRKLLTRGQSQGAGEGPGQQEALLLQMGTVSGQLSLQDALLLLLMGLGPLLRACGMPLTLLGLAFCLHPWA

SEQ ID NO: 4182 - protein, 456 aa, Homo sapiens
  SITE (7): Xaa equals any of the naturally occurring L-amino acids
  SITE (220): Xaa equals any of the naturally occurring L-amino acids
  SITE (315): Xaa equals any of the naturally occurring L-amino acids
  SITE (316): Xaa equals any of the naturally occurring L-amino acids
  SITE (320): Xaa equals any of the naturally occurring L-amino acids
  SITE (321): Xaa equals any of the naturally occurring L-amino acids
  SITE (341): Xaa equals any of the naturally occurring L-amino acids
  SITE (371): Xaa equals any of the naturally occurring L-amino acids
NVWQWAXWGCGGVGAKRHGLDPRLESGRPPTAAASCPPCALGATMSGDKLLSELGYKLGRTIGEGSYSKVKVATSKKYKGTVAIKVVDRRRAPPDFVNKFLPRELSILRGVRHPHIVHVFEFIEVCNGKLYIVMEAAATDLLQAVQRNGRIPGVQARDLFAQIAGAVRYLHDHHLVHRDLKCENVLLSPDERRVKLTDFGFGRQAHGYPDLSTTYCGSAXYASPEVLLGIPYDPKKYDVWSMGVVLYVMVTGCMPFDDSDIAGLPRRQKRGVLYPEGLELSERCKALIAELLQFSPSAGPSAGQVARNCWLRAGXXRLEXXWFQPFLQPRALGQGGARARXALRGNMRSCRVLLHMRFFPSASLPFFPRGXPQLPLFGIHVPRDPGSWRRMRIRDSLRPGPERARPEGTEALRLRGTLSLCAEGVPSQPAVGARFPVGTCNKLAVPRKKKKKKKTR

SEQ ID NO: 4183 - protein, 271 aa, Homo sapiens
  SITE (177): Xaa equals any of the naturally occurring L-amino acids
  SITE (264): Xaa equals any of the naturally occurring L-amino acids
LQSSGQRVFKMTFHHSMTFKQIVLVGQETQRALLLLTEEGKIYSLVVNETQLDQPRSYTVQLALRKVSHYLPHLRVACMTSNQSSTLYVTDQGGVYFEVHTPGVYRDLFGTLQAFDPLDQQMPLALSLPAKILFCALGYNHLGLVDEFGRIFMQGNNRYGQLGTGDKMDRGEPTQVXYLQRPITLWCGLNHSLVLSQSSEFSKELLGCGCGAGGRSQAGPRGVPPSSSSKSRSLCVPVPSVPPGSAYTSCPATTLSSTPPIALXASRWWGL

SEQ ID NO: 4184 - protein, 190 aa, Homo sapiens
  SITE (129): Xaa equals any of the naturally occurring L-amino acids
  SITE (135): Xaa equals any of the naturally occurring L-amino acids
  SITE (150): Xaa equals any of the naturally occurring L-amino acids
  SITE (151): Xaa equals any of the naturally occurring L-amino acids
  SITE (163): Xaa equals any of the naturally occurring L-amino acids
  SITE (172): Xaa equals any of the naturally occurring L-amino acids
  SITE (175): Xaa equals any of the naturally occurring L-amino acids
  SITE (181): Xaa equals any of the naturally occurring L-amino acids
  SITE (184): Xaa equals any of the naturally occurring L-amino acids
IRESRAQPWEEWISMQDCPDLLPARRCEDPLVEEGNGRAPGRGRGARGREGGVGGRGRGQPEAAGGQRDGGRGAAAGSGGGRRPRAALSVLLPAAPGVQHPAGGAAAARGQRLLGLLGPLALLGGLTAXTDRKRXLPEEPCVLEIRRRPXXPRGLVLAASSSXARNAGVLHXHPXYVAHCXLDXPDLGKA

SEQ ID NO: 4185 - protein, 451 aa, Homo sapiens
  SITE (296): Xaa equals any of the naturally occurring L-amino acids
  SITE (325): Xaa equals any of the naturally occurring L-amino acids
HRWPETPPFSYTCGDPSTYRVTFPVCPQKLSLAPPSAKASPHNPGSCGEPQAKFLEAFFEEPPRRQSPVSNLGSEGECPSSGAGSQAQELAEAWEGCRKDLLFQKSPQNHRPPSVSDQTGEKENCYQHMGTSKSPAPGFIHLRTECGPRKEPCQEKAALERVLRQKQDAQGFTPPQLGASQQYASDFHNVLKEEQEALCLDLWGTERREERREPEPHSRQGQALGVKRGCQLHEPSSALCPAPSAKVIKMPRGGPQQLGTGANTPARVFVALSDYNPLVMSANLKAAEEELVFQKXQLLRVWGSQDTHDFYLSECNRQVGNIPGXLVAEMEVGTEQTDRRWRSPAQGHLPSVAHLEDFQGLTIPQGSSLVLQGNSKRLPLWTPKIMIAALDYDPGDGQMGGQGKGRLALRAGDVVMVYGPMDDQGFYYGELGGHRGLVPAHLLDHMSLHGH

SEQ ID NO: 4186 - protein, 64 aa, Homo sapiens
  SITE (64): Xaa equals any of the naturally occurring L-amino acids
AEFVCNDHQSWEEPSFLMSGDEAMHCVRELRFGYSPLPNSRKIPNTAVLRGGPLRGDWIMRCLX

SEQ ID NO: 4187 - protein, 200 aa, Homo sapiens
  SITE (112): Xaa equals any of the naturally occurring L-amino acids
  SITE (137): Xaa equals any of the naturally occurring L-amino acids
  SITE (152): Xaa equals any of the naturally occurring L-amino acids
  SITE (188): Xaa equals any of the naturally occurring L-amino acids
PARAVSAERVFCAERDLERRRQEAEELEGYCIQLKENCWKVTRSVEDAEIKTNVLKQNSALLEEKLRYLQQQLQDETPRRQEAELQEPEEKQEPEEKQEPEAGLSWNSLGPXARPKAARPARESRQTLAAHGLVPAXWGMGPRAGEGPYVSXQELQKLFTGIEELRREVSSLTARWHQEEGAVQEALXLLGGLGGGSTAS

SEQ ID NO: 4188 - protein, 307 aa, Homo sapiens
  SITE (14): Xaa equals any of the naturally occurring L-amino acids
  SITE (18): Xaa equals any of the naturally occurring L-amino acids
  SITE (88): Xaa equals any of the naturally occurring L-amino acids
  SITE (162): Xaa equals any of the naturally occurring L-amino acids
QGCRHSTPPRATGXLVQXGGAPIRYTPDGHLALMSQPREVREFNGDHFLLERAIRADFALVKGWKADRAGNVVFRRSARNFNVPMCKXADVTAVEVEEIVEVGAFPPEDIHVPNIYVDRVIKGQKYEKRIERLTILKEEDGDAGKEEDARTRIIRRAALEFXDGMYANLGIGIPLLASNFISPSMTVHLHSENGILGLGPFPTEDEVDADLINAGKQTVTVLPGGCFFASDDSFAMIRGGHIQLTMLGAMQVSKYGDLANWMIPGKKVKGMAVPWTWCPVRRPEWWSPCSTAQRTTPPRSWRNAPCR

SEQ ID NO: 4189 - protein, 206 aa, Homo sapiens
  SITE (28): Xaa equals any of the naturally occurring L-amino acids
  SITE (137): Xaa equals any of the naturally occurring L-amino acids
  SITE (139): Xaa equals any of the naturally occurring L-amino acids
VARGASCQLQQPRSRIFLRGTGADAAVXQWSPPPGAHFYVERGAPREGLRSPPMASQKQMEVVTKGTGFRRRPKTITYTPGTCELLRVMMKESKLTEHPAAPHHGHHEKRRCFAPTVQPNIQPESLTFQANSLAHLXAXHPRSPSPPPACQHVSSQWGLQPGAVQASSHQGFGEGETKTPKYLCHGEGHGGTEKKGPSCTTEGSSP

SEQ ID NO: 4190 - protein, 38 aa, Homo sapiens
  SITE (14): Xaa equals any of the naturally occurring L-amino acids
ALMGVICCQDGQIXSETKSRFQLVNLFYLGQCLANWRV

SEQ ID NO: 4191 - protein, 29 aa, Homo sapiens
QSEILSQKKLVSEFQILPLLSQIRFKALL

SEQ ID NO: 4192 - protein, 77 aa, Homo sapiens
  SITE (38): Xaa equals any of the naturally occurring L-amino acids
  SITE (65): Xaa equals any of the naturally occurring L-amino acids
CAAVFIVNICDSNVSTPCFGCSGLQVGRTNSVVGPSLXLSLPCMRLCLNAPIRIPCFYHRFPIFXEKITVIINAEPR

SEQ ID NO: 4193 - protein, 64 aa, Homo sapiens
LRGVLSLPELSQKTLKAPTLQKEILALIPNQNALLKDLDILHNSSQMKSMSTFIEEAYKKLGAS

SEQ ID NO: 4194 - protein, 87 aa, Homo sapiens
  SITE (4): Xaa equals any of the naturally occurring L-amino acids
  SITE (55): Xaa equals any of the naturally occurring L-amino acids
SVGXLQRNRASLHEPHFFHRTPHTHSHAHTERHTETSNSRTETHTARQLLRLRGXALCQETPPERERPGETQAGRTSKSQRGQLSGR

SEQ ID NO: 4195 - protein, 82 aa, Homo sapiens
QGPIHSSTEWHRVQATLTSSGHWGGRGLSPAWTVTVVPNKHDEDEDYGGALKPWQPVVLAFQMASGLSHKQQDPALFGSGSA

SEQ ID NO: 4196 - protein, 55 aa, Homo sapiens
  SITE (37): Xaa equals any of the naturally occurring L-amino acids
TSAVAWRHSPWACGSSGHEQRLLRMWKADGRGGRTFXCGLKASFSCRSLEHKVDF

SEQ ID NO: 4197 - protein, 83 aa, Homo sapiens
  SITE (59): Xaa equals any of the naturally occurring L-amino acids
  SITE (72): Xaa equals any of the naturally occurring L-amino acids
  SITE (79): Xaa equals any of the naturally occurring L-amino acids
CCVKTPMDPSQFNPTYIPGSPQMLTEENSRDDSGASQISSETLIKNLSNLTINASSESXSPLSEALLRRESXGAAVLRXIEDE

SEQ ID NO: 4198 - protein, 52 aa, Homo sapiens
  SITE (32): Xaa equals any of the naturally occurring L-amino acids
PTLAFQSAGITGVSMVPGYPNIKRILFMLTIXSSCLLSKKLVSLDYLTKHVQ

SEQ ID NO: 4199 - protein, 50 aa, Homo sapiens
VLKCMHLIIVSSLPHKSGKGGHLQRKNGPLDGNIHPIVTKQGYLGIPNYV

SEQ ID NO: 4200 - protein, 53 aa, Homo sapiens
  SITE (42): Xaa equals any of the naturally occurring L-amino acids
ETTVLLRLCLRSCIYSTEKRDKVPACMHSGGGDKQAMNKLAXNLVLVKIAVKK

SEQ ID NO: 4201 - protein, 51 aa, Homo sapiens
  SITE (18): Xaa equals any of the naturally occurring L-amino acids
  SITE (49): Xaa equals any of the naturally occurring L-amino acids
AILPEESVKEIRIKRKTXEPVNTLILYPSEKRKNRNLFGLFQVLCSGQXHS

SEQ ID NO: 4202 - protein, 87 aa, Homo sapiens
  SITE (40): Xaa equals any of the naturally occurring L-amino acids
  SITE (41): Xaa equals any of the naturally occurring L-amino acids
  SITE (87): Xaa equals any of the naturally occurring L-amino acids
FGTGGKTGRDKRLRGCIGTFSAMNLHSGLREYTLTSALKXXRFPPLTREELPKLFCSVSLLTNFEDASELPGTGKVGVHGIRIEFIX

SEQ ID NO: 4203 - protein, 41 aa, Homo sapiens
  SITE (9): Xaa equals any of the naturally occurring L-amino acids
  SITE (10): Xaa equals any of the naturally occurring L-amino acids
  SITE (39): Xaa equals any of the naturally occurring L-amino acids
LHGLPANLXXSYSWVRCPSCSKQCHSYLKHHLAFLGMGXLV

SEQ ID NO: 4204 - protein, 87 aa, Homo sapiens
GTASDPQMVLDLGHQFLQVEWLLLLTLPASFSMRKKACVCLFMATSGGACACAGVSLLERGEEALMPRPQLPWEGRDIYQMPFLETP

SEQ ID NO: 4205 - protein, 48 aa, Homo sapiens
  SITE (29): Xaa equals any of the naturally occurring L-amino acids
  SITE (32): Xaa equals any of the naturally occurring L-amino acids
  SITE (42): Xaa equals any of the naturally occurring L-amino acids
NWKAGRDGTEPYSPRLVFFLSKPSCFFEXFVXRIKEPRVLFXEDKVGF

SEQ ID NO: 4206 - protein, 33 aa, Homo sapiens
TFPLENKIVFLVFWAEELFQAYAFFIFLKCQVF

SEQ ID NO: 4207 - protein, 38 aa, Homo sapiens
  SITE (15): Xaa equals any of the naturally occurring L-amino acids
LNRLFLNYCFNSACXDILNSSCRNILLFCRYFCINSCQ

SEQ ID NO: 4208 - protein, 349 aa, Homo sapiens
  SITE (248): Xaa equals any of the naturally occurring L-amino acids
  SITE (268): Xaa equals any of the naturally occurring L-amino acids
  SITE (269): Xaa equals any of the naturally occurring L-amino acids
  SITE (274): Xaa equals any of the naturally occurring L-amino acids
  SITE (283): Xaa equals any of the naturally occurring L-amino acids
  SITE (285): Xaa equals any of the naturally occurring L-amino acids
  SITE (293): Xaa equals any of the naturally occurring L-amino acids
  SITE (297): Xaa equals any of the naturally occurring L-amino acids
  SITE (314): Xaa equals any of the naturally occurring L-amino acids
SSLPATCQSLLSAAHPCAAVPAQSHLAPWDLSLLFLLSLSAGVLMVCIVIGARKLGVNPDNIATPIAASLGDLITLSILALVSSFFYRHKDSRYLTPLVCLSFAALTPVWVLIAKQSPPIVKILKFGWFPIILAMVISSFGGLILSKTVSKQQYKGMAIFTPVHMWCWWQSGGHSDQPNLNLPAHVECTWRPAPPDEEILAQPVFYFLHVRNQFHVSSSPALAGGPRPSDFLLHHLPGGGSVSHKQPXLCGALPAGRPDPGDNPAVPXXSDGSXDLAPGPGSXQXLHPLPYRXGGPXRFKLRGPHCCCAKKVYXLPRMGLIQPFICTQHLIVSLLSFYFPFCLLAKTSI

SEQ ID NO: 4209 - protein, 36 aa, Homo sapiens
IWPKGTLWLLCSSIQATEVFSMLAISLFHFVIFVCH

SEQ ID NO: 4210 - protein, 61 aa, Homo sapiens
  SITE (54): Xaa equals any of the naturally occurring L-amino acids
KSRMVCWQSVSVWSVAGRVEMTVSKFMAIQKALQPDWFQCLSDGEVSCKEATSXKKGQKVC

SEQ ID NO: 4211 - protein, 85 aa, Homo sapiens
  SITE (74): Xaa equals any of the naturally occurring L-amino acids
NLFLGLVPITESGTAEQKGFPGWPARVPCSPSVAGQAPWRRNSKREEHMGRPGAHPRGMSVPFVWGEHRGQEGXAGTTSLLGQEI

SEQ ID NO: 4212 - protein, 62 aa, Homo sapiens
QRLLLGFYSFLISNFMPQASLLHLSLLQTDAEHSGTVEGTARRLCHPCLSLCQQEGHVHSGV

SEQ ID NO: 4213 - protein, 70 aa, Homo sapiens
  SITE (61): Xaa equals any of the naturally occurring L-amino acids
  SITE (63): Xaa equals any of the naturally occurring L-amino acids
  SITE (69): Xaa equals any of the naturally occurring L-amino acids
  SITE (70): Xaa equals any of the naturally occurring L-amino acids
DSCLKTNQNNNKNKWVCWDTLKHCCFRSLFLQGAPAQPVSPPLPWTPSLPDARRRWLPCYXQXSTLKNXX

SEQ ID NO: 4214 - protein, 30 aa, Homo sapiens
IVLKMHFNSGIKWFFSWDFFLETSQDIIGK

SEQ ID NO: 4215 - protein, 29 aa, Homo sapiens
HEGKLRNLYFITFFNSGVRLGPMSPVVRW

SEQ ID NO: 4216 - protein, 53 aa, Homo sapiens
  SITE (49): Xaa equals any of the naturally occurring L-amino acids
ELKDLIPHKAAPLWGKYPGVASTSVGMGGDRTVGMDANRSHVWRGRHIXISRV

SEQ ID NO: 4217 - protein, 112 aa, Homo sapiens
  SITE (30): Xaa equals any of the naturally occurring L-amino acids
  SITE (102): Xaa equals any of the naturally occurring L-amino acids
  SITE (109): Xaa equals any of the naturally occurring L-amino acids
  SITE (112): Xaa equals any of the naturally occurring L-amino acids
LLPSFTAQPSNQSPMSLTSDASSPRSYVSXRISTPQTNTVPIKPLISTPPVSSQPKVSTPVVKQGPVSQSATQQPVTADKDKGHEPVSARVFSVQVGQGKSXNWSPSYXYGX

SEQ ID NO: 4218 - protein, 75 aa, Homo sapiens
  SITE (55): Xaa equals any of the naturally occurring L-amino acids
EAEFGFGGITGLLGVGPCRDIHGLKVTSGVRVTWTLTRHTIGTQPADVQETLNLXFWGPRTAGPRCLAKEVRRSL

SEQ ID NO: 4219 - protein, 111 aa, Homo sapiens
  SITE (50): Xaa equals any of the naturally occurring L-amino acids
  SITE (77): Xaa equals any of the naturally occurring L-amino acids
  SITE (86): Xaa equals any of the naturally occurring L-amino acids
  SITE (88): Xaa equals any of the naturally occurring L-amino acids
  SITE (100): Xaa equals any of the naturally occurring L-amino acids
  SITE (105): Xaa equals any of the naturally occurring L-amino acids
IHTGEKPYKCLECGKNFSDRSNLNTHQRIHTGEKPYKCLECGKSFSDHSXSHHSPENSHGGKALLNVENVGKASTRXSNLLETSEXSXWEGNPDHVSEPXGKLLXQRPIFL

SEQ ID NO: 4220 - protein, 97 aa, Homo sapiens
  SITE (85): Xaa equals any of the naturally occurring L-amino acids
HQGLSSQGVHSNFNISLLILPVYSFSERYSKPELKNPFDVSWGLCIMDPGGSCFLIHNVNGTVLLRVSFTLNLIPSFQVVKGNGXREPVEMVEHVLP

SEQ ID NO: 4221 - protein, 57 aa, Homo sapiens
ELIRGDNNKVVHVAVCFEREFQNLTGVWISLLPSINFAISITSRWQQFPCSKNIVTS

SEQ ID NO: 4222 - protein, 47 aa, Homo sapiens
  SITE (29): Xaa equals any of the naturally occurring L-amino acids
  SITE (39): Xaa equals any of the naturally occurring L-amino acids
RLYFQFLGDQRQIFSGRQKVHKSFLDVFXTCVVSRVLVXIGSRQCNY

SEQ ID NO: 4223 - protein, 57 aa, Homo sapiens
  SITE (46): Xaa equals any of the naturally occurring L-amino acids
  SITE (49): Xaa equals any of the naturally occurring L-amino acids
IGLKFCTCWILCLCIFLCFTICDKAIFKFEYGFLLNPLLQTFNQNXLVXNKLVRFDI

SEQ ID NO: 4224 - protein, 160 aa, Homo sapiens
  SITE (58): Xaa equals any of the naturally occurring L-amino acids
  SITE (67): Xaa equals any of the naturally occurring L-amino acids
GSVLVFWMAAEDREMMEARGAGESCPTFPKMVPGDSKSEGKPRAYLEAESQKPDSSYXYLEEMEACXDGGCQGPLKSLSPKSCRATKGQAGDGPKPAELPPTPGTERNPEMELEKVRMEFELTRLKYLHEKNQRQRQHEVVMEQLQRERQHEVVMEQLQQ

SEQ ID NO: 4225 - protein, 58 aa, Homo sapiens
  SITE (8): Xaa equals any of the naturally occurring L-amino acids
  SITE (31): Xaa equals any of the naturally occurring L-amino acids
  SITE (33): Xaa equals any of the naturally occurring L-amino acids
  SITE (43): Xaa equals any of the naturally occurring L-amino acids
LHGVKTMXLIRKRRRNGSKEGNHHSTQPKRXKXKPSSFRILKXQSFHGVVNGKVAAAA

SEQ ID NO: 4226 - protein, 104 aa, Homo sapiens
  SITE (37): Xaa equals any of the naturally occurring L-amino acids
  SITE (43): Xaa equals any of the naturally occurring L-amino acids
  SITE (90): Xaa equals any of the naturally occurring L-amino acids
  SITE (99): Xaa equals any of the naturally occurring L-amino acids
  SITE (100): Xaa equals any of the naturally occurring L-amino acids
MDGEQLEGASSVKREREAAEEGLASVKRPRREALSNXTTESLXANSRGREKPRPLHALAAGFSPPVNVTVSPRSEESHTTTVSGGNGSVXQAGPQLQAXXNLEA

SEQ ID NO: 4227 - protein, 41 aa, Homo sapiens
  SITE (23): Xaa equals any of the naturally occurring L-amino acids
RLSISVFSSLFFSLELPIHNTMXTFNFSRVVKWYIEVLKTI

SEQ ID NO: 4228 - protein, 46 aa, Homo sapiens
  SITE (32): Xaa equals any of the naturally occurring L-amino acids
NKDQIFPSITNKGLIKYQTLLIISRIQAIKWXRRYKKTFRLYCRTP

SEQ ID NO: 4229 - protein, 36 aa, Homo sapiens
  SITE (2): Xaa equals any of the naturally occurring L-amino acids
VXADNSYSLGPAASWVQAALVLMVALAKLSRTWGCK

SEQ ID NO: 4230 - protein, 255 aa, Homo sapiens
  SITE (120): Xaa equals any of the naturally occurring L-amino acids
  SITE (128): Xaa equals any of the naturally occurring L-amino acids
NDQLLPRKLNTEPKDVPKPVHQPVGSSSTLPKMPVLRKEKLQDLMTQIQGTCNFMQESVLDFDKPSSAIPTSQPPSATPGSPVASKEQNLSSQSDFLQEPLQVFNVNAPLPPRKEQEIKXSPYSPGYXQSFTTASTQTPPQCQLPSIHVEQTVHSQETAANYHPDGTIQVSNGSLAFYPAQTNVFPRPTQPFVNSRGSVRGCTRGGRLITNSYRSPGGYKGFDTYRGLPSISNGNYSQLQFQAREYSGSTLFPKG

SEQ ID NO: 4231 - protein, 67 aa, Homo sapiens
  SITE (49): Xaa equals any of the naturally occurring L-amino acids
  SITE (52): Xaa equals any of the naturally occurring L-amino acids
SSPEKFQLRRQDDEVPWGPESRQVFWHLQGLAEHREEKRDPVIFPQGGXFKXSEMGIKISFGISGHL

SEQ ID NO: 4232 - protein, 86 aa, Homo sapiens
  SITE (72): Xaa equals any of the naturally occurring L-amino acids
  SITE (77): Xaa equals any of the naturally occurring L-amino acids
  SITE (80): Xaa equals any of the naturally occurring L-amino acids
  SITE (83): Xaa equals any of the naturally occurring L-amino acids
RHRCQETCLYFLGSIYPWQWAHINMMSELKLKNLTAFRKVTSVCTFISSNFPDFSGIWLSLIFSGIFFLFSXLREEXCKXTGXFLG

SEQ ID NO: 4233 - protein, 69 aa, Homo sapiens
AQEEEKALSRGRNTVWEPRALGGVGKCCFLLLASRHLLPPSHLPWLEMGVRLGKDKSREQIRDGNQKGI

SEQ ID NO: 4234 - protein, 54 aa, Homo sapiens
  SITE (48): Xaa equals any of the naturally occurring L-amino acids
PSGTSRIVTYSLVPFKSVIRHFPIGLLLLSYSIIMLYVRRDQSFNDFXYFPYLK

SEQ ID NO: 4235 - protein, 136 aa, Homo sapiens
  SITE (103): Xaa equals any of the naturally occurring L-amino acids
  SITE (113): Xaa equals any of the naturally occurring L-amino acids
  SITE (115): Xaa equals any of the naturally occurring L-amino acids
  SITE (118): Xaa equals any of the naturally occurring L-amino acids
  SITE (124): Xaa equals any of the naturally occurring L-amino acids
  SITE (133): Xaa equals any of the naturally occurring L-amino acids
APRLVVTCRHVSPREAARVLVRSTTPKSVAIWGRVVFATQETCPYDIAVVSLEEDLDDVPIPVPAEHFHEGEAVSVVGFGVFGQSCGPSVTSGILSAVVQVNXTPVMLQTTCXVXSGXQWGTLXFNHLGKLLXIIT

SEQ ID NO: 4236 - protein, 73 aa, Homo sapiens
  SITE (30): Xaa equals any of the naturally occurring L-amino acids
  SITE (47): Xaa equals any of the naturally occurring L-amino acids
RGIWGLLCLGAERAQEGPVPLLLGGNAMVXLTSHDGKATPPSLYSWXGVLFTCLPAARTRKRKEMSRQTATAL

SEQ ID NO: 4237 - protein, 61 aa, Homo sapiens
  SITE (31): Xaa equals any of the naturally occurring L-amino acids
  SITE (46): Xaa equals any of the naturally occurring L-amino acids
GTLGLLWCPCLLQDRPQHGRSQAVSDARATXAAKSNASGGARSPPXSGSPGSTLSSWKNPK

SEQ ID NO: 4238 - protein, 69 aa, Homo sapiens
  SITE (10): Xaa equals any of the naturally occurring L-amino acids
  SITE (19): Xaa equals any of the naturally occurring L-amino acids
VFIVFNSVTXRFFPKKFLXIKSRLFRKYLPVLHFNFTNQTTAIQPIKQQKQSKERDLDIGIKESFHFII

SEQ ID NO: 4239 - protein, 49 aa, Homo sapiens
  SITE (3): Xaa equals any of the naturally occurring L-amino acids
GTXPGLDFYKLNRADINHFTSFNDSCIFRPETDSETMEPRNPISVTSVH

SEQ ID NO: 4240 - protein, 76 aa, Homo sapiens
WIPRAAGIRHENKIGFMQSIAIARRINRPSRWATWVVRIRSFLQNMALKLSPAVMSYHIIQRLHRSRVVTVSVARL

SEQ ID NO: 4241 - protein, 107 aa, Homo sapiens
  SITE (55): Xaa equals any of the naturally occurring L-amino acids
  SITE (68): Xaa equals any of the naturally occurring L-amino acids
  SITE (71): Xaa equals any of the naturally occurring L-amino acids
  SITE (76): Xaa equals any of the naturally occurring L-amino acids
  SITE (95): Xaa equals any of the naturally occurring L-amino acids
  SITE (97): Xaa equals any of the naturally occurring L-amino acids
  SITE (98): Xaa equals any of the naturally occurring L-amino acids
DIPVVFVSSPCVQSGTGPGPGREVAAISAQPLQQGSQRGGPEADGPQGRVQGGGXPSVNCYTGPESGXPEXERWGXSWQGRGRMPNQVVPGAAPXQXXSIPRPGEPL

SEQ ID NO: 4242 - protein, 56 aa, Homo sapiens
RKHDFGIICYTKLHLYYNIVYCKRLQSKIIVLGLHPRTKRLRLLCGSSVISPQMMC

SEQ ID NO: 4243 - protein, 313 aa, Homo sapiens
  SITE (50): Xaa equals any of the naturally occurring L-amino acids
  SITE (107): Xaa equals any of the naturally occurring L-amino acids
  SITE (203): Xaa equals any of the naturally occurring L-amino acids
  SITE (250): Xaa equals any of the naturally occurring L-amino acids
MEIGIGSEAEFYARVPYPVLGWRIVASIVWSVLFLPICTTVFIIFSRIDXFHPIQWLSDSFSDLYSSYVIFYFLLLSVVIIIISIFNVEFYAVVPSIPCSRLALIGXIIHPQQLMHSFIHAAMGMVMAWCAAVITQGQYSFLVVPCTGTNSFGSPAAQTCLNEYHLFFLLLEHLWAIAIASCILVQHELSPFPIIQQYKFLRXRRSLLLLVKHSCVESLFLVRNFCILYYFLGYIPKAWISTAMNLHIDXQVHRPLDTVSGLLKSLVTLPCPGWCGVFLLTTWYVSWILFKIYATEAHVFSWFKPPFGKKGVR

SEQ ID NO: 4244 - protein, 91 aa, Homo sapiens
  SITE (1): Xaa equals any of the naturally occurring L-amino acids
  SITE (46): Xaa equals any of the naturally occurring L-amino acids
XSLYKNRTSLGIYKSTAMVYVHVTGRKAIWGTPFGCSGLDCLSSRXLGLRSLCGHLRAAKHLQWAHPIGGVLLLEPGTVIEEVGRQQESQE

SEQ ID NO: 4245 - protein, 58 aa, Homo sapiens
GRGSALAFLAPYLEVEGHRATVNRAENLQEARVTLTRQPRPTNAGFFANFIQKLKSHH

SEQ ID NO: 4246 - protein, 41 aa, Homo sapiens
LAPLDPRCLRFSFFEGHFRKLFSGINKVRLRSFLPDPSSSK

SEQ ID NO: 4247 - protein, 50 aa, Homo sapiens
  SITE (41): Xaa equals any of the naturally occurring L-amino acids
KKYTKIFLPFCVFLQINVKTHGLGKEEKLIKGANCREIPEXSVSEPVQAL

SEQ ID NO: 4248 - protein, 50 aa, Homo sapiens
YMIMDNHVTKYCSVWFGVASLPLGWDFFQVILQDLTSMPNTGFPMAMHEF

SEQ ID NO: 4249 - protein, 72 aa, Homo sapiens
VGGLNTVGTFASGKCMYVSKHRKGRAKIRYSNLKGPLSYMQSVIAQNVHCVYIFCMYMHVFNIFDRPQNNLI

SEQ ID NO: 4250 - protein, 57 aa, Homo sapiens
  SITE (18): Xaa equals any of the naturally occurring L-amino acids
  SITE (36): Xaa equals any of the naturally occurring L-amino acids
  SITE (44): Xaa equals any of the naturally occurring L-amino acids
  SITE (57): Xaa equals any of the naturally occurring L-amino acids
ISQPDLFPCHVYQEDKGXVLCFTLILNLPIKSWLLXQSRNHNFXGINGFKNDGKRKX

SEQ ID NO: 4251 - protein, 112 aa, Homo sapiens
  SITE (4): Xaa equals any of the naturally occurring L-amino acids
GKIXNVRETHALNKNFSSERQELTPRKKGLGLNRAGTLGVKEKSFRYKKEVANPRKYRSKDYTDRPQQGKGLSSCGVQKATLTHNCPYVEHPAERTGKDADHTLYKDIAGRK

SEQ ID NO: 4252 - protein, 78 aa, Homo sapiens
IFIYSKMQNIVSISKYKLFFRISSCEIQCHSVGRSMFQIQKYFCSIKLISVTQHFNKYLPSTYYVRRPFPGCWISNVE

SEQ ID NO: 4253 - protein, 82 aa, Homo sapiens
TTTTFLLRRIPTLKIRVASKKEVFEANLKTECDLWHLMVKEMWAGKKLADDHKVGDAGPLCPLLWLPQGPLATCGSCGSPQL

SEQ ID NO: 4254 - protein, 65 aa, Homo sapiens
TTFQVLMSHCVLTRASSARSLLSCFLSASVAFALILKSSLRFKESKLFSMSSNTHTLISVFSACK

SEQ ID NO: 4255 - protein, 57 aa, Homo sapiens
  SITE (1): Xaa equals any of the naturally occurring L-amino acids
XGNKSLWCHFSNHGVVLDAFISSVSPVLKCWNTVFKTRKNAKYWNWIFLCVVGLLFH

SEQ ID NO: 4256 - protein, 72 aa, Homo sapiens
  SITE (38): Xaa equals any of the naturally occurring L-amino acids
  SITE (60): Xaa equals any of the naturally occurring L-amino acids
IVSPSRGNFSCLPVQRCRETSLMCRCPSLGCRVALGLXACCWPLGARGLLHMTRRECCEXSRCSAWDVGRPP

SEQ ID NO: 4257 - protein, 91 aa, Homo sapiens
  SITE (84): Xaa equals any of the naturally occurring L-amino acids
TRWLVNDGNLLLTILEARSPRPRCQHGQVQGKAFLQAADCQLLVLLMWWKESSLTSWGPFCKGINCIRGGSAPMTRSPPKGPTXKGHHIKD

SEQ ID NO: 4258 - protein, 51 aa, Homo sapiens
  SITE (14): Xaa equals any of the naturally occurring L-amino acids
  SITE (34): Xaa equals any of the naturally occurring L-amino acids
  SITE (38): Xaa equals any of the naturally occurring L-amino acids
  SITE (39): Xaa equals any of the naturally occurring L-amino acids
  SITE (40): Xaa equals any of the naturally occurring L-amino acids
  SITE (42): Xaa equals any of the naturally occurring L-amino acids
  SITE (47): Xaa equals any of the naturally occurring L-amino acids
  SITE (48): Xaa equals any of the naturally occurring L-amino acids
IVIAFHFTERSVIXFNLIDNIWGRCPDFTKVLKXNSGXXXLXQTPSXXGYP

SEQ ID NO: 4259 - protein, 81 aa, Homo sapiens
AVAAVRHHLVVLEVAATTAPTVANLTELDMSLILPSLEEELMFSLWRPLYPTKLGLSGMSRPSTTSFRPQFPLCEMSSLQL

SEQ ID NO: 4260 - protein, 76 aa, Homo sapiens [sequence omitted]

SEQ ID NO: 4261 - protein, 113 aa, Homo sapiens
  SITE (100): Xaa equals any of the naturally occurring L-amino acids
FSNLLKKLRDWGLAQETRQLEVELGFEHNILSPGPVLLIPACSMENVHQRLTQRVSLSTTEPFKGKSIYVQKQMEMKTGKQENQIWIHWLFSCLLPKGCXRYREKVPPRSRFK

SEQ ID NO: 4262 - protein, 60 aa, Homo sapiens
ASWAGLGLGEQGEEPMGWESSLASPEGVRKSRTLPSPSSLIGTPQSQCSVMGRSSERPHA

SEQ ID NO: 4263 - protein, 49 aa, Homo sapiens
  SITE (21): Xaa equals any of the naturally occurring L-amino acids
  SITE (45): Xaa equals any of the naturally occurring L-amino acids
  SITE (49): Xaa equals any of the naturally occurring L-amino acids
SEGWAGGLTTPLRPFSSKSPXAFKKLSWLSQPPGPWRSQFCCPPXGLEX

SEQ ID NO: 4264 - protein, 39 aa, Homo sapiens [sequence omitted]

SEQ ID NO: 4265 - protein, 49 aa, Homo sapiens
GCHMTEGVHVEFRFFLEVPRKPASIMITRKETCKYYDELGRKPVSIMMN

SEQ ID NO: 4266 - protein, 36 aa, Homo sapiens
NNALELDKKDFDFLAKFKAMTFVLSVKAAYHCCIKT

SEQ ID NO: 4267 - protein, 149 aa, Homo sapiens
  SITE (96): Xaa equals any of the naturally occurring L-amino acids
  SITE (115): Xaa equals any of the naturally occurring L-amino acids
  SITE (120): Xaa equals any of the naturally occurring L-amino acids
  SITE (121): Xaa equals any of the naturally occurring L-amino acids
  SITE (129): Xaa equals any of the naturally occurring L-amino acids
  SITE (130): Xaa equals any of the naturally occurring L-amino acids
  SITE (132): Xaa equals any of the naturally occurring L-amino acids
  SITE (140): Xaa equals any of the naturally occurring L-amino acids
  SITE (144): Xaa equals any of the naturally occurring L-amino acids
APSDLRTIQTFVKKAKSSKRRAAQAGPTQPGPPRSTFSRLQAPDSATLLEKMKLKDSLFDLDGPKVASPLSPTSLTHTSRPPAALTPVPLSRGTSXISRKKDRKNRKLGPGTGLXLGASXXRHSGMGKXXEXEDRTSKKXRGIXPLWLQ

SEQ ID NO: 4268 - protein, 63 aa, Homo sapiens
ALFRGGTQILACCTIIGKPHHITVGCVCMCVSTSVCVYIFVCMHTLCTCVHVIVDVPVVCKLC

SEQ ID NO: 4269 - protein, 42 aa, Homo sapiens
  SITE (9): Xaa equals any of the naturally occurring L-amino acids
KIPSNLISXKVWADLTGLISFISDTSYHLNSARVNGWLLSTQ

SEQ ID NO: 4270 - protein, 58 aa, Homo sapiens
  SITE (18): Xaa equals any of the naturally occurring L-amino acids
LVTPFPRHLYSVLPWYLXCIIFFFLRQNLPDGNLFVLFKLQRCNLGSFACVCIKTFDS

SEQ ID NO: 4271 - protein, 45 aa, Homo sapiens
  SITE (36): Xaa equals any of the naturally occurring L-amino acids
GNISIGMVICILPLPLIYSVTWESPFTFDSLSVKRXLASLMGFNL

SEQ ID NO: 4272 - protein, 52 aa, Homo sapiens
  SITE (20): Xaa equals any of the naturally occurring L-amino acids
  SITE (48): Xaa equals any of the naturally occurring L-amino acids
  SITE (50): Xaa equals any of the naturally occurring L-amino acids
  SITE (52): Xaa equals any of the naturally occurring L-amino acids
GCNSTLKLLHALHSYFIYMXKHAINCCCIRDMKDPFYRWALFMTFFIXEXGX

SEQ ID NO: 4273 - protein, 88 aa, Homo sapiens
  SITE (69): Xaa equals any of the naturally occurring L-amino acids
SHHAGCTAVIHPHLLKMHPDLSPHLHTEECNVLINLLKECHKNHNILKFFGYCNDVDRELRKCLKNEYXRKQDQEPGEHGIAMRKETF

SEQ ID NO: 4274 - protein, 112 aa, Homo sapiens
GPYSGPFCGRARVHTDFTPSPYDTDSLKIKKGDIIDIICKTPMGMWTGMLNNKVGNFKFIYVDVISEEEAAPKKIKANRRSNSKKSKTLQEFLERIICRNTPQHFCSMVMRL

SEQ ID NO: 4275 - protein, 140 aa, Homo sapiens
  SITE (124): Xaa equals any of the naturally occurring L-amino acids
  SITE (135): Xaa equals any of the naturally occurring L-amino acids
  SITE (136): Xaa equals any of the naturally occurring L-amino acids
PSTRYYLRSLEARPEGDRQGMGRVSKDVAQLASGLQLPHPRRDGSAFGCRWPQVEPLRHFLARWLQLGQFAELHCRAVRRGQPTATAARQSRGLGATTAMAMSPFTGTLKYKGTLHVPKTLTSXALAASPEYGAXXWYGP

SEQ ID NO: 4276 - protein, 64 aa, Homo sapiens
  SITE (50): Xaa equals any of the naturally occurring L-amino acids
TRRRRRQACQLVGGKSKCQKYGGERKHAGSGCKYREQSLSIQIIKRMHKXAPLPLYNTQAMPCS

SEQ ID NO: 4277 - protein, 74 aa, Homo sapiens
  SITE (31): Xaa equals any of the naturally occurring L-amino acids
  SITE (72): Xaa equals any of the naturally occurring L-amino acids
QSGSYYVSCWLWSEGSGVIVRASKGDVCPSXLMSKRASVATLVAGDPTRGQSQRWGLEPWFPSSASCPCAEXAV

SEQ ID NO: 4278 - protein, 54 aa, Homo sapiens
  SITE (10): Xaa equals any of the naturally occurring L-amino acids
  SITE (11): Xaa equals any of the naturally occurring L-amino acids
RHNDGRSWSXXLRTQSSKPHVEKGRDNCIHSGLLTFELLCYFQGNANQRMWSLI

SEQ ID NO: 4279 - protein, 76 aa, Homo sapiens
  SITE (71): Xaa equals any of the naturally occurring L-amino acids
LGRAGGTDRPVSPAAKELLNCPFKCCWETRKKIIVDLEDERGELYFGRIAVWWFSCKGMPQPQLRGKIVLXKHMPP

SEQ ID NO: 4280 - protein, 46 aa, Homo sapiens
  SITE (4): Xaa equals any of the naturally occurring L-amino acids
  SITE (21): Xaa equals any of the naturally occurring L-amino acids
DALXKVWRGFSGGALKGIVSXALFFADFIFSFIIYFIVLMQALYCP

SEQ ID NO: 4281 - protein, 103 aa, Homo sapiens
  SITE (28): Xaa equals any of the naturally occurring L-amino acids
EKKPKPRPPERSPRPLWVPEPQLEIRRXRPTPAMLFRLSEHSSPEEEASPHQRASGEGHHLKSKRPNPCAYTPPSLKVVQRIAESHLQSISNLNENQASEEED

SEQ ID NO: 4282 - protein, 67 aa, Homo sapiens
GVEYKLNLDVSQISHYFTYLNMIHVNNSLVLASFFDSKLTHICGVFLFKMCSIFNYIKYHLSFQPCK

SEQ ID NO: 4283 - protein, 43 aa, Homo sapiens
VTCFCIFPGRSHALNQITLSHTGFPKTDIHPSNISDNMVSRKL

SEQ ID NO: 4284 - protein, 56 aa, Homo sapiens
  SITE (36): Xaa equals any of the naturally occurring L-amino acids
  SITE (43): Xaa equals any of the naturally occurring L-amino acids
PHKETMKEVTLGRAHLLPNTWLFQLGLSDQWGPGAXQAWCQQXPLQVRSGERGFVG

SEQ ID NO: 4285 - protein, 103 aa, Homo sapiens
  SITE (91): Xaa equals any of the naturally occurring L-amino acids
  SITE (101): Xaa equals any of the naturally occurring L-amino acids
VRSVLLSPLKEVLGHPRVAGHLSHTCSLSRGRDTTCEWVQGLACNILHVQTVNYLSEMTFPVPRATALGEVDRGIGPVALQVIPTSQGSTXSFFSVSLLGXFI

SEQ ID NO: 4286 - protein, 54 aa, Homo sapiens
  SITE (28): Xaa equals any of the naturally occurring L-amino acids
QRLTEWILLLAEDFPKSTQKISLGHDGXGGQTCLMKPFGVQAQLTSIDIKPERP

SEQ ID NO: 4287 - protein, 63 aa, Homo sapiens
  SITE (1): Xaa equals any of the naturally occurring L-amino acids
  SITE (60): Xaa equals any of the naturally occurring L-amino acids
XSHCGHCASGQLILSGHETAAPELPRNLCPQGQASRIQRTVVHVRKSPGCGEQISVATIXLAE

SEQ ID NO: 4288 - protein, 43 aa, Homo sapiens
SKVTRSTVALGGPRLVLTPTRRPPSEPPIPPGLAQAPRAPFRV

SEQ ID NO: 4289 - protein, 90 aa, Homo sapiens
GSCQAGIPGSVRHRAPTGPALPDGGKAAGVALKHVGIVEHCPSGLSPSIPPDPRSDLSRNSLGHRIPNTLERSQDLDFSGGKVGAPRKPS

SEQ ID NO: 4290 - protein, 64 aa, Homo sapiens
  SITE (1): Xaa equals any of the naturally occurring L-amino acids
  SITE (43): Xaa equals any of the naturally occurring L-amino acids
  SITE (45): Xaa equals any of the naturally occurring L-amino acids
XGRICLKPQEVEVAASHDHATALQTGRQNETLSQKKKKKKRKXKXKFSLIHGLPSGPCIRNLTI

SEQ ID NO: 4291 - protein, 40 aa, Homo sapiens
  SITE (25): Xaa equals any of the naturally occurring L-amino acids
RKSKGSLPSLYGSHADDSFWLFKRXIFKNRSRTAEKKIVL

SEQ ID NO: 4292 - protein, 64 aa, Homo sapiens
  SITE (13): Xaa equals any of the naturally occurring L-amino acids
  SITE (36): Xaa equals any of the naturally occurring L-amino acids
  SITE (38): Xaa equals any of the naturally occurring L-amino acids
  SITE (59): Xaa equals any of the naturally occurring L-amino acids
SMNFINLDYKSGXLILENPKWKNVGWCGSGKRRCSXFXEVTYLVDVTGYKWQKRSDPRXDHRTP

SEQ ID NO: 4293 - protein, 100 aa, Homo sapiens
HEGPWTGAAISSPTHSNAGWCRGPGTLRTPPASVGAALGQDQVGQPKDSGPSSWGTRRRWKMILEVSISFNFEVIFQSFFQCCELSALLDYWCLLDPGLI

SEQ ID NO: 4294 - protein, 37 aa, Homo sapiens
AKDLEVSGYIFGRMLKSCTTQKPSLCNFGDTEKAKKQ

SEQ ID NO: 4295 - protein, 45 aa, Homo sapiens
  SITE (32): Xaa equals any of the naturally occurring L-amino acids
TKAKMNKWDNINFKFLHSKGNNQQSEQTAHKXRRKYLQTTPLTKD

SEQ ID NO: 4296 - protein, 53 aa, Homo sapiens
  SITE (17): Xaa equals any of the naturally occurring L-amino acids
IETGSHYVAQAVFELLXSSNPPASAPQSTGIIGMSHCTGPGANNFLTLCMYHS

SEQ ID NO: 4297 - protein, 29 aa, Homo sapiens
LSSRYSMDISEHHQFIVGRNVFHTDQFLY

SEQ ID NO: 4298 - protein, 56 aa, Homo sapiens
  SITE (51): Xaa equals any of the naturally occurring L-amino acids
QSILMSALIQQHFGSSEGSVFIEDKITLNVYCSETAQDERITKKNGFIERXQCFEQ

SEQ ID NO: 4299 - protein, 123 aa, Homo sapiens
  SITE (89): Xaa equals any of the naturally occurring L-amino acids
  SITE (93): Xaa equals any of the naturally occurring L-amino acids
  SITE (106): Xaa equals any of the naturally occurring L-amino acids
  SITE (117): Xaa equals any of the naturally occurring L-amino acids
  SITE (121): Xaa equals any of the naturally occurring L-amino acids
  SITE (122): Xaa equals any of the naturally occurring L-amino acids
FGTRQQETVIILEDYADPYDAKRTKGQRDAERVGENDGYMEPYDAQQMITEIRRRGSKDPLVKALQLLDSPCEPADGGLKSETLAKRRXPRTXWGSRHSFTAFLRXCRRGAQGRGEXAGPXXA

SEQ ID NO: 4300 - protein, 70 aa, Homo sapiens
  SITE (56): Xaa equals any of the naturally occurring L-amino acids
  SITE (63): Xaa equals any of the naturally occurring L-amino acids
  SITE (68): Xaa equals any of the naturally occurring L-amino acids
  SITE (69): Xaa equals any of the naturally occurring L-amino acids
INKNKNLNLKFLCTFLFSYEKLLKMDLFYQRGTSFMKALDTYCQIAFWGRFFPFYXPTSSMLXCPFTXXH

SEQ ID NO: 4301 - protein, 81 aa, Homo sapiens
NSARGDRSIRGRQARVPYFRVTHVEVIAPRLKRESGGFEPGPFELPSMGKLKGALLSPGRDVAVMMGWEASGPQRLAVHIF

SEQ ID NO: 4302 - protein, 67 aa, Homo sapiens
GRCCLVKKIWVFCGICQPGLEDYCCFCSRYRVSSPVLDNLKSKDLKWLISTNLFFDNRDLHIYVCLY

SEQ ID NO: 4303 - protein, 57 aa, Homo sapiens
KANFLRKNDGKRSRDPMKWKREDNPAIPTSQLRPATHVTVCKARRAWVQLRLQIVGK

SEQ ID NO: 4304 - protein, 61 aa, Homo sapiens
KDVIYGNEIFALFKPVYLNYFYISICRYIPTFLKVGMFEDETGVQVAGVEGRRRLLQHEVK

SEQ ID NO: 4305 - protein, 49 aa, Homo sapiens
  SITE (29): Xaa equals any of the naturally occurring L-amino acids
GRKRHETKTSHPHCVLPKFMTHRIHGTSXNGYCFMPLKFGVASYAAKGN

SEQ ID NO: 4306 - protein, 58 aa, Homo sapiens
  SITE (6): Xaa equals any of the naturally occurring L-amino acids
  SITE (7): Xaa equals any of the naturally occurring L-amino acids
FGTSSXXAIVLGFPCLRTETKSFSLIPYLPCQYPVYQALYSTRPSSILLKDLTRPRFK

SEQ ID NO: 4307 - protein, 59 aa, Homo sapiens
LGILPRGLSSAISLSHSLHVGQGGAWPKSPCSPHRWMWTWPSSVQTCLRRMRNCARSCG

SEQ ID NO: 4308 - protein, 75 aa, Homo sapiens
  SITE (29): Xaa equals any of the naturally occurring L-amino acids
  SITE (40): Xaa equals any of the naturally occurring L-amino acids
RADGTSPPALQLRRTAGSRGPLGLASVCXTSQEGQGACLXRKPRCPRWHFPHFGKIMFSSHVPDRLLLQAVCWSR

SEQ ID NO: 4309 - protein, 71 aa, Homo sapiens
  SITE (2): Xaa equals any of the naturally occurring L-amino acids
  SITE (12): Xaa equals any of the naturally occurring L-amino acids
AXPELLQAPASXSPLCFLSLQRTFHQLSLAQPCRRGDFTRDSCSLCSKCRVGHPPATICGLPDLLLLIHFR

SEQ ID NO: 4310 - protein, 85 aa, Homo sapiens
  SITE (29): Xaa equals any of the naturally occurring L-amino acids
  SITE (52): Xaa equals any of the naturally occurring L-amino acids
  SITE (57): Xaa equals any of the naturally occurring L-amino acids
  SITE (62): Xaa equals any of the naturally occurring L-amino acids
GMPKKQRASQPRHFENMKLLLGGKAGPQXYPQAQAMPLPAPTSCLPPSLHRXGGPLXSALPXFPVRRKVQERRWVKLMGFLVKSL

SEQ ID NO: 4311 - protein, 71 aa, Homo sapiens
PIYNIKTWQCISETQNKFQVPCKHPALSFGRCFWERACASFSPLLGRHRDLRRCHAGGLKVSGQTSSCTIT

SEQ ID NO: 4312 - protein, 61 aa, Homo sapiens
  SITE (26): Xaa equals any of the naturally occurring L-amino acids
  SITE (34): Xaa equals any of the naturally occurring L-amino acids
  SITE (44): Xaa equals any of the naturally occurring L-amino acids
MCPVWIREGIYMYISLYDVYSCSKFXKELFIIKXHIEWLQIIYXECAHSHSYMIFPRCQGG

SEQ ID NO: 4313 - protein, 36 aa, Homo sapiens
VLFIPPQGLELVLVKKNKKKSTLDREESRQGTRVRK

SEQ ID NO: 4314 - protein, 60 aa, Homo sapiens
FADISNLWSKLFESFLRLRLSRSHSRMGTTGEVIVFQFQCLLVSVGLPFRIKALLREIGS

SEQ ID NO: 4315 - protein, 27 aa, Homo sapiens
RLIPVSFWERQNCRDRYQTEGWEKGLT

SEQ ID NO: 4316 - protein, 64 aa, Homo sapiens
  SITE (64): Xaa equals any of the naturally occurring L-amino acids
HAELKKPQGLCDLPPFSSATISPKHRMKLKFFICLKSRPTKEIFSILLDQDVTTPEWTFSQDNX

SEQ ID NO: 4317 - protein, 87 aa, Homo sapiens
SAQMSHHAWPFLTLLYDMPIASLRASVPCYFTLGFRWREQLLFGTLAIAWQMGICHFCSYLVGSTITFRANPAAKPGINRAEKLFCK

SEQ ID NO: 4318 - protein, 85 aa, Homo sapiens
ITLYSTVNLTYIEFVVNSYEKSFLHVTHTVKEHSKGQNLQEQFWNQQKMSPFICHLIYIYQFYQLLLNLYIICKGKKENPKTCLT

SEQ ID NO: 4319 - protein, 50 aa, Homo sapiens
GRGQLWMGVAMGGFDILSANLYLTNFYFLNKHCFHNKTVIDNTFSSHLEL

SEQ ID NO: 4320 - protein, 30 aa, Homo sapiens
VNDTIFSKSGQQYTVCMEVQMGRERCWLPL

SEQ ID NO: 4321 - protein, 36 aa, Homo sapiens
  SITE (31): Xaa equals any of the naturally occurring L-amino acids
QRFSKLLFILQRSSKTGRACIIFPVLQCSSXSLVRL

SEQ ID NO: 4322 - protein, 69 aa, Homo sapiens
  SITE (2): Xaa equals any of the naturally occurring L-amino acids
  SITE (27): Xaa equals any of the naturally occurring L-amino acids
  SITE (51): Xaa equals any of the naturally occurring L-amino acids
  SITE (52): Xaa equals any of the naturally occurring L-amino acids
  SITE (59): Xaa equals any of the naturally occurring L-amino acids
  SITE (67): Xaa equals any of the naturally occurring L-amino acids
SXGRKELLLYCVFFSVSLMASCIRSAXWSGFGVHPSSHPERSPFSTLARSXXDKEVTHXYSVTFRIXQP

SEQ ID NO: 4323 - protein, 58 aa, Homo sapiens
  SITE (45): Xaa equals any of the naturally occurring L-amino acids
  SITE (48): Xaa equals any of the naturally occurring L-amino acids
  SITE (53): Xaa equals any of the naturally occurring L-amino acids
NEVSVTQAGVQWHNLGSLQPPLPGSSDSPASASQVAGVYRCTPPXPTXLWILXRVWGF

SEQ ID NO: 4324 - protein, 52 aa, Homo sapiens
  SITE (10): Xaa equals any of the naturally occurring L-amino acids
  SITE (14): Xaa equals any of the naturally occurring L-amino acids
  SITE (15): Xaa equals any of the naturally occurring L-amino acids
NVEKRLCMIXFGFXXYGIAMKQNQPITGASLGMRLINSQCHCYSNYSHTMLT

SEQ ID NO: 4325 - protein, 52 aa, Homo sapiens
FSSQKRRGSVWQGTGKLHLLGLGKAPLIVDICPAGKSCKLYHQKAKGAWFGG

SEQ ID NO: 4326 - protein, 41 aa, Homo sapiens
  SITE (29): Xaa equals any of the naturally occurring L-amino acids
  SITE (34): Xaa equals any of the naturally occurring L-amino acids
  SITE (37): Xaa equals any of the naturally occurring L-amino acids
TWFKCQERIPLYWSWMLWGCRNEEHLSYXNPQSXPKXQKNL

SEQ ID NO: 4327 - protein, 45 aa, Homo sapiens
  SITE (43): Xaa equals any of the naturally occurring L-amino acids
LRNLCSMYISIYCIICLILMYIYLNFSEKNVGGKVYEKILSLXLL

SEQ ID NO: 4328 - protein, 43 aa, Homo sapiens
  SITE (16): Xaa equals any of the naturally occurring L-amino acids
  SITE (26): Xaa equals any of the naturally occurring L-amino acids
  SITE (42): Xaa equals any of the naturally occurring L-amino acids
CLISAIFPNLSPFLFXAIGRLTEIQXPRLQPACESPINYLWXH

SEQ ID NO: 4329 - protein, 70 aa, Homo sapiens
VAGIRDTHHHAQLIFVFLVETGFPHVGQAGLELLTLGDRPALASQSAGDYRREPPSPASTLFLRSPSLLL

SEQ ID NO: 4330 - protein, 100 aa, Homo sapiens
AIFSWKHRRSLRENERMTSDAISRWQRHAVVRPRWASMGLLLPVGSRPLRGFGGSENTFSQVFIWQPTKSPSPSPVEAQKGDYGLKSQVINRAFSTQLAL

SEQ ID NO: 4331 - protein, 42 aa, Homo sapiens
DNLPRVRPTLATGNRILLKDHSFYLQGAQSSVWANMQTKITS

SEQ ID NO: 4332 - protein, 54 aa, Homo sapiens
  SITE (37): Xaa equals any of the naturally occurring L-amino acids
ILFIGFERVIFGLIYTDCVVRIRLRPLRTVNVKGIMXPPFLPQYVFYFASFLVN

SEQ ID NO: 4333 - protein, 89 aa, Homo sapiens
  SITE (82): Xaa equals any of the naturally occurring L-amino acids
GLTSKKEGKNQAGKAFRVLFLLPGHLSRSPRAAPGSEAGNRAGEGPCLDLKPWGHNGEFSFCEKRCLLIWTLGACLNNMPLXSTSLTQL

SEQ ID NO: 4334 - protein, 107 aa, Homo sapiens
  SITE (83): Xaa equals any of the naturally occurring L-amino acids
RRGRWDPSQPGCPQRTSPGMMLLRAQVDTGVNLSSATLCVPTRRPWASVSVSLSEPSSAHPQNWANATSYPASVCKVLTQGPXHSKSLVQAATATFKSGKQYHFVQV

SEQ ID NO: 4335 - protein, 123 aa, Homo sapiens
  SITE (71): Xaa equals any of the naturally occurring L-amino acids
  SITE (117): Xaa equals any of the naturally occurring L-amino acids
DEQKQGSDENMSECETSSVCSSSDTGLFTNDEGRQGDDEQSDWFYEGECVPGFTVPNLLPKWAPDHCSEVXRMDSGLDKFSDSTFLLPSRPAQRGYHTRLNRLPGAAARCLQKGAKXAGWEVI

SEQ ID NO: 4336 - protein, 66 aa, Homo sapiens
  SITE (52): Xaa equals any of the naturally occurring L-amino acids
  SITE (60): Xaa equals any of the naturally occurring L-amino acids
  SITE (64): Xaa equals any of the naturally occurring L-amino acids
KRDGARIYTPKGRQGGDLKNILLLLLFVSQNKKLAGVCICVEDQGEGRGLIXKLWWASNXPLFXAV

SEQ ID NO: 4337 - protein, 127 aa, Homo sapiens
  SITE (119): Xaa equals any of the naturally occurring L-amino acids
  SITE (120): Xaa equals any of the naturally occurring L-amino acids
  SITE (127): Xaa equals any of the naturally occurring L-amino acids
KKRSRGPCRTGACVAMGSPAAPEGALGYVREFTRHSSDVLGNLNELRLRGILTDVTLLVGGQPLRAHKAVLIACSGFFYSIFRGRAGVGVDVLSLPGVPKREASPLYWTSCTLRACASXXPLTSSPX

SEQ ID NO: 4338 - protein, 70 aa, Homo sapiens
  SITE (58): Xaa equals any of the naturally occurring L-amino acids
  SITE (62): Xaa equals any of the naturally occurring L-amino acids
  SITE (67): Xaa equals any of the naturally occurring L-amino acids
KPGLVSYAVDMSLWLCLELIAEKLCFSRTVCEASLNSQWTCHVRSRYALHMEKHHPSXFNKXKLNSXFKS

SEQ ID NO: 4339 - protein, 67 aa, Homo sapiens
  SITE (52): Xaa equals any of the naturally occurring L-amino acids
  SITE (58): Xaa equals any of the naturally occurring L-amino acids
  SITE (61): Xaa equals any of the naturally occurring L-amino acids
  SITE (64): Xaa equals any of the naturally occurring L-amino acids
GPKKAAAPQGKAEAATRNLEGIYKMFYAVVPCWQPPPAWCHRNPYSLNFQFXFFETEXCSXCPXLEC

SEQ ID NO: 4340 - protein, 98 aa, Homo sapiens
VCAGPRLRTWAEPPQSSTLFQEQQKMNMSQASVSFQDVTVEFTREEWQHLGPVERTLYRDVMLENYSHLISVGYCITKPKVISKLEKGEEPWSLEDDS

SEQ ID NO: 4341 - protein, 40 aa, Homo sapiens
  SITE (2): Xaa equals any of the naturally occurring L-amino acids
AXQVQAILLPGRQSETQSQKKKKKAKIFAKVAYMYFLQAT

SEQ ID NO: 4342 - protein, 63 aa, Homo sapiens
PLLWSTRPHTLVGVRSCLIPKKTPKKKSVFLGVTLSVFHQVRDPTAFSSFSHNFYIISSVMCK

SEQ ID NO: 4343 - protein, 70 aa, Homo sapiens
  SITE (63): Xaa equals any of the naturally occurring L-amino acids
  SITE (67): Xaa equals any of the naturally occurring L-amino acids
GFGILFPVREEAIFMRDLTGSHLKFKSNQARHDGSCPVIPAPWEAKVGGLLEPWSSRLAWAHXESCXSAQ

SEQ ID NO: 4344 - protein, 162 aa, Homo sapiens
TMVTHLFQKCCLVQRILEAWEANDHTQAAGAVRRGNMGHLTRIANAVVQNLERGPVQTHISEVIRGLPADCRGRWESFVEETLTETNRRNTVDLAFSDYQIQQMTANFVDQFGFNDEEFADQDDNINAPFDRIAEINFNIDADEDSPSAFCFEACCSDRIKP

SEQ ID NO: 4345 - protein, 68 aa, Homo sapiens
  SITE (61): Xaa equals any of the naturally occurring L-amino acids
  SITE (64): Xaa equals any of the naturally occurring L-amino acids
FLILLAVLRVVKSCAIKAWQPMVKYHLQHLFQRSCVCSRNCYYLHFTGEKRLRLSDLPQQXGSXLICS

SEQ ID NO: 4346 - protein, 68 aa, Homo sapiens
RFLYAGEFKRNQHRYFKKVHVFLSLKYLFIKGQTQRLTPVIPALWEAGRSQGQEFETGLANMVKPRLY

SEQ ID NO: 4347 - protein, 38 aa, Homo sapiens
  SITE (35): Xaa equals any of the naturally occurring L-amino acids
  SITE (38): Xaa equals any of the naturally occurring L-amino acids
HHKTSSSSLILLNLNTLKLLGSFSTSSLLWHSSTXSTX

SEQ ID NO: 4348 - protein, 20 aa, Homo sapiens
  SITE (18): Xaa equals any of the naturally occurring L-amino acids
VGSLSRYKGVFSHEWKPXQS

SEQ ID NO: 4349 - protein, 186 aa, Homo sapiens
VRPQVPVRNSRVDPRVRRGRVPGAWRRWCCGGCWPPCCTARSWWNVCQSRGLSDVRRSSRPSHCCRPSCGARTRPAACRTSRLGPWAPCAAALSDLETPSPRSYAAASEAARGHHQVARGALAQTFNPGLCGAEAACFSFRALQWHQCGGVIPGTARGFESRLGLLACRHPTHKSLGQTARSVEVL

SEQ ID NO: 4350 - protein, 63 aa, Homo sapiens
  SITE (7): Xaa equals any of the naturally occurring L-amino acids
  SITE (50): Xaa equals any of the naturally occurring L-amino acids
  SITE (60): Xaa equals any of the naturally occurring L-amino acids
SNSSLLXKAGCGGYWIWPLDFPNLPPYSPLFSLLTPQPDQFGLFLSLLTXIILNQKKKGXRLR

SEQ ID NO: 4351 - protein, 65 aa, Homo sapiens
FLQRFLVQLRDPILILQCLLHQVHQLIYQLHINDGVTQYEKVYIKVIIYYSLKKVPDMGQLHPPF

SEQ ID NO: 4352 - protein, 80 aa, Homo sapiens
  SITE (27): Xaa equals any of the naturally occurring L-amino acids
  SITE (72): Xaa equals any of the naturally occurring L-amino acids
WKPLGSIYVLGWADGIVVLGRSEVAVXPPLRSKLGERGGLVWCDIGSWNYRMMGSDRFEKNARTLRGSETSXTYRSGGKV

SEQ ID NO: 4353 - protein, 57 aa, Homo sapiens
DGSDVHHDNAAGLLWKISAEVTVRHFVISLLFLKKMSVPIHPLTVCHLLKVYSICIN

SEQ ID NO: 4354 - protein, 77 aa, Homo sapiens
  SITE (22): Xaa equals any of the naturally occurring L-amino acids
  SITE (34): Xaa equals any of the naturally occurring L-amino acids
  SITE (40): Xaa equals any of the naturally occurring L-amino acids
  SITE (41): Xaa equals any of the naturally occurring L-amino acids
  SITE (49): Xaa equals any of the naturally occurring L-amino acids
  SITE (59): Xaa equals any of the naturally occurring L-amino acids
SPQLEWPWLFCNCCQNHHKLYXIKAPFALPRRTXHFKQKXXSLFVLENXVFKLFLVDTXHNGKITKLNLFYGWQLGA

SEQ ID NO: 4355 - protein, 132 aa, Homo sapiens
GDQHGNMVRVVAKNYGVSIRLNQVTADTLTLTMKQVIEDKRYKSAVVAASVILHSQPLSPAQRLVGWIDHILQTGGATHLKPYAFQQPWHEQYLIDVFVFLLGLTLGTMWLCGKLLGVVARWLRGARKVKKT

SEQ ID NO: 4356 - protein, 34 aa, Homo sapiens
  SITE (3): Xaa equals any of the naturally occurring L-amino acids
  SITE (20): Xaa equals any of the naturally occurring L-amino acids
KDXKSVRKLDRHHLNQVIKXNIISNKTSQHYVTP

SEQ ID NO: 4357 - protein, 76 aa, Homo sapiens
PIRTLFSTLWTKLEDSSWSTFFLHPLCGSRFQTAFESRTGDTGGGITESLPPVRQYFKFWFPSLVCHDHTLSRVLR

SEQ ID NO: 4358 - protein, 111 aa, Homo sapiens
DRSCSKMLIRQNLALDCKQKKSRSRSGSKKKMLTLPHGADEVYILRCRFCGLVFRGPLSVQEDWIKHLQRHIVNANLPRTGAGMVEVTSLLKKPASITETSFSLLMAEAAS

SEQ ID NO: 4359 - protein, 45 aa, Homo sapiens
LVPHHNLGCEEFVTSNGTGFGTMFSPNCIAWFFPFLADEMTSRVS

SEQ ID NO: 4360 - protein, 135 aa, Homo sapiens
  SITE (2): Xaa equals any of the naturally occurring L-amino acids
  SITE (8): Xaa equals any of the naturally occurring L-amino acids
TXKPDSTXRERCHACRYRSGIPGSTHASGRDKMADKEKKKKESILDLSKYIDKTIRVKFQGGREASGILKGFDPLLNLVLDGTIEYMRDPDDQYKLTEDTRQLGLVVCRGTSVVLICPQDGMEAIPNPFIQQQDA

SEQ ID NO: 4361 - protein, 52 aa, Homo sapiens
ERAVGRKGVSIAEIGLGVGATLSVGSSGVAAGPSRGPGVGSENVLGDQSPTF

SEQ ID NO: 4362 - protein, 122 aa, Homo sapiens
  SITE (61): Xaa equals any of the naturally occurring L-amino acids
  SITE (108): Xaa equals any of the naturally occurring L-amino acids
  SITE (110): Xaa equals any of the naturally occurring L-amino acids
  SITE (116): Xaa equals any of the naturally occurring L-amino acids
QSTGISYETLGPEELRSLLTTQCGVISEHTKKMCTRSLRCPQHTDEQRRTVRIYFLGPSAXLPEVESSLDNDSFDMTDSQALISRLQWDGSSDLSPSDSGSSKTSENXGXGLGTNXSESRKT

SEQ ID NO: 4363 - protein, 66 aa, Homo sapiens
NHITSILMDLIFYYLENKLIIISQNTSGTLKFNQLLSLTELGLSIKNTVISKRVSMQEKPLHHNFK

SEQ ID NO: 4364 - protein, 132 aa, Homo sapiens
  SITE (26): Xaa equals any of the naturally occurring L-amino acids
GGDCGSGAGRAGGEGVDAGRRVPERXTEDEEEGASLGDGSGAEGGTAAAAGGRAAMAGTKWRAAVWELAKERLSSTSRSRAQVSNAEAPMLLPDLLAQGLSLAALFQGYWSYVLRLVPKDPCRWGKRGPSPS

SEQ ID NO: 4365 - protein, 80 aa, Homo sapiens
  SITE (4): Xaa equals any of the naturally occurring L-amino acids
  SITE (8): Xaa equals any of the naturally occurring L-amino acids
LVEXGRVXMDCRVITGRETKLVYKKIKKKALLITHPHPSPSPVPALALGLLGCLKADKKKSSSTALALNVGKCQLLVPRC

SEQ ID NO: 4366 - protein, 384 aa, Homo sapiens
  SITE (54): Xaa equals any of the naturally occurring L-amino acids
  SITE (245): Xaa equals any of the naturally occurring L-amino acids
  SITE (265): Xaa equals any of the naturally occurring L-amino acids
  SITE (331): Xaa equals any of the naturally occurring L-amino acids
  SITE (383): Xaa equals any of the naturally occurring L-amino acids
AQGAGPAGRCAPAAMAFRRRTKSYPLFSQEFVIHNHADIGFCLVLCVLIGLMFXVTAKTAFLFILPQYNISVPTADSETVHYHYGPKDLVTILFYIFITIILHAVVQEYILDKISKRLHLSKVKHSKFNESGQLVVFHFTSVIWCFYVVVTEGYLTNPRSLWEDYPHVHLPFQVKFFYLCQLAYWLHALPELYFQKVRKEEIPRQLQYICLYLVHIAGAYLLNLSRLGLILLLLQYSTEFLFHTXRLFYFADENNEKLFSAWAAXFGVTRLFILTLAVLAIGFGLARMENQAFDPEKGNFNTLFCRLCVLLLVCAAQAWLMWRFIHSQLRXWREYWNEQSAKRRVPATPRLPARLIKRESGYHENGVVKAENGTSPRTKKLKXP

SEQ ID NO: 4367 - protein, 49 aa, Homo sapiens
  SITE (49): Xaa equals any of the naturally occurring L-amino acids
MTVSYPLWEMESETHCCLELLPSFRIFSMIFSSLGETLCPSFDLCVCYX

SEQ ID NO: 4368 - protein, 55 aa, Homo sapiens
LSFSCLGIKNSQVFWPGMVAHACESQHLGRPRQADHMRPGNSRPTWSAWAKPRLY

SEQ ID NO: 4369 - protein, 92 aa, Homo sapiens
  SITE (90): Xaa equals any of the naturally occurring L-amino acids
IRHEETNRPLNTFNVGWGYGCQDVFPASGTQWLQTVPRKFLLLLFCFVFIFMNGFGRKRRLKHNTTTIHKKGKETNCCLESFLDAKQTGXPR

SEQ ID NO: 4370 - protein, 38 aa, Homo sapiens
  SITE (1): Xaa equals any of the naturally occurring L-amino acids
  SITE (16): Xaa equals any of the naturally occurring L-amino acids
  SITE (24): Xaa equals any of the naturally occurring L-amino acids
  SITE (28): Xaa equals any of the naturally occurring L-amino acids
  SITE (37): Xaa equals any of the naturally occurring L-amino acids
  SITE (38): Xaa equals any of the naturally occurring L-amino acids
XLATDCGFGLHGIRVXKEKRTQLXYEYXLDYRLRAYXX

SEQ ID NO: 4371 - protein, 48 aa, Homo sapiens
  SITE (18): Xaa equals any of the naturally occurring L-amino acids
NSAQSLELLTSGDPPASXSQNAGITDVSHHSRSALQVFEVTIMCQALF

SEQ ID NO: 4372 - protein, 88 aa, Homo sapiens
  SITE (73): Xaa equals any of the naturally occurring L-amino acids
  SITE (86): Xaa equals any of the naturally occurring L-amino acids
  SITE (87): Xaa equals any of the naturally occurring L-amino acids
PPLPCLSPLSSWDYRHPPSCPAHFCIFVEMGFHRVGQAGLELLTSDDLPTSASQSAGITGVSHCTRPQFPVFXKDKLRTGPICFIXXC

SEQ ID NO: 4373 - protein, 94 aa, Homo sapiens
  SITE (69): Xaa equals any of the naturally occurring L-amino acids
  SITE (70): Xaa equals any of the naturally occurring L-amino acids
VIKQTLKIFKELKSYKVYSWDHNRIKLDINNRKVSGISPNIWKLNSILLKKSCQRRKKIREHLTGLTMXXIYSVATKLAYRKLCINLDWKEERF

SEQ ID NO: 4374 - protein, 49 aa, Homo sapiens
SARFVSPRLAVSLSLPRAPPQPPSSHSGPFSERLQPQSRLLAPTLGLPS

SEQ ID NO: 4375 - protein, 66 aa, Homo sapiens
  SITE (64): Xaa equals any of the naturally occurring L-amino acids
KKRKIQRVTEVLSLMGLKCFSQKQICKTITANKDIIISTAVLTLKLKFDPSWNFGPLVLFPWDXLP

SEQ ID NO: 4376 - protein, 46 aa, Homo sapiens
  SITE (36): Xaa equals any of the naturally occurring L-amino acids
FISFLPILSPSANPVGSISISIISCMDNCSCLLLLXLPPFRPSVIY

SEQ ID NO: 4377 - protein, 53 aa, Homo sapiens
EHSSVDLCSSALGSAILSCAVHPALVHSISARRSDFFWLSLGFFLHTCPELKL

SEQ ID NO: 4378 - protein, 56 aa, Homo sapiens
VDRYLFSTRCQACQSLKLSFSLSTNGGNFKVASDRSSSIRFSSLGLMIVSDLFLYP

SEQ ID NO: 4379 - protein, 73 aa, Homo sapiens
  SITE (68): Xaa equals any of the naturally occurring L-amino acids
HVQPGAIIYCHSRSRRNIISNWCVEARVVANYSMMHRTAPNNKELPAPNVSSAEDKTHIFKVPYHRTXSGRRT

SEQ ID NO: 4380 - protein, 52 aa, Homo sapiens
QTGKNFFHPRYFMAGIKGVTHLFAQETKGKRKCWHQFSICTYNPHSSMNCMR

SEQ ID NO: 4381 - protein, 68 aa, Homo sapiens
  SITE (14): Xaa equals any of the naturally occurring L-amino acids
  SITE (16): Xaa equals any of the naturally occurring L-amino acids
VNSLGPPESTVAVXSXYMQREIKRINYICHRVLSYIPAYTSINTFYAETFGKERLTIHTASCTDIDTY

SEQ ID NO: 4382 - protein, 55 aa, Homo sapiens
SRLTATSASWPKPSSCFCLPKCWDHRCEPLCPASLICFILSLPISLACLWRLKFL

SEQ ID NO: 4383 - protein, 129 aa, Homo sapiens
KTYLKLHNKKLAAFWLMKAKDYPAHTEEDKQEPDSPRVTLVRDVSPLRVRPITENKPQESLTFSFPCSPHLIVLVWIPELTAGLRCLFPHVHVYQSLKITRVFIIRIWKRSLFNQADLCLSFVFTMNSE

SEQ ID NO: 4384 - protein, 66 aa, Homo sapiens
GILNLMFYDIAQHRFIYLFMKWNLALSPRLECSGVILAHCNLRLLGASNAPASASLVAGDCRCLPL

SEQ ID NO: 4385 - protein, 45 aa, Homo sapiens
  SITE (22): Xaa equals any of the naturally occurring L-amino acids
  SITE (24): Xaa equals any of the naturally occurring L-amino acids
NNKCSNAIKENLCDNTKAVLYXKXHALNPCLRDRVEIFLFFLRGI

SEQ ID NO: 4386 - protein, 63 aa, Homo sapiens
PLFLLQDIATSKNPFLIKLLWPGILAFLLMTVILEYLLKTMVGEIDILKIREKVGRVNPGLLM

SEQ ID NO: 4387 - protein, 56 aa, Homo sapiens
  SITE (31): Xaa equals any of the naturally occurring L-amino acids
KKKKRRTRNGILELLGPFSQLHRLSNLAILXNNSEDNKIISKPKLSSRVATNPYSY

SEQ ID NO: 4388 - protein, 33 aa, Homo sapiens
YSNQTSLLNLQLKEVCCLFNQISHSVFLVIVIY

SEQ ID NO: 4389 - protein, 58 aa, Homo sapiens
ILLFFLIEIPFPGGFFLLDYFLRIASLKIELLRQRKNYKIHITRFTILTISKCMTQYY

SEQ ID NO: 4390 - protein, 80 aa, Homo sapiens
  SITE (25): Xaa equals any of the naturally occurring L-amino acids
VKTGFHHVGQVGLKLLTSGDPPASXSQTAGITDMSRRAWLGNFINHSYLPGLSICPIFPKLFFCASFLFYLTVSGLHGFF

SEQ ID NO: 4391 - protein, 49 aa, Homo sapiens
CTLYLLSNFSSLTLFPPSQVTIIPHSMSVHTHYKLPLISENMRYLAFCF

SEQ ID NO: 4392 - protein, 57 aa, Homo sapiens
  SITE (49): Xaa equals any of the naturally occurring L-amino acids
  SITE (53): Xaa equals any of the naturally occurring L-amino acids
SAQVTSMQFLENVNDDILSSQGNWSLLCNRSPSKGLVKMDLLAPVWQPXEQKXQASA

SEQ ID NO: 4393 - protein, 48 aa, Homo sapiens
GGMNGPKCILRNSELLHWALVVVDFQKGIAFKQIYLYTYIHTVCLCVC

SEQ ID NO: 4394 - protein, 106 aa, Homo sapiens
  SITE (105): Xaa equals any of the naturally occurring L-amino acids
GTLFAETKFLCLCFSIIILAGGIFPRGSSGRGSAMAVSPPALSVSSHSALPACRNDFLIMQPVLGIANPPPALHPLLQLTPQPLADVPRVAVPSPVPITECLGQXP

SEQ ID NO: 4395 - protein, 50 aa, Homo sapiens
  SITE (42): Xaa equals any of the naturally occurring L-amino acids
NTVIQKPLRTSGSRKEAGAEQALGRTKDKVIATVMTFHFILXKTNVCLIT

SEQ ID NO: 4396 - protein, 138 aa, Homo sapiens
  SITE (9): Xaa equals any of the naturally occurring L-amino acids
  SITE (11): Xaa equals any of the naturally occurring L-amino acids
  SITE (96): Xaa equals any of the naturally occurring L-amino acids
  SITE (120): Xaa equals any of the naturally occurring L-amino acids
QGGVNWSLXPXPVKKPGTKVSPNKKGGACSGTEPVAASKVSLMVLQLSTGCMCCEYPKELAVECVFGSVCALSVDTGAALSLKRPRPQAWQAPASXLPVLTRPRRATRCRTHLCALLLLXPKGSHGALYCSGRPGHRA

SEQ ID NO: 4397 - protein, 196 aa, Homo sapiens
  SITE (1): Xaa equals any of the naturally occurring L-amino acids
  SITE (4): Xaa equals any of the naturally occurring L-amino acids
XVRXLEINPTKGNKSWSSTAVAAALELVDPPGCRNSARAGTDYVLKDHSRCTVTGWGLSKADGMWPQFRTIQEKEVIILNNKECDNFYHNFTKIPTLVQIIKSQMMCAEDTHREKFCYELTGEPLVCSMEGTWYLVGLVSWGAGCQKSEAPPIYLQVSSYQHWIWDCLNGQALALPAPSRTLLLALPLPLSLLAAL

SEQ ID NO: 4398 - protein, 83 aa, Homo sapiens
  SITE (15): Xaa equals any of the naturally occurring L-amino acids
  SITE (44): Xaa equals any of the naturally occurring L-amino acids
  SITE (49): Xaa equals any of the naturally occurring L-amino acids
  SITE (53): Xaa equals any of the naturally occurring L-amino acids
  SITE (55): Xaa equals any of the naturally occurring L-amino acids
NEGSICHKYGRGCLXFIFSFPVHNTETWYVIGIQLFVAQLNKRXWETSXQRAXNXLGKGELQRRWVVPRLLHDPQMSPQSAVT

SEQ ID NO: 4399 - protein, 51 aa, Homo sapiens
LHSPCSWQILKCHAVNTRNNVNMKKETPEWGWDGDTVVREGREKWSREGSP

SEQ ID NO: 4400 - protein, 109 aa, Homo sapiens
  SITE (43): Xaa equals any of the naturally occurring L-amino acids
  SITE (47): Xaa equals any of the naturally occurring L-amino acids
TAFCDIAVSACSLLAIGIIQVVFFAVFYERFIEDKIRQFVDLXSMSXISVFLLSHKCFGYYIHGRSVHGHADTNMEEMNMNLKREAENLCSQRGLVPNTDGQTFENCNF

SEQ ID NO: 4401 - protein, 35 aa, Homo sapiens
LYKTIILLTVSFSLSENYLNIIIFPIKRHTSKKAH

SEQ ID NO: 4402 - protein, 125 aa, Homo sapiens
  SITE (121): Xaa equals any of the naturally occurring L-amino acids
RRAGEDDHFLIRASAALEKLKLLCGEEKECSNPSNLLELYTQAILDMTYFEENKLVDEDFPEDSSSQKVKELISFLSEPEILVKENNMHPKHCNLLGDELLECLSWRRGALLYMYCHSLTXRREW

SEQ ID NO: 4403 - protein, 51 aa, Homo sapiens
  SITE (50): Xaa equals any of the naturally occurring L-amino acids
KAVSRRCFRKKSDAEHLSSVRRQGTFLPVSRYWQLSSPFCRWRKLKSREXK

SEQ ID NO: 4404 - protein, 59 aa, Homo sapiens
  SITE (33): Xaa equals any of the naturally occurring L-amino acids
LSKYLWRPYYVLSPVPGAEDTAVNETKILTNWXFLIDRISQISKENIQHTRGEKCYGEN

SEQ ID NO: 4405 - protein, 35 aa, Homo sapiens
  SITE (27): Xaa equals any of the naturally occurring L-amino acids
KKISRAWWCAPVIYLSLPRNWDYKCPXPRLANFFF

SEQ ID NO: 4406 - protein, 88 aa, Homo sapiens
ISPNGCTYPLVLVLPRAGRDCCSPKGFILFLNLENSIGQEEKAWCLRGVSSLPVAFVCWLCSCCLSSGHWGAFTGPVNGGLLPRPQRT

SEQ ID NO: 4407 - protein, 58 aa, Homo sapiens
  SITE (13): Xaa equals any of the naturally occurring L-amino acids
  SITE (39): Xaa equals any of the naturally occurring L-amino acids
PPVTRNGLVCQHXSGHREQNIYLVGDTSPAFCQIHWGTXPGTGISMNLGDLEVTQSIL

SEQ ID NO: 4408 - protein, 70 aa, Homo sapiens
  SITE (8): Xaa equals any of the naturally occurring L-amino acids
  SITE (51): Xaa equals any of the naturally occurring L-amino acids
  SITE (67): Xaa equals any of the naturally occurring L-amino acids
TLETGMVXQVPPAPPRGWFSSLGGFKTLLGVVLAILGVRLVLLSLPLLVKXIDKARDARVDRPSTTXLIP

SEQ ID NO: 4409 - protein, 60 aa, Homo sapiens
NAWVPGGCLATATDINYATPTAQGPVTCPLIHPTTAIPGTQASCLEAQESTCTDPLTLVR

SEQ ID NO: 4410 - protein, 66 aa, Homo sapiens
LAFFSICKMMSAFLLYLSFYRLFIYSSFPISMEDVSQDPQRMLETTDNNKLYVSYDFSCTSLPIIK

SEQ ID NO: 4411 - protein, 88 aa, Homo sapiens
  SITE (47): Xaa equals any of the naturally occurring L-amino acids
RQQGPRQFQAQRTSWPSGPCCGLPGIRRRLVQRQLQMGHSSLPSRHXPGFLEVATLWLRPQQTSCPGARIQMNEITRKSCEEGWGGGV

SEQ ID NO: 4412 - protein, 53 aa, Homo sapiens
  SITE (2): Xaa equals any of the naturally occurring L-amino acids
  SITE (6): Xaa equals any of the naturally occurring L-amino acids
PXPISXTLPGLFSTCQFYMYCCGFIHCMKIPVIFFKCAVHISLTELIKGNECF

SEQ ID NO: 4413 - protein, 72 aa, Homo sapiens
  SITE (21): Xaa equals any of the naturally occurring L-amino acids
KEKSNIKQDFNLLFFVFETEXCSVSQAGVQWPDFGSLQLRLLGSCHSPASASGVAGTTGACHDARLIFLVFF

SEQ ID NO: 4414 - protein, 140 aa, Homo sapiens
  SITE (96): Xaa equals any of the naturally occurring L-amino acids
  SITE (130): Xaa equals any of the naturally occurring L-amino acids
  SITE (132): Xaa equals any of the naturally occurring L-amino acids
GLSVLSPACIPCASKVDFTGPCAVHILPKSWGPSKRDVPLTFTQKTRNPTAPSHLPFQPSNKGAAGLCPALTTAKPPPLERQCVLAPGVGLMSTRXSAGSYSCLPLDVPFWRTMELLVLQHGLAAPYWPXVXRDGPWSMD

SEQ ID NO: 4415 - protein, 69 aa, Homo sapiens
KAPSASWATWGTQDTGGAAPHSTPVVAGAAPGCGCAPGAWERPVTLLWARVCCMSTHHPFRALNKQLAT

SEQ ID NO: 4416 - protein, 91 aa, Homo sapiens
  SITE (15): Xaa equals any of the naturally occurring L-amino acids
LTTVSFFLFYFILYXWQAVTQLFSRDVIYYFMRKNCTIIYLFCQSQFYAVVFIHFMFIYVIKLIIRCYFYLNDHLGFNVYLINSKQSLLLT

SEQ ID NO: 4417 - protein, 101 aa, Homo sapiens
  SITE (20): Xaa equals any of the naturally occurring L-amino acids
  SITE (51): Xaa equals any of the naturally occurring L-amino acids
TRVPVVPSTWLENCRRLCGXAGGGHGLGWNSCLDGGWVHFQMWPQLRRPTXSTLAAGSCSGTNAGAPSLRRRPGPAGPTHRFQDISLLGRPVGRKAWLRMN

SEQ ID NO: 4418 - protein, 95 aa, Homo sapiens
  SITE (1): Xaa equals any of the naturally occurring L-amino acids
  SITE (47): Xaa equals any of the naturally occurring L-amino acids
XPFIAPKSGVHGGPPWEPGRPQTLEPPGPISQPLAPQIGCLAPRFGXGTPTYIFLILFLSQSVTSILLVSVQAEVVGEDGGQRPSLVIGGGGTRS

SEQ ID NO: 4419 - protein, 107 aa, Homo sapiens
  SITE (93): Xaa equals any of the naturally occurring L-amino acids
SRSVGERSGTEMRPEMCAFSLLLTADFVIPNTQPKPSLLQVQLFSASPMWKAAQRGLQPNSLDWIAALWLSVPVTLGSLPPLCLSFLSCAKGXLILLNGVGCCEEEI

SEQ ID NO: 4420 - protein, 137 aa, Homo sapiens
  SITE (104): Xaa equals any of the naturally occurring L-amino acids
  SITE (109): Xaa equals any of the naturally occurring L-amino acids
  SITE (136): Xaa equals any of the naturally occurring L-amino acids
  SITE (137): Xaa equals any of the naturally occurring L-amino acids
WIQRIRHEIPVRPCARLAPNPVDDAGLLSFATFSWLTPVMVKGYRQRLTVDTLPPLSTYDSSDTNAKRFRVLWDEEVARVGPEKASLSHVVWKFQRTRVLMDIXANILXIIMAAIGPTVLIHQILQQTERTSGKVXX

SEQ ID NO: 4421 - protein, 34 aa, Homo sapiens
  SITE (23): Xaa equals any of the naturally occurring L-amino acids
  SITE (24): Xaa equals any of the naturally occurring L-amino acids
KFGKACILSMKWIQGSTSGLAMXXSFRGVFSFWS

SEQ ID NO: 4422 - protein, 77 aa, Homo sapiens
APILEKQIDVEILVIKYTSYCSEIIATFEFTYHYLLSSYCKHSLFSFALLKPGGVTSKCGISHNQCFFVYLIFSGYK

SEQ ID NO: 4423 - protein, 110 aa, Homo sapiens
  SITE (79): Xaa equals any of the naturally occurring L-amino acids
MIFSVASWKREQFATVEEPRKRNFSRRYNAQPISCSTIDFPGNMNCQERNGTQNQTLFYIYGLQTGFHQWLNSQISYIXCIQNWRTPREYFLRAGRGAPSVFPPGGGVPG

SEQ ID NO: 4424 - protein, 124 aa, Homo sapiens
  SITE (82): Xaa equals any of the naturally occurring L-amino acids
  SITE (93): Xaa equals any of the naturally occurring L-amino acids
  SITE (112): Xaa equals any of the naturally occurring L-amino acids
ERERELVSRCSSTRLQERWNTKSDLHQNTVSIDPKLAAKAKINTTNREGYLEQFGDSHGSGAKLGDPRLQKNFDPRLHRLPXTESHSSGYGRXPHAFKGCPSTLPRSKPWFXHSPSRGPGTSHF

SEQ ID NO: 4425 - protein, 45 aa, Homo sapiens
YFLERPRAHRFSTRVGYQVSVPNSPYSESYYNSLAVVLQRRDWEN

SEQ ID NO: 4426 - protein, 231 aa, Homo sapiens
REQKLELARLQVDTSGSKEFSTRTSFPSPMEIQQTESLFPSTGMKQTINNGRAAAPVVMDVLQTDVSQNFGLELDTKRNDNSDYCGISEGMEMKVALSTTVSETTESILQPSIEEADILPIMLSEDNNPKFEPSVIVTPLVESKSCHLEPCLPKETLDSSLQQTELMDHRMATGETNSVYHDDDNSVLSIDLNHLRPIPEAISPLNSPVRPVAKVLRNESPPQVSVDNNSH

SEQ ID NO: 4427 - protein, 42 aa, Homo sapiens
KGMLAHKPPICWPQRLEITTFCVLHCEKKKKTEVKGVKATQS

SEQ ID NO: 4428 - protein, 57 aa, Homo sapiens
TPTKGNKSWSSTAVAARSRTSGSPGLQEFGTSCLSLPRANLGKCVQEEEIKMKRLTV

SEQ ID NO: 4429 - protein, 47 aa, Homo sapiens
DVYYVGADVSDSQLLGTWDNLKAAGLEDKIELLKISVIGKILKMQNN

SEQ ID NO: 4430 - protein, 51 aa, Homo sapiens
CLCIVLNPVLTELRFCIFYKQSLEAEPLSVYPGLVAFHVESTKIFPVSWEG

SEQ ID NO: 4431 - protein, 122 aa, Homo sapiens
SCFWPCPFLLSQALCPSLSQELVFVLLLGDMLRAEVRAEEAGKVDYDHHVQHEQDTQQEGAQGPLVHITQEEMGEVGLRGQAEEKVHDQVHILVNPVEEMILGITDFHHHANGEEDVADFHQ

SEQ ID NO: 4432 - protein, 192 aa, Homo sapiens
  SITE (158): Xaa equals any of the naturally occurring L-amino acids
  SITE (180): Xaa equals any of the naturally occurring L-amino acids
  SITE (183): Xaa equals any of the naturally occurring L-amino acids
  SITE (184): Xaa equals any of the naturally occurring L-amino acids
  SITE (192): Xaa equals any of the naturally occurring L-amino acids
QRPHPRSQDPLVKRSWPDYVEENRGHLIEIRDLFGPGLDTQEPRIVILQGAAGIGKSTLARQVKEAWGRGQLYGDRFQHVFYFSCRELAQSKVVSLAELIGKDGTATPAPIRQILSRPERLLFILDGVDEPGWVLQEPSSELCLHWSQPQPGGCTAGXFAGENYTFPRHSFLDHRVRDHXLLXXPLISFFWX

SEQ ID NO: 4433 - protein, 46 aa, Homo sapiens
FPSLELLQLCYFFLKARVIGSTLVITHCLEILHFVYKVIFYVQHFA

SEQ ID NO: 4434 - protein, 70 aa, Homo sapiens
  SITE (31): Xaa equals any of the naturally occurring L-amino acids
  SITE (48): Xaa equals any of the naturally occurring L-amino acids
  SITE (49): Xaa equals any of the naturally occurring L-amino acids
  SITE (50): Xaa equals any of the naturally occurring L-amino acids
  SITE (64): Xaa equals any of the naturally occurring L-amino acids
  SITE (65): Xaa equals any of the naturally occurring L-amino acids
  SITE (69): Xaa equals any of the naturally occurring L-amino acids
PQMIHPPWLTKCWDYRCEPPTWQVTIKFIMXSALYLYGIPIPIRLSIXXXPMIEELLHFHDYTXXKFLXP

SEQ ID NO: 4435 - protein, 50 aa, Homo sapiens
  SITE (11): Xaa equals any of the naturally occurring L-amino acids
  SITE (25): Xaa equals any of the naturally occurring L-amino acids
VQFPAEVLPLXSSRSCISESFLLIXFFASPSSLSAVSSTSSLCLSNCCAN

SEQ ID NO: 4436 - protein, 58 aa, Homo sapiens
  SITE (2): Xaa equals any of the naturally occurring L-amino acids
IXLVFHISCLDTSSARPVFSVRLIDIEISIYIEMGLNFIQSYFCLYFGGIQVNFPHLH

SEQ ID NO: 4437 - protein, 45 aa, Homo sapiens
FNELPCSHHASSNMNTWSTLYHLNSCRQALPHPVVLNKIHHCISL

SEQ ID NO: 4438 - protein, 72 aa, Homo sapiens
ADLPSSISVHSPALPCSALPCSAPPCRTADTSEFIIDFLFTTPPPTPVYHHSLSASYVPRPWGPRASERPTG

SEQ ID NO: 4439 - protein, 44 aa, Homo sapiens
NMTEDSQRNFRSVYYEKVGFRGVEEKKSLEILLKDDRLDTEKLY

SEQ ID NO: 4440 - protein, 82 aa, Homo sapiens
  SITE (35): Xaa equals any of the naturally occurring L-amino acids
  SITE (70): Xaa equals any of the naturally occurring L-amino acids
  SITE (82): Xaa equals any of the naturally occurring L-amino acids
CDCLALFLVCGLQWHPVLRTLKNRIEENTGHTFNXLLCNLYRNEKDSVDWHSDDEPSLGRCPIIASLSFXATRTFEMRKKAX

SEQ ID NO: 4441 - protein, 52 aa, Homo sapiens
NFMITNREGLLSHNNHWWNGDLISNNSQVPPSKHLRACESVEDTYLLSTCHV

SEQ ID NO: 4442 - protein, 58 aa, Homo sapiens
IQSLDLCQIETQKRPLILCPLDVMTLYVSVASVYFGIVTFFLIYCFMRGNKLLPEFLT

SEQ ID NO: 4443 - protein, 68 aa, Homo sapiens
ANSAHCNLRFPGTGQTPSLMHLCPLRLPSPRNGPSFRTQLTLIFFPGTYPPRLSSVLVSSGLLELGLQ

SEQ ID NO: 4444 - protein, 51 aa, Homo sapiens
  SITE (43): Xaa equals any of the naturally occurring L-amino acids
GRGRPQPDVPVHHTLQSDRCALPGRPPPSLSPLPQPLLQPHSXPLKGLHVA

SEQ ID NO: 4445 - protein, 50 aa, Homo sapiens
VRSHEYCIDHTSGLWLSGWQIPIATLSYAVCLKSETRRHRNLRCCPREDS

SEQ ID NO: 4446 - protein, 113 aa, Homo sapiens
PDGTGREKIVIPVFNLFVKDIYFLHKIHTNHLPNGHINFKKFWEISRQIHEFMTWTQVECPFEKDKKIQSYLLTAPIYSEEALFVASFESEGPENHMEKDSWKTLRTTLLNRA

SEQ ID NO: 4447 - protein, 129 aa, Homo sapiens
  SITE (22): Xaa equals any of the naturally occurring L-amino acids
LEEEELELARGKRVDGPSLEAXMQALPKDGLVAGSGQEGTRGLLPLRPGCGERPLAWLAPGDGRKSEEAAGAGPRRRQAQDTEATQSPAPAPAPASHGPSERWSRMQPCGVDGDIVPKEPEPFGARQRG

SEQ ID NO: 4448 - protein, 79 aa, Homo sapiens
  SITE (62): Xaa equals any of the naturally occurring L-amino acids
RNENKSKPWMSAPSGKAGGYSCSGRLDRKSPPNVPIAGLLSTEDGWWPDVRTPLLPGRAGMXAEVTEQCFLVGGRSPRA

SEQ ID NO: 4449 - protein, 75 aa, Homo sapiens
  SITE (40): Xaa equals any of the naturally occurring L-amino acids
LSISHGSGLLIVYVTIHLISLNFGHPRLNIFFQIPVSFQXLTVNFTQEEWQQLDPAQRLLYRDVMLGNYSNLVSV

SEQ ID NO: 4450 - protein, 80 aa, Homo sapiens
  SITE (45): Xaa equals any of the naturally occurring L-amino acids
  SITE (80): Xaa equals any of the naturally occurring L-amino acids
ARAARCDRCADEPQQPLPRGRPPPLLPGGPVCKAAASAPSSLLDXPCLCPAPSVRTAVALTTPDITLVLPPDVIQQEASX

SEQ ID NO: 4451 - protein, 46 aa, Homo sapiens
LPCLRFCYLGRKHSKCSLKHILKLRHTGKNWLKFSPQVPYSRNRNP

SEQ ID NO: 4452 - protein, 130 aa, Homo sapiens
  SITE (123): Xaa equals any of the naturally occurring L-amino acids
  SITE (128): Xaa equals any of the naturally occurring L-amino acids
KASFSLKKIIFNIESKNWMYYFELLIAATWRCPSKKAFFLHGMNCALLLMMTTAEVMLYVQALTLFHIFTRVHIYTRALIYSRSFPDREAFFQATKVACYPTVALPKLRVTSGGPTWLTWVGXTWGAXKG

SEQ ID NO: 4453 - protein, 80 aa, Homo sapiens
  SITE (66): Xaa equals any of the naturally occurring L-amino acids
PRVCEEVHWPHAHSLCEICRERGADRQHPSPVVLPAGPCSARPIFICVSPPGSPALVFCGAVGPRXASYPGIQLEHVFLD

SEQ ID NO: 4454 - protein, 68 aa, Homo sapiens
YTVIPNNNNVCITHNALHLFTMLAPTPLLPLPASSAPSSTLMVLSLPPQASTSHDLRCLFPFHLFLQQ

SEQ ID NO: 4455 - protein, 84 aa, Homo sapiens
LWSTFLLEINLLENKVSSQTKQNLSYNLHHYKEIAVRVLHILKTFQFQMCISSINLPLLIYLVEGISDSRFLLQDESKNEWVNE

SEQ ID NO: 4456 - protein, 78 aa, Homo sapiens
  SITE (35): Xaa equals any of the naturally occurring L-amino acids
  SITE (36): Xaa equals any of the naturally occurring L-amino acids
HVTMFSPKTNIKSEGKGSSRSRSSCAREGIPRGSXXCPPSPAPRSLPPPPAHVYAASSTQEMGSGWPVGWPTICYSFL

SEQ ID NO: 4457 - protein, 90 aa, Homo sapiens
  SITE (54): Xaa equals any of the naturally occurring L-amino acids
  SITE (88): Xaa equals any of the naturally occurring L-amino acids
ISNEFIMLIEKDSKNVVFNCSCRDVIGWTSGLVSIKVFYERGECVLLSSVDNCXEDIREIVQRLVIVTRGCETCGNDPEEERAGQALXSM

SEQ ID NO: 4458 - protein, 205 aa, Homo sapiens
  SITE (153): Xaa equals any of the naturally occurring L-amino acids
  SITE (190): Xaa equals any of the naturally occurring L-amino acids
AVAHSPFPAWRRDNTEARGGLKPEYDAVVIGAGHNGLVAAAYLQRLGVNTAVFERRHVIGGAAVTEEIIPGFKFSRASYLLSLLRPQIYTDLELKKHGLRLHLRNPYSFTPMLEEGAGSKVPRCLLLGTDMAENQKQIAQFSQKDAQVFPKYXEFMHRLALAIDPLLDADPVDMAAFQHGSLLQRMRSLXTLKPLLKAGRILGAQ

SEQ ID NO: 4459 - protein, 66 aa, Homo sapiens
SQALKGQKLPLYCIALSNSNIVKNQCKTTSSDGSLLAFKLAYLPWNQFSKTMFPFSPFPTILFSLP

SEQ ID NO: 4460 - protein, 64 aa, Homo sapiens
TGNLMTLSSCVCACGLGRDGARAEQRMRWGLWDPLQAHGEQMMHPFLCLPCVRVKAASGLWPSW

SEQ ID NO: 4461 - protein, 67 aa, Homo sapiens
DRRMQWRSGRRWGQRFPFEGDGQSPSDQRRRGGLVPGQFGALVVRCWKAVGRNILFVVVVSVLGCSN

SEQ ID NO: 4462 - protein, 44 aa, Homo sapiens
  SITE (31): Xaa equals any of the naturally occurring L-amino acids
  SITE (44): Xaa equals any of the naturally occurring L-amino acids
YSEWSQDLNQSYAESFLLIQRAAVFSCADRXCYVICWANNFTVX

SEQ ID NO: 4463 - protein, 87 aa, Homo sapiens
  SITE (15): Xaa equals any of the naturally occurring L-amino acids
  SITE (35): Xaa equals any of the naturally occurring L-amino acids
  SITE (63): Xaa equals any of the naturally occurring L-amino acids
  SITE (82): Xaa equals any of the naturally occurring L-amino acids
KDSSITKICHQSGTXAKALRALWETRVFPSHMGGXISVFSSARGFSLYLKDVGGEVSSQLEQXFPQRWEGGPTARDTWRFFXPPRRF

SEQ ID NO: 4464 - protein, 42 aa, Homo sapiens
  SITE (18): Xaa equals any of the naturally occurring L-amino acids
  SITE (21): Xaa equals any of the naturally occurring L-amino acids
  SITE (24): Xaa equals any of the naturally occurring L-amino acids
  SITE (29): Xaa equals any of the naturally occurring L-amino acids
  SITE (32): Xaa equals any of the naturally occurring L-amino acids
GLKVLYCLGFRRHHMGLXMKXQVXIKRMXPWXNIFAQKAGVI

SEQ ID NO: 4465 - protein, 87 aa, Homo sapiens
  SITE (73): Xaa equals any of the naturally occurring L-amino acids
NDSQNSQEHSTCHYSFIIKDTDQQQPNEETHGARSEWGFERRASVPCSLWDLGYIHPSGTVMCLPTGSSIELXLSKFFTGVSLRRLD

SEQ ID NO: 4466 - protein, 66 aa, Homo sapiens
  SITE (59): Xaa equals any of the naturally occurring L-amino acids
MQFGLLFSLSLGHIPLECNVKTLCLKSLERIFLCHTATNLIVRFFCSLMLGLLFLLLFXNCVESIM

SEQ ID NO: 4467 - protein, 52 aa, Homo sapiens
  SITE (10): Xaa equals any of the naturally occurring L-amino acids
NSFVQAQCIXCSLKLSLPLESGYRSTLYYSMVAFLEYLLLITFPFLKHFNLQ

SEQ ID NO: 4468 - protein, 63 aa, Homo sapiens
VYAHCCGTEPQNFFIFKAETLYPLNDYLFPSPGTHHSPCTHHSPFGFYEWDYSGYLIEVELDN

SEQ ID NO: 4469 - protein, 40 aa, Homo sapiens
GLESNLKNKKYKYELVMKMYSYCLGLGGFAYFLKTIEVKG

SEQ ID NO: 4470 - protein, 67 aa, Homo sapiens
  SITE (16): Xaa equals any of the naturally occurring L-amino acids
  SITE (57): Xaa equals any of the naturally occurring L-amino acids
FIHLFISPNSYQVLGXSGNGEKTNSIVPASESCTACLGKFAGTEAVEFPWVRGHTGXFGEPGEQRDL

SEQ ID NO: 4471 - protein, 74 aa, Homo sapiens
QQGSSIIFINICNFIRRNQRFIRFLLLLETPRGHWKHSCHPSPRQGPRPAPALQALPARDAPTHLLPQLGNTGP

SEQ ID NO: 4472 - protein, 66 aa, Homo sapiens
NNINLIVTLLGLVPTLCSILSRDVLHFLTFGLYTLYHLLKFSFVCVYMYPCVHFKYQYKLINNVSG

SEQ ID NO: 4473 - protein, 90 aa, Homo sapiens
NKLYYYTFLVAACNRTDFNLRNVYLRDIDQVYKDKRSKSCHRRSTPPMYALSLLHTHTHTRTHTLSLMCLPRLTAAGVICSFHAWKRHIW

SEQ ID NO: 4474 - protein, 54 aa, Homo sapiens
AYCMLERPCVFVLILVKKLEFLPFMYKKITTTANKIKMLVCINTVLVLRAIYIM

SEQ ID NO: 4475 - protein, 74 aa, Homo sapiens
  SITE (4): Xaa equals any of the naturally occurring L-amino acids
GSQXKSQGMSSTSSKAESTWDPAQVSAKLRLIRTSPTMKLSEGTIQTLPSCWGGDEFYPPPHTGTQPAASFQSN

SEQ ID NO: 4476 - protein, 58 aa, Homo sapiens
  SITE (21): Xaa equals any of the naturally occurring L-amino acids
  SITE (39): Xaa equals any of the naturally occurring L-amino acids
  SITE (53): Xaa equals any of the naturally occurring L-amino acids
  SITE (54): Xaa equals any of the naturally occurring L-amino acids
GCGGFYGLSQSNEEPSHFWVXIHKKMKSGPQRNSCIPMXIAALLTITKIWNLXXSINE

SEQ ID NO: 4477 - protein, 79 aa, Homo sapiens
  SITE (57): Xaa equals any of the naturally occurring L-amino acids
  SITE (61): Xaa equals any of the naturally occurring L-amino acids
RTGHSWAPSRSRTSARSSVLGSRSWGTCTRPPPGELSQGGPSVDPRSDVSSTLLGIXPSSXHTGDVLGPGTERGRRENS

SEQ ID NO: 4478 - protein, 115 aa, Homo sapiens
  SITE (2): Xaa equals any of the naturally occurring L-amino acids
  SITE (20): Xaa equals any of the naturally occurring L-amino acids
LXLPAVAAALELVDPPGCRXSARAKTCPTMRALFSGTMPTSETVFLILFLALRLPGRKLVSSAVSPSIIPQEDPSQQLLQQSLEGVCSLQHLDPQGAQELLEFTISLCSPGRYSR

SEQ ID NO: 4479 - protein, 103 aa, Homo sapiens
  SITE (41): Xaa equals any of the naturally occurring L-amino acids
  SITE (54): Xaa equals any of the naturally occurring L-amino acids
  SITE (58): Xaa equals any of the naturally occurring L-amino acids
AGACGPAAPEPGEAAAADRCRMYSSGWPAGAAEPRHGRGRXLAQALGCMHGAPXQLAXLSLAHCSSLKSRPELEHQASGTKDACPEPQGPLPAHAGGPLQELD

SEQ ID NO: 4480 - protein, 150 aa, Homo sapiens
  SITE (137): Xaa equals any of the naturally occurring L-amino acids
VAVPGLFLLPLPVGPDMAQPGALASALPWVFAGKAQRLRPLYQYVNYCNPELNQAGKGDGEAEVEAEAELAPVPEEGGVEQLQALLPLAGELGPGLALPCPSPLVTPTHALAPLGEEAGEEPGGLPSFGGEVTTRAXWIKSTQVDIDKNA

SEQ ID NO: 4481 - protein, 204 aa, Homo sapiens
  SITE (120): Xaa equals any of the naturally occurring L-amino acids
  SITE (166): Xaa equals any of the naturally occurring L-amino acids
  SITE (168): Xaa equals any of the naturally occurring L-amino acids
SSPALPGTDGVLRRMSPVCPPSPVVLACLVSSPHVPASLTPPPTRGSPEIAENSKRSPGTGKKSRQGRLRSLHPSLLPSLHPDPAQTFVTTPSLSPAGWVGGIPLCRWLQRQDRPPGHVXGHGEARATVTLPILLGGLLSILDRKEASSGCVPGTPITLGPQGQPXVXGGYLTAGLAKEMGGQLPDTPKDPVLFPERPKVTLGT

SEQ ID NO: 4482 - protein, 135 aa, Homo sapiens
ITRASLGHTFSSKSLRAPPRACLRVSFLQDIALWNTALCLLDQFRVSQPAHSSAYFLWGPSTSFADVPQGKSLCVPELPLGSAEAFLYILWLRLCPFWALQAPPLPGLERQRVSLGALHPLCCFVLKTKKKKKKK

SEQ ID NO: 4483 - protein, 238 aa, Homo sapiens
VGQGSRQSGRGVGVRSDISCQHAFLCAPGPRELAAPGGAHASRSAVRPPCHHPLHDLTPEQDLGPVQLPTRTSLSGDSPRPFCVPCPPSPRCSGLVCDVQSRSHTLPFPHWNGQFIALTLGSQPCSWELEEHLEILRDHTLPPSPAHRGRGHRKEAGPSSELMCHKCCGLPELGSPWLAPGGEGQMPPGLTLQAALPSLPCHFQISLPPTCHSPINVKVRVTAGLCVQFPKSLFCWAA

SEQ ID NO: 4484 - protein, 125 aa, Homo sapiens
  SITE (100): Xaa equals any of the naturally occurring L-amino acids
  SITE (117): Xaa equals any of the naturally occurring L-amino acids
  SITE (124): Xaa equals any of the naturally occurring L-amino acids
EPHAPELDPVVEHLELAATAAAPAVGSGGDTLPAAGTDVVPCTLHHWLPPAELLVACRGRGVAPPATGSPAAGAQCSACPPLHGLLPAALLHTAEPCGPXHLHDSPRRHSGFGSIEXQPHPLLXL

SEQ ID NO: 4485 - protein, 108 aa, Homo sapiens
  SITE (49): Xaa equals any of the naturally occurring L-amino acids
  SITE (51): Xaa equals any of the naturally occurring L-amino acids
  SITE (73): Xaa equals any of the naturally occurring L-amino acids
  SITE (93): Xaa equals any of the naturally occurring L-amino acids
TTCLCYSGGAVQIDKDMPVPAGHHLCLSTVGEVSVPLSHPCWGPALAFXEXSFFRTKQTPTTSSLKHGRTRPXAWVSRWKGMSTAALGPDASXAYAGWRSPFPGKPRL

SEQ ID NO: 4486 - protein, 161 aa, Homo sapiens
  SITE (76): Xaa equals any of the naturally occurring L-amino acids
  SITE (79): Xaa equals any of the naturally occurring L-amino acids
  SITE (152): Xaa equals any of the naturally occurring L-amino acids
  SITE (159): Xaa equals any of the naturally occurring L-amino acids
PPIQLGSLVTQEAPAQDSLGSWINSSPDSSENLSEIPLSHKERKEILTGTKCIWVKAARRRSRALGTEGRHLLAPXTEXSSLSLHSLSEGDDARPPGPLACKRPPSPTLQHAASEDNLSSSTGEAPSRASRTSWGRPQALACWPRKKKLGKXKGKEVLXRQ

SEQ ID NO: 4487 - protein, 98 aa, Homo sapiens
  SITE (32): Xaa equals any of the naturally occurring L-amino acids
  SITE (44): Xaa equals any of the naturally occurring L-amino acids
GKASSRGPVLYLGRGQEGLRGRRHTRHIGYSXTGAWPVLPSHRXCKSSSRRSCAMRRCPSWTTRAWARAPGSLNCAGSFSLGTHLSTTPGDPDPVSLY

SEQ ID NO: 4488 - protein, 131 aa, Homo sapiens
  SITE (85): Xaa equals any of the naturally occurring L-amino acids
SETANGSHSQKKGAVSHAALPMDRPSQTGRTFVARLWATPYRWLLLEPVTASTSPSPRYLVPDQDDGAGKLPPGVPAALAPPSWXLRAAGVAVEAAAAPSGRVALSWGSDPSPSPAPQDTQNPTPRPLGLL

SEQ ID NO: 4489 - protein, 69 aa, Homo sapiens
FCAVCSALLSLSHPADPLFPLCQTMTSAHFCPLLEQRRQSWDRTSSPRTNIQCDCGYQEIFLPLIVLHL

SEQ ID NO: 4490 - protein, 116 aa, Homo sapiens
  SITE (72): Xaa equals any of the naturally occurring L-amino acids
EQGEETRRRVRRRQHGIPPSGLSGRCWWGIKMNTLQTRTRAPQELFVPPETSGPTSEKMLVSFHGSSLRNEXTPQYGLEEEAGNGRWQQSLSLECWPLWTSHPFGTPSLMTLAVER

SEQ ID NO: 4491 - protein, 101 aa, Homo sapiens
  SITE (1): Xaa equals any of the naturally occurring L-amino acids
  SITE (65): Xaa equals any of the naturally occurring L-amino acids
  SITE (100): Xaa equals any of the naturally occurring L-amino acids
XITGDPNIPAGQQTVEIDLRHRIQLPDLENQRNFNELSRIVLEVRERVRRSSRKAGTRRARVVAXRAPGSPSQALPSPGQRRPARAQMGQLVRMVASLGXP

SEQ ID NO: 4492 - protein, 138 aa, Homo sapiens
  SITE (32): Xaa equals any of the naturally occurring L-amino acids
  SITE (34): Xaa equals any of the naturally occurring L-amino acids
  SITE (104): Xaa equals any of the naturally occurring L-amino acids
  SITE (105): Xaa equals any of the naturally occurring L-amino acids
  SITE (129): Xaa equals any of the naturally occurring L-amino acids
HEEGGTGAVRGCELSGHTRSFTFKVEEEDDAXTXLALTMLCLTEGAKDECNVVEVVARNHDHQEIAVPVANLKLSCQPMLSLDDFQLQPPVTFRLKSGSGPVRXXGRHQIVTMSNDVSEEESEEEEEDXDEEELSCAP

SEQ ID NO: 4493 - protein, 111 aa, Homo sapiens
  SITE (67): Xaa equals any of the naturally occurring L-amino acids
  SITE (91): Xaa equals any of the naturally occurring L-amino acids
  SITE (100): Xaa equals any of the naturally occurring L-amino acids
ATPRRGRSRKEQSLQKLYQNREKSEEQLTLKQEEAFRSYFEIFNGPGEVDAQSLKNILLLMGFSVTXAQVEDALMSADVNGDGRVDFKDFXAVMTDTRRXFCSVEQNALSD

SEQ ID NO: 4494 - protein, 143 aa, Homo sapiens
  SITE (34): Xaa equals any of the naturally occurring L-amino acids
  SITE (80): Xaa equals any of the naturally occurring L-amino acids
  SITE (108): Xaa equals any of the naturally occurring L-amino acids
  SITE (135): Xaa equals any of the naturally occurring L-amino acids
  SITE (142): Xaa equals any of the naturally occurring L-amino acids
GTRSRRPCRDTGRWFGCRFCQQHPQGGNHRLQRXQNGRVRQGGSGQCIPAEPSLPRACLHGPCPGGRAAMGSRPSQAQTXSGSFDIGHPPYLGNGRLKTKLDPTLEEXVFGSRESGIAEVFFGSPRRSFFKLLFXGKAEPLXP

SEQ ID NO: 4495 - protein, 118 aa, Homo sapiens
GKPGVPSVVKFHPFTPCIAVADKDSICFWTGERGEAGLFPQWEPSVHEVTAMEYLNGQDCSLLLTATDDGAIRVWKNFADLEKNPEMVTAWQGLSDMLANDARSWGWWWIGSRRPASS

SEQ ID NO: 4496 - protein, 60 aa, Homo sapiens
VSLAWTRNSPSFGLLRDCRNITFEGCFSSFHFSSSPSHLVQHLHSEAEICQKSILFLSEN

SEQ ID NO: 4497 - protein, 98 aa, Homo sapiens
  SITE (24): Xaa equals any of the naturally occurring L-amino acids
  SITE (41): Xaa equals any of the naturally occurring L-amino acids
AITPSARDRRPGPDRIRKLAICAXTAGFLIFHILGCTALVXSLSWRSQGLGRVQLEFAIYPPPSLRPVEPYNCILTTHTTLNILTVLHVTIALCILAN

SEQ ID NO: 4498 - protein, 135 aa, Homo sapiens
  SITE (69): Xaa equals any of the naturally occurring L-amino acids
HAGRGDRCLHPLRHAFVKLAQSEYQLLADIIPEHHQKKTFDSLIQDALDGLMLEGENIVSAARKAIVRXDFSTVLTVFPILRHLKQTKPEFDQVLQGTAASTKNKLPGLITSMETIGAKALEDFADNIKNDPDKE

SEQ ID NO: 4499 - protein, 102 aa, Homo sapiens
NDRQGSELLMPVGAVSQNIGCYRLSSIYLLKGQHWTSIWRAPSPHSQHLLARWADPSPWLLGEQRTQAWPMTALCPQTPVISQGKAEDPHEPNQRSEFCRNY

SEQ ID NO: 4500 - protein, 44 aa, Homo sapiens
VSTRCAPTPGVGVSFEDENVSLSYALNAGGHGWSKMCQGVQARS

SEQ ID NO: 4501 - protein, 149 aa, Homo sapiens
  SITE (121): Xaa equals any of the naturally occurring L-amino acids
  SITE (129): Xaa equals any of the naturally occurring L-amino acids
  SITE (135): Xaa equals any of the naturally occurring L-amino acids
  SITE (141): Xaa equals any of the naturally occurring L-amino acids
WVDSSVYAVAMSSSQRSPGWDLDSEEGWRLCSKRQNLLLCVLTVVVTSGSPRCVSGNPNRERKQGEQSLAPSPFASPVCHPPGHGDHLDRAKNSPPQAPSTRDHGSWEPSVPPLEALWASXLVGPPIPXFSWGCXRCFSDXPGGNFHCC

SEQ ID NO: 4502 - protein, 95 aa, Homo sapiens
  SITE (91): Xaa equals any of the naturally occurring L-amino acids
  SITE (93): Xaa equals any of the naturally occurring L-amino acids
GRGEGLLGREQGGILGSGEGARLSLLQWLWLGLGRAPPVPGFWSLPPSLQASVEEQAGAFALLPPPTLQPWDLWKQPLYCSASSWSVSPRXAXSC

SEQ ID NO: 4503 - protein, 59 aa, Homo sapiens
PGTGLGEDRAETGGSIGTSAHFSHNAFPNDRLERLLDPNSLRARQENVLKFIANTEFWR

SEQ ID NO: 4504 - protein, 77 aa, Homo sapiens
ASVSVSVKQESITYEISCAGTILGVEDTIQQLGHWLFPASTLQLHHQAFRHGKEPHYWLSSVFSLPTQCRSLHLSAL

SEQ ID NO: 4505 - protein, 47 aa, Homo sapiens
  SITE (31): Xaa equals any of the naturally occurring L-amino acids
QTLGADKWMINEVASKKPKEPNVGGATSLQXTSKLLQWLFLPLPLGR

SEQ ID NO: 4506 - protein, 71 aa, Homo sapiens
  SITE (10): Xaa equals any of the naturally occurring L-amino acids
  SITE (33): Xaa equals any of the naturally occurring L-amino acids
  SITE (64): Xaa equals any of the naturally occurring L-amino acids
RAPSAPLTTXSPRTTMASSVSPSRETSCSVAPXNNGIKKWDLDQQELVQQIPNAHKDWVCALAXIPGRPMV

SEQ ID NO: 4507 - protein, 67 aa, Homo sapiens
  SITE (11): Xaa equals any of the naturally occurring L-amino acids
TLNPVLRSVKXCLPFLPPGSVACRLYLPAYSGDPHEIAAGNVLPCWLLGWNEALAFGILPGSFGGSF

SEQ ID NO: 4508 - protein, 94 aa, Homo sapiens
  SITE (29): Xaa equals any of the naturally occurring L-amino acids
  SITE (48): Xaa equals any of the naturally occurring L-amino acids
  SITE (49): Xaa equals any of the naturally occurring L-amino acids
  SITE (60): Xaa equals any of the naturally occurring L-amino acids
HVVFRYQAGREDELTITEGEWLEVIEEGXADEWVKARNQHGEVGFVPXXYLNFPDLSLPXSSQDSDNPCGQSTSIPGTGPVQLHRTECRGAELP

SEQ ID NO: 4509 - protein, 50 aa, Homo sapiens
NPNITILLKITFKIQSVANIRSGCKTLASRQASQGHCSEGHYLSIPVSSV

SEQ ID NO: 4510 - protein, 196 aa, Homo sapiens
  SITE (44): Xaa equals any of the naturally occurring L-amino acids
  SITE (63): Xaa equals any of the naturally occurring L-amino acids
  SITE (66): Xaa equals any of the naturally occurring L-amino acids
HERKGKTDSPWIKPARKRRRRSRKKPSGALGSESYKSSAGSAEXTAPGDSTGYMEVSLDSLDXRVXGILSSQAEGLANGPDVLETDGLQEVPLCSCRMETPKSREITTLANNQCMATESVDHELGRCTNSVVKYELMRPSNKAPLLVLCEDHRGRMVKHQCCPGCGYFCTAGNFMECQPESSISHRFHKDCASRVQ

SEQ ID NO: 4511 - protein, 120 aa, Homo sapiens
  SITE (4): Xaa equals any of the naturally occurring L-amino acids
  SITE (8): Xaa equals any of the naturally occurring L-amino acids
  SITE (15): Xaa equals any of the naturally occurring L-amino acids
  SITE (62): Xaa equals any of the naturally occurring L-amino acids
SPAXSATXRGISPPXVADFIKETAPGLRGNKWGPMLNGALERSTGCAGALPPGSQPSLSLPXLRPTYPTPSLPALHHPGRAPQPQPSQAESSLVPPLLVGHFWKTSRVPRSKLCGPLWHP

SEQ ID NO: 4512 - protein, 76 aa, Homo sapiens
EFGTRNPQPHTRRMVFYHCGSSLLLFFLAFQEAVPLCPRVNLKFLLCASAVLCCSLLSFLSGRSAKLVPRELFLTS

SEQ ID NO: 4513 - protein, 46 aa, Homo sapiens
  SITE (1): Xaa equals any of the naturally occurring L-amino acids
  SITE (46): Xaa equals any of the naturally occurring L-amino acids
XRNNLGLFIERAHRVGAGHGAVQGHHARGRPCHAPSSRSAKGSGSX

SEQ ID NO: 4514 - protein, 51 aa, Homo sapiens
  SITE (25): Xaa equals any of the naturally occurring L-amino acids
  SITE (46): Xaa equals any of the naturally occurring L-amino acids
AGRGGSRCESQHFGRPRWADHLRSXVRDQPDQHGETRLYLKKQKIXPGMLA

SEQ ID NO: 4515 - protein, 106 aa, Homo sapiens
KQELAIHDSLTNRTFVTYDPMDEIRIAEINSQVRRYLEGTLDEIDIISLRQIKEVFNQFRVVLSQQEQEVESTLRRSTPSLTGMTLQPFLAIQKAGLVDVDGHLSG

SEQ ID NO: 4516 - protein, 98 aa, Homo sapiens
  SITE (58): Xaa equals any of the naturally occurring L-amino acids
  SITE (68): Xaa equals any of the naturally occurring L-amino acids
  SITE (81): Xaa equals any of the naturally occurring L-amino acids
GEAQHHGTTTGCCCRARAGRAADDTTAGGFLQPLMALLYPDCGGGGSTATGPLWSNTXRARTWSWAAXMIMPSSPSMWPWXGLHRGRLYFGGLFQVSV

SEQ ID NO: 4517 - protein, 121 aa, Homo sapiens
  SITE (71): Xaa equals any of the naturally occurring L-amino acids
  SITE (72): Xaa equals any of the naturally occurring L-amino acids
  SITE (88): Xaa equals any of the naturally occurring L-amino acids
LIPRSLQLPREVGSQPAAMSDINLDWVDRRQLQRLEEMLIVVDENDKVIGADTKRNCHLNENIEKGLLHRXXSVVLFNTKNRILIQQXSDTKVTFPDFSRGHCVHDNLSPQGKIRQNLGRA

SEQ ID NO: 4518 - protein, 62 aa, Homo sapiens
VVREATNQSHWELELRIRRASFACQWCHWLAVQPMASHCKSQSFGLLVCENDKYSAGLTEAW

SEQ ID NO: 4519 - protein, 101 aa, Homo sapiens
NLGLAARESVYCFQLSRLVEKKAHWKEVEVGVEKACIWYLLQMWPDNESPVSQVLLYSCVLRVRSPSDTSTTKRAQSDTGVLTVREKITARERESAETSKA

SEQ ID NO: 4520 - protein, 156 aa, Homo sapiens
  SITE (118): Xaa equals any of the naturally occurring L-amino acids
  SITE (122): Xaa equals any of the naturally occurring L-amino acids
  SITE (130): Xaa equals any of the naturally occurring L-amino acids
FLLKIHHLDGLCFSTSIPWVKTQFLIHTLQQVPAWSLPAPASPGRSGLCCPARRGCAFSASAPACLCLRWPQRWSRRRWHQCLPWLIACCHDDFVLDGHQALDLAGKALCRLGNLEYXEVLXLPLEGDEXVTVKEVHIAVLHLGDGDGLDMPGKFS

SEQ ID NO: 4521 - protein, 97 aa, Homo sapiens
SCRCDQCCIQEMREDGQTPGSRKMDSVAFEDVAVNFTQEEWALLDPWQKKLYRDVMLETYRNLASVGDDDNIPSLREQVAHQRYFKTWHVEREYFSK

SEQ ID NO: 4522 - protein, 97 aa, Homo sapiens
  SITE (97): Xaa equals any of the naturally occurring L-amino acids
LPNPILHTEISSGSATPFAVILSQALTQLQYSNTLPLAPWQSTRASDVGNRKEGIDIRIMLHDGERVQDKYQCRTGLGEWLVIGMNGKSNNLKTGAX

SEQ ID NO: 4523 - protein, 50 aa, Homo sapiens
ASNKQMRAGKVNDDSLCPLHDTTLPPWNHSAPMDLSSFKSGEIYQSHNFS

SEQ ID NO: 4524 - protein, 106 aa, Homo sapiens
LFDFVLISLVLNLYFLKVNPSVLDEPFNLFSRKFGLLSQLSLQCFHLDRPKRGEESSPTSTYFIPLGKVSLSPEKLKNKHKQKHLNPNPLVHFKTRSCSVPQAGGR

SEQ ID NO: 4525 - protein, 254 aa, Homo sapiens
  SITE (112): Xaa equals any of the naturally occurring L-amino acids
YTKAEKFKSFQHSRLYQQFNENNSIGETQARKLSKLRVHEFIFHTRKFITRIYPKATRADSSNFNPQEFWNIGCQMVALNFQTPGLPMDLQNGKFLDNGGSGYILKPHFLRXSKSYFNPSNIKEGMPITLTIRLISGIQLPLTHSSSNKGDSLVIIEVFGVPNDQMKQQTRVIKKNAFSPRWNETFTFIIHVPELALIRFVVEGQGLIAGNEFLGQYTLPLLCMNKGYRRIPLFSRMGESLEPASLFVYVWYVR

SEQ ID NO: 4526 - protein, 78 aa, Homo sapiens
  SITE (20): Xaa equals any of the naturally occurring L-amino acids
ILKHFREHLDKLFAKGIGMXDIALNEAFNILSDFNHTGQGSICSQAIMLITDGAVDTYDTIFAKYNWPDRKVHPCCKW

SEQ ID NO: 4527 - protein, 106 aa, Homo sapiens
  SITE (52): Xaa equals any of the naturally occurring L-amino acids
  SITE (55): Xaa equals any of the naturally occurring L-amino acids
  SITE (82): Xaa equals any of the naturally occurring L-amino acids
EILSEVTRPMSVHMPAMKICEKLKKLDSQICELKYEKTLDLASVDLRKMRVXELXQILHSWGEECRACAEKTDYVNLIQELXPKVCSDTPQNRALISNASTFVTCN

SEQ ID NO: 4528 - protein, 93 aa, Homo sapiens
SPAPFGPAGHWSSLQSPWAFLWSRMSMLWPAATDKLSSHSWLPVGLLGCFHSSTPVVSSVFRHPSNQPLLPHPAGINTDLLSKETKCHSVILA

SEQ ID NO: 4529 - protein, 63 aa, Homo sapiens
KLLSEELPCWAIHHLDSYDSGNRTLHLPEALVSSWVHHQLRKKPHDDCCLMDASHCRNHVEGI

SEQ ID NO: 4530 - protein, 86 aa, Homo sapiens
  SITE (40): Xaa equals any of the naturally occurring L-amino acids
EKFYSSSESSTITFCALGNSIKEVSSKCCSRYWVISKVTXISQFLSIDATTIRRLPKESEGLKGELVEPLPKGIGLISTEESTSWQ

SEQ ID NO: 4531 - protein, 109 aa, Homo sapiens
GVVEVSAPLPVQTGGLAALERGFPAEMLERMRNSRDRLLNRYRQLEEWAREFSEQLSSSRGDGRRVECFAVSGELSRRLGSAGGADRHGCAGGNSTGADQPRAVHHQRV

SEQ ID NO: 4532 - protein, 44 aa, Homo sapiens
TSDTHHTLNIYTTERKIKEVFQRTLFRVRSVLHEFLRSKMLIHS

SEQ ID NO: 4533 - protein, 147 aa, Homo sapiens
MGGWRAKQVHPPYRNNICWGNEGWHVSRRGNPVLPQRNQYDAIWENGLAIKGTYTFSDGLHYDEKNWHYCDGYDRRFYTEILNGLKPAGMAQLTNMDPPRKIPKGYYDCGDGFYNPVTRVVKDYRNRFLRNADDDEHEWITRTCRKG

SEQ ID NO: 4534 - protein, 130 aa, Homo sapiens
  SITE (8): Xaa equals any of the naturally occurring L-amino acids
RYREYHHXTPPCLRKEEKRTWKGLASLVRWNILLWVINMCHNLIMWLRKLLWNNRWSSPIFQRTVKTSRKIQGTWKEFIHKPGKERNWIWKANEEHHRLLKGAPFKLNLHPRDYFDANPYFSEESLPPIK

SEQ ID NO: 4535 - protein, 58 aa, Homo sapiens
PSPQLQFFFWALSALMQRQKLKQLVMRGQVVYFCIPSMYKRHPFDSQESQIGQPLQRF

SEQ ID NO: 4536 - protein, 106 aa, Homo sapiens
ILSVCLLTRLSTVSLKARAWLLREAWWWPGHRRTEVLVPGLCSRHGSTAQMQREESRHISPLHPAHGPGPSQDADSHNPCRTAVKVNRHQTCAVLRTEAGRWSTCH

SEQ ID NO: 4537 - protein, 49 aa, Homo sapiens
  SITE (42): Xaa equals any of the naturally occurring L-amino acids
RKKYLFLNEPCISKAQFWLITHDLLSTSFVSSISVQRCKVSXLFYQGGL

SEQ ID NO: 4538 - protein, 121 aa, Homo sapiens
MNPISGNLNCDPIAMSQCSSDHGCETDLDSDDDKIEKPNNFMKDSASQDNGLSRKISRKRVCSSDSDSSLQVVKKSSKARTGLLRITRRCAATAANKIKLMSDVEDVSLENVHTRSKNGRK

SEQ ID NO: 4539 - protein, 106 aa, Homo sapiens
  SITE (46): Xaa equals any of the naturally occurring L-amino acids
FIDIGHYVRDISAYEELVSKLNLLVEDELKQIAENIESINQNKAPXKYIGNYAILDHLGSGAFGCVYKVRKHSGQNLLAMKEVNLHNPAFGKDKKDRDSSVREYCF

SEQ ID NO: 4540 - protein, 170 aa, Homo sapiens
ADNNFTQETAMTMITPSSKLTLTKGNKSWSSTAVAAALELVDPPGCRNSARGNNVMLMPTGIIKLIDFGCARRLAWAGLNGTHSDMLKSMHGTPYWMAPEVINESGYGRKSDIWSIGCTVFEMATGKPPLASMDRMAAMFYIGAHRGLMPPLPDHFSENAADFVRMCLTR

SEQ ID NO: 4541 - protein, 59 aa, Homo sapiens
FAENHTSRCKARMRAVTTTLDKSVVAHICTLQSTKPDAKNRKGGDVHAFSLTAKKTQLV

SEQ ID NO: 4542 - protein, 95 aa, Homo sapiens
VKALTPVIWLMWTQSGFSCMCSCFCHLVSFPAHYSCLCGCWEVGKGASLLDKTLCLLKTLADFEEAAVVMADPYVCGFLELLQMHQNLRELTLLE

SEQ ID NO: 4543 - protein, 29 aa, Homo sapiens
HLPIRTYLVCSCNFLSRNCFILNIVANYI

SEQ ID NO: 4544 - protein, 107 aa, Homo sapiens
SSIMTFLESSAVPPHWTGQDGRVCWTGWIPQCQAGSAPEVLECLSTQQVKSLQTLGGAAVSHKTNSCLPLVQPCHWRLSQGKELGVDDGKHRLTTPMTVPQRAVQQL

SEQ ID NO: 4545 - protein, 97 aa, Homo sapiens
  SITE (38): Xaa equals any of the naturally occurring L-amino acids
QLAFQLEVCDSQKNTIEVKLFSPRGATDSPQHVVMWTXSLWTSDLHLLQCVGLSRASIPPVRTLTHIPAFDNFELNQEKLGNLDIVVYKSLILSIKV

SEQ ID NO: 4546 - protein, 59 aa, Homo sapiens
RRTPARLPLGSISKMLSAPHTPMIREIFKICWMEESMPFCISSHVREQFYPAPPTRSPM

SEQ ID NO: 4547 - protein, 83 aa, Homo sapiens
  SITE (16): Xaa equals any of the naturally occurring L-amino acids
  SITE (83): Xaa equals any of the naturally occurring L-amino acids
AKHLKLNLMLSYNSFXNFNCLGVHSHFSKLISWNCTRESRWLVCLFHSCMPSTWHGVWYRVGSPTTCRMSEWHAGLAVGLAQX

SEQ ID NO: 4548 - protein, 203 aa, Homo sapiens
ALAADGALPVHHPRDHALPQAAPACAHPDPSGQHPHQAGDGGRLRLLRAAKGADPGTQRIRGVHGRHRPGRGTESEPKGESFDSGVSSSIGTEPDSVEQQFGPGAARDSQAEPTQPEQAAEAPAEGGPQTNQLETGASSPERSNEVEMDSTVITVSNSSDKSVLQQPSVNTSIGQPLPSTQLYLRQTETLTSNLRMPLTLTSN

SEQ ID NO: 4549 - protein, 65 aa, Homo sapiens
ETDEEMALKEILGYTEKSRSSEDTSQIKSHPITLHQTCGMVSVAASGKTKRNFTKTFCASEKEEV

SEQ ID NO: 4550 - protein, 89 aa, Homo sapiens
MMSYEVKEGMTQQQCASSIVTSPPSWRRICSNGSRTNCVYLQDEETKATSRIHPAVLPGRSPLFYNQTQQKQALASGTSNMKRLLFCRK

SEQ ID NO: 4551 - protein, 89 aa, Homo sapiens
GLEIDSLASLFWVAKPVEYSPTCCMKAAWRDCGGLSAKMAKILSSLQAHTRCQNQSKLSSLSLLIFCPREELKLSSSPYRKPEFCKCSA

SEQ ID NO: 4552 - protein, 205 aa, Homo sapiens
  SITE (17): Xaa equals any of the naturally occurring L-amino acids
HYEGREKLFANIAEVTXTISDTKEAAALLDDCIFNMVLLKVPSSLSAEELEAIKLIRFGKKKNTHSLFVFIIPENFKGCISGHGLDIALTEPLTMEKMSNVVKYWTTCPSNTVKTENATGPEELGLPLQRSYSEHLGYFPTDLFACSESLRNGNGLELNASLSEFEKNKKISLLHSSKEKLRRERIKYCCEQLRTLLPYVKGRKE

SEQ ID NO: 4553 - protein, 73 aa, Homo sapiens
  SITE (49): Xaa equals any of the naturally occurring L-amino acids
  SITE (50): Xaa equals any of the naturally occurring L-amino acids
VTSLALSADGIPFFRSANGVILTPGNTDGFLLPKYFKEALQVPPTRENXXPSPYSLFLKAVPFCPHLSPSFQP

SEQ ID NO: 4554 - protein, 103 aa, Homo sapiens
  SITE (60): Xaa equals any of the naturally occurring L-amino acids
  SITE (70): Xaa equals any of the naturally occurring L-amino acids
  SITE (80): Xaa equals any of the naturally occurring L-amino acids
HSALEVKVENISKATMTFPLVLCYTVWKVIQTVHNISMLNIKNLASLKVSGRLLARKAKXKLPSGQKGQXSRTRSGKAKXYLIIEKSWMALFDPMPNSRELLG

SEQ ID NO: 4555 - protein, 108 aa, Homo sapiens
  SITE (78): Xaa equals any of the naturally occurring L-amino acids
  SITE (93): Xaa equals any of the naturally occurring L-amino acids
  SITE (100): Xaa equals any of the naturally occurring L-amino acids
  SITE (105): Xaa equals any of the naturally occurring L-amino acids
VVTQAQRHTENLQGRLQSAFPDAAAGSHPSLHLAPETLYSVVCSLMALLDFFFSSGPQLKQLYLSPQHLSHYLAHRYXIRVYWNKGGKLISLXTWFHYPXQFLCXKWA

SEQ ID NO: 4556 - protein, 50 aa, Homo sapiens
ETGYPLQRVNIQLEFPFTPQLENSRNEFLSGMLWEFTEAPGSSFVLSGRC

SEQ ID NO: 4557 - protein, 40 aa, Homo sapiens
  SITE (28): Xaa equals any of the naturally occurring L-amino acids
  SITE (32): Xaa equals any of the naturally occurring L-amino acids
  SITE (35): Xaa equals any of the naturally occurring L-amino acids
WFVRSTPRKASKKNGCALGEGKDQISSXSNLXPAXFFIPY

SEQ ID NO: 4558 - protein, 93 aa, Homo sapiens
  SITE (4): Xaa equals any of the naturally occurring L-amino acids
  SITE (76): Xaa equals any of the naturally occurring L-amino acids
TKEXASEGEPLFAGGSAIPKEENLSEDSKSSSLNSGNYLNPACRNPMYIHTSVSQDFSRSVPGTTSSPLVGDISPXSSPHEVKFQMQRKSEGN

SEQ ID NO: 4559 - protein, 93 aa, Homo sapiens
  SITE (7): Xaa equals any of the naturally occurring L-amino acids
  SITE (16): Xaa equals any of the naturally occurring L-amino acids
AVCTMSXMAELSELYXESSDLQMDVMPGEGDLPQMEVGSGTGSYPCVPPAAGPNSSRRKLLEEGPNFPLSFGFIPNSFVPLKNLTFKKICFSE

SEQ ID NO: 4560 - protein, 74 aa, Homo sapiens
  SITE (33): Xaa equals any of the naturally occurring L-amino acids
  SITE (34): Xaa equals any of the naturally occurring L-amino acids
  SITE (35): Xaa equals any of the naturally occurring L-amino acids
  SITE (37): Xaa equals any of the naturally occurring L-amino acids
QLEPLAFNVKQVQAKSGSAKVNIKAPKVSPCRXXXRXRLGGYRKTERCLTCFQLLQPPHCPISRHVKLQLDDRH

SEQ ID NO: 4561 - protein, 62 aa, Homo sapiens
TQNGYNEATFIPHGKWQCLAVMTSKSVVSHMCNYCQANDSCRSVDHRDPHGSLLTHGATEPL

SEQ ID NO: 4562 - protein, 83 aa, Homo sapiens
HELVLTLRQSPLLLKQPYLQPIKEMRIAAVSTCRREKNVEMGKSTLPAVSRCCPQLLEWLAAHMNAVLLTLTLGTHICMTSLI

SEQ ID NO: 4563 - protein, 99 aa, Homo sapiens
HEPVPMGHLGLSVALGPGHAFPLPQPGMGWPRPRFPRMFKCSRRRYQQGLRGRTASSAAINPATRAMGINNTHTDTTIVWIFPPQVLRHLRQPGIFLIL

SEQ ID NO: 4564 - protein, 80 aa, Homo sapiens
GGRNSGENELQIEQENEKQLKDQLQEIRQKITECENKLKDYLAQIRTMESGLEAEKLQREVQEAQVNEEEVKGKIGKVKG

SEQ ID NO: 4565 - protein, 109 aa, Homo sapiens
  SITE (5): Xaa equals any of the naturally occurring L-amino acids
  SITE (6): Xaa equals any of the naturally occurring L-amino acids
  SITE (9): Xaa equals any of the naturally occurring L-amino acids
GQEAXXPTXNFREPVELKNKTLLEKADLDPSLDFMDSLEHDIPKGSWSIQMERAMPWWSAQPALAGPHLLPCSPHQELWLRLRGHWREEHGLALHAIEWEPAWMFLNRV

SEQ ID NO: 4566 - protein, 67 aa, Homo sapiens
ITQSKIFCYCSRNRLYFLDGENKSSPFPLSVPPAPAAGVAGTYSLHAEVGEALLRSPLNCSAQAWLS

SEQ ID NO: 4567 - protein, 36 aa, Homo sapiens
  SITE (35): Xaa equals any of the naturally occurring L-amino acids
QENRTLSKLSLQSKMMPAPGSWGLSSSLLYSRLLXQ

SEQ ID NO: 4568 - protein, 86 aa, Homo sapiens
  SITE (78): Xaa equals any of the naturally occurring L-amino acids
  SITE (81): Xaa equals any of the naturally occurring L-amino acids
  SITE (84): Xaa equals any of the naturally occurring L-amino acids
  SITE (85): Xaa equals any of the naturally occurring L-amino acids
HGCQDANWDTKALAVGAAQQGWPLEIRDANSSSIIAKEDQQRPTEAMSRIQLQQQAVDLLQRLKPTLLPSDPPLTSLXCCXPNXXH

SEQ ID NO: 4569 - protein, 82 aa, Homo sapiens
  SITE (25): Xaa equals any of the naturally occurring L-amino acids
  SITE (26): Xaa equals any of the naturally occurring L-amino acids
EGVQETQVQMQQRQKCGCRAQARTXXVRQQPGRKLSFVELSGTSSCKHSHRKPQRRKGRLNSSPLQFPLDPWDPLSVAENQR

SEQ ID NO: 4570 - protein, 67 aa, Homo sapiens
  SITE (20): Xaa equals any of the naturally occurring L-amino acids
APDMNRKKLQKLTDTLTKNXKHFNKFEVNCLIKLFYELGGRSREARSGCWDWIVMHFGNILHVDIWE

SEQ ID NO: 4571 - protein, 75 aa, Homo sapiens
ELPNPGQQGKPLPSDRTSAVPGNCGPWASPKVCWGPCSVSPPLDFPLQGLLPSRSFCIKYSRLLIRAHSVVCVIV

SEQ ID NO: 4572 - protein, 56 aa, Homo sapiens
LKIEENAMDFITHGGREKRRVGLQTKLRNRKLNFSLYRKCISWGGPVYPHSLIINR

SEQ ID NO: 4573 - protein, 101 aa, Homo sapiens
  SITE (30): Xaa equals any of the naturally occurring L-amino acids
  SITE (57): Xaa equals any of the naturally occurring L-amino acids
VGRIFICQQGRCHKASPSYGAGHTPAQDTXALRRPSSSRTPARPRTSPCVLSDRGKXPDPQAGNFVLVFPFNEATLGASRNGLNVKRIIQELQKLMNKQHS

SEQ ID NO: 4574 - protein, 73 aa, Homo sapiens
  SITE (60): Xaa equals any of the naturally occurring L-amino acids
  SITE (61): Xaa equals any of the naturally occurring L-amino acids
  SITE (64): Xaa equals any of the naturally occurring L-amino acids
  SITE (68): Xaa equals any of the naturally occurring L-amino acids
  SITE (70): Xaa equals any of the naturally occurring L-amino acids
YGVHQQLFATFVVVNMEQNLLAFMSPQCLKKWHNENNLLPKELRRPVPKKPESGPLLTNXXNSXEMPXQXIIF

SEQ ID NO: 4575 - protein, 36 aa, Homo sapiens
  SITE (21): Xaa equals any of the naturally occurring L-amino acids
KFLKIILDTGCRMHSRSFRMXSNSSMSSSFSSRRVG

SEQ ID NO: 4576 - protein, 228 aa, Homo sapiens
KPNPWGRETCPRKPQLDSRIRPREQPRLLASASAGPQGTGTTVERPRRSSPPPSTKMEGAAGSPGAGLPPVGGLRPALGVLGAAVLCPQPGRCPAQASLPPATVSWSSMVDGDSMEAPSTARCIAGRTRCGRRGERSQGQTTTGARGGRAPQATSTRGLLFCSSSTPTSSADVMVLNHFQDSRKDGSDVAFVSPWRFLVGLQLRMLVIFPPKWMGDFSISRLSDTIAY

SEQ ID NO: 4577 - protein, 72 aa, Homo sapiens
AQPSWKKLGKTCHTAKVGFTRVTLVPPWPRVKKNKSKPCFYLSCLGGSRTSSAPYPQSVSSIKDERCSLDFV

SEQ ID NO: 4578 - protein, 157 aa, Homo sapiens
  SITE (73): Xaa equals any of the naturally occurring L-amino acids
  SITE (91): Xaa equals any of the naturally occurring L-amino acids
  SITE (93): Xaa equals any of the naturally occurring L-amino acids
  SITE (96): Xaa equals any of the naturally occurring L-amino acids
  SITE (97): Xaa equals any of the naturally occurring L-amino acids
  SITE (99): Xaa equals any of the naturally occurring L-amino acids
STMLTRIDNSFAEPSRSNGSMVRHSSSPYVVYPSDKPFLNSDLRRSPSKPTLAYPESNSRAIFSALKNLQDKXRRLELERIQAEESVKTLXRXTIXXKXVLDEQIQERENSKNEESEHNQELTSQLLAAENKCHLLEEQLEYLPNMNKACEIERASV

SEQ ID NO: 4579 - protein, 150 aa, Homo sapiens
  SITE (116): Xaa equals any of the naturally occurring L-amino acids
  SITE (138): Xaa equals any of the naturally occurring L-amino acids
  SITE (141): Xaa equals any of the naturally occurring L-amino acids
QRYFRAQVLYVSGNSAEVFFVDYGNKSHVDLHLLMEIPCQFLELPFQALEFKICKMRPSAKSLVCGKHWSDGASQWFASLVSGCTLLVKVFSVVHSVLHVDVYQYSGVQDAINIRXRPHPAGLCRAHGGVLRVPSKAXEVXQGASFSKFS

SEQ ID NO: 4580 - protein, 62 aa, Homo sapiens
ILEMMLVNRMCQDLFDTDNVIVCQYDKIHRSKNKWKFYLKDGVMCFGGRDYVFAKAIGDAEW

SEQ ID NO: 4581 - protein, 84 aa, Homo sapiens
  SITE (7): Xaa equals any of the naturally occurring L-amino acids
LHSSIRXIGRPPLLLWLGTRLKMIFSSKPLPWLSRSLSVNSSVWCRGKTFSSTINEINTLVGSASSKKAKKPVGGNAPLYYRGK

SEQ ID NO: 4582 - protein, 73 aa, Homo sapiens
  SITE (25): Xaa equals any of the naturally occurring L-amino acids
  SITE (72): Xaa equals any of the naturally occurring L-amino acids
  SITE (73): Xaa equals any of the naturally occurring L-amino acids
CPVAGGKEGPAGQGGLRAQGAEAGXARGHRPGPAGGAAQVHPPFPGQEKHTGAGGEIKRAPGAQAEKKKKKXX

SEQ ID NO: 4583 - protein, 32 aa, Homo sapiens
  SITE (1): Xaa equals any of the naturally occurring L-amino acids
XKKIFPGHSWRSDVFMRIVDPISNRTEVNCMN

SEQ ID NO: 4584 - protein, 193 aa, Homo sapiens
  SITE (3): Xaa equals any of the naturally occurring L-amino acids
  SITE (183): Xaa equals any of the naturally occurring L-amino acids
AEXSVWKIDRLPDKNSSLDHPHCLSYKLELGSDQEIPSDWYPFATVQFSVPDTCASRTEVRSLGVESDVQPQKHVQQRACYNIQPKLYRSVIEDVIEGVRNLFAEEGIEEQVLKDLKQLWETKVLQSKATEDFFRNSIQSPLFTLQLPHSLHQTLQSSTASLVIPAGRNSSQVLPRRNWAFQXPWQISFSRLS

SEQ ID NO: 4585 - protein, 117 aa, Homo sapiens
NRFTQMFADYEAFVIQTAQDMESWLTNREQMQNFDKASFLSDQPEPYLPFLSRFIETQMFATFIDNKIMSQWEEKDPLLRVFDTRIDKIRLYNVRAPTLRTSIYQKCSTLKRSSPIN

SEQ ID NO: 4586 - protein, 92 aa, Homo sapiens
TLQGATAGARDQPAVSHPSITGDILYSPFSRSETYKIYSTRGRFQGLKNAKVCTLRAPWNVDNSGSKTKFCVNELQNSRGSQCHFIIDNNTE

SEQ ID NO: 4587 - protein, 105 aa, Homo sapiens
  SITE (29): Xaa equals any of the naturally occurring L-amino acids
  SITE (99): Xaa equals any of the naturally occurring L-amino acids
  SITE (101): Xaa equals any of the naturally occurring L-amino acids
  SITE (104): Xaa equals any of the naturally occurring L-amino acids
LQIPHTRPTTTQMHTGAHTYTHTGTYFPXLVLYSTVKSLLRILKILTVKSALENLKWIIIKGYCFQGVASNRKNWGFGISMILWVYNRERPLYDRGSHXSXKNXG

SEQ ID NO: 4588 - protein, 85 aa, Homo sapiens
  SITE (81): Xaa equals any of the naturally occurring L-amino acids
IRHEQGAGGVGRPRCCATPRWSCWVRGERESAFDRSRGQALGVEAVLRWCPSRTLTLASVAPFPLLEPVFLSAKWDIDACXCKVL

SEQ ID NO: 4589 - protein, 38 aa, Homo sapiens
KFHYITQPGLDSWAQVNPPALASQSVWDYRHEPLRSSL

SEQ ID NO: 4590 - protein, 43 aa, Homo sapiens
NGLISRSQHNHATFETTSRSVQSFGFPGTTLEEELFWATYKIH

SEQ ID NO: 4591 - protein, 93 aa, Homo sapiens
IRHRLWVQGDIFRSKLKNRPSSEGSINKILSGLDDMSIGGNLSKTQNMERFGEDNLEDDDVEMKNGITQGDKLRALKSQRQPRTSPSCAFRSR

SEQ ID NO: 4592 - protein, 76 aa, Homo sapiens
GPLNSPVAFEAQLVAWLWKWLHVEDSTCAGAFNSRPAAGPRGTSYTRHQLKACVHSFCLRHGLSDQSGNHPPFQLR

SEQ ID NO: 4593 - protein, 56 aa, Homo sapiens
APSFTLCQWHKALLLIQFSTHTQDKSKQHCPSTTQLSSSTHICSDSFPPGVSSQQY

SEQ ID NO: 4594 - protein, 73 aa, Homo sapiens
  SITE (11): Xaa equals any of the naturally occurring L-amino acids
  SITE (36): Xaa equals any of the naturally occurring L-amino acids
PCQTGIDECSXAAVKTARDWAAYNRNAWSPRSPHSXCPKAWLLEALEESLFPVSQLLPVASKCCRYIHSSHWL

SEQ ID NO: 4595 - protein, 46 aa, Homo sapiens
AFISKGKMAVSNRKSPVRRGTLLCSILYLQHLKWYLGYNRCLIINC

SEQ ID NO: 4596 - protein, 46 aa, Homo sapiens
  SITE (1): Xaa equals any of the naturally occurring L-amino acids
  SITE (39): Xaa equals any of the naturally occurring L-amino acids
  SITE (43): Xaa equals any of the naturally occurring L-amino acids
XVIKRPQKSRLIPSTEETNEVLFFFSLRQGLVTLPSLVXELLXAQG

SEQ ID NO: 4597 - protein, 77 aa, Homo sapiens
  SITE (6): Xaa equals any of the naturally occurring L-amino acids
  SITE (43): Xaa equals any of the naturally occurring L-amino acids
QASSAXEQKMRLKLSQYDRAAIKCSTVKAESPPTVEKVNQPGXNSETDLEIEDDENFSPLDKRSCTWRACKLMGVSA

SEQ ID NO: 4598 - protein, 68 aa, Homo sapiens
  SITE (40): Xaa equals any of the naturally occurring L-amino acids
  SITE (47): Xaa equals any of the naturally occurring L-amino acids
SFSALRQAVGSFASTLRPAPFPWGHPPLPKALKTSGGVRXCWQKGLXQQPQTYSPKYPCTQPWGHEPS

SEQ ID NO: 4599 - protein, 142 aa, Homo sapiens
IRQLGRLLPQVLSSTASLAGPARVCLASACPCVCASRRLSRVPCEAATPRRQSCVSRPVGLGGRKASRGCCTLGVPGCSKRAPRWDAGVTRESFLAELQDRDRQTREQQLRGSATGAAPLPWAPHLVSFRRASRHGQRRQWR

SEQ ID NO: 4600 - protein, 71 aa, Homo sapiens
  SITE (48): Xaa equals any of the naturally occurring L-amino acids
  SITE (59): Xaa equals any of the naturally occurring L-amino acids
SSVRLLEWLVPSCHLEGKAHPRMTPTQREVNIAKRSAEVVPGAIIQHXATDQVKLAGHXVTGTGVIHRSHT

SEQ ID NO: 4601 - protein, 79 aa, Homo sapiens
IPHQMCSHPPCWLLPHSTVTFQSSWAVSVALLLYWMTTCCEIIPGISDYSPRTPKKFLGKSDSHVTFFKLELDLFSAQW

SEQ ID NO: 4602 - protein, 84 aa, Homo sapiens
  SITE (40): Xaa equals any of the naturally occurring L-amino acids
NNLSLKYSQTGYLSSSNIINDGFYDYGRINPGTKLLPLKXLCLQEPSDLRAVLLINSKSYVSPPSSMEDKSDVGYGRRFLLHLP

SEQ ID NO: 4603 - protein, 121 aa, Homo sapiens
  SITE (37): Xaa equals any of the naturally occurring L-amino acids
  SITE (87): Xaa equals any of the naturally occurring L-amino acids
  SITE (105): Xaa equals any of the naturally occurring L-amino acids
  SITE (115): Xaa equals any of the naturally occurring L-amino acids
NAFNVFTFVFHLAECNIHTSPSPGIQVRHVYTPSTTXHFSPIKQSTTLTNKHRGNEVSTTPLLANSLSVHQLAAQGEMLYLATRIEXENVIQSHGWKKGLLPLDXGAAAHGEMAXVGFLLQ

SEQ ID NO: 4604 - protein, 152 aa, Homo sapiens
  SITE (92): Xaa equals any of the naturally occurring L-amino acids
RECLCVSEVEMACPTAKEVTGRLGAALLNCVQFCYTVHCPLLGVCMYEHTCLSERFLGVCPLALISPIPVPTLPEFFYPRSCQPHWESVCSXGLSCLCRGDLELCTCHYWGGVPALASTMRRPLYLSSQSLLFLKHYYLFFRCLPAAVLLST

SEQ ID NO: 4605 - protein, 46 aa, Homo sapiens
APFPFWVSSSMTLRLEQQHQLLSGSPALLIFRLGMATPACCPTSAS

SEQ ID NO: 4606 - protein, 49 aa, Homo sapiens
  SITE (2): Xaa equals any of the naturally occurring L-amino acids
  SITE (20): Xaa equals any of the naturally occurring L-amino acids
  SITE (45): Xaa equals any of the naturally occurring L-amino acids
YXSTQKIEFLSDSACGYIYXYIHIYIYTHTYVCMYVLLFSLLKPXTVDP

SEQ ID NO: 4607 - protein, 47 aa, Homo sapiens
  SITE (33): Xaa equals any of the naturally occurring L-amino acids
FGRARFVRKKVAMKTGNALSIQYIPFSQGFPIXSYLNYVTWADALLE

SEQ ID NO: 4608 - protein, 98 aa, Homo sapiens
  SITE (42): Xaa equals any of the naturally occurring L-amino acids
ELHRLSFDLQGVPLRQTSYLHSTEEEMGLREEEQLGHGGALXTEGWDSDPVSLMVKSCLVTAVGQRRQRRGISNLGGRREWAPGSASPSMARKTGRWF

SEQ ID NO: 4609 - protein, 59 aa, Homo sapiens
  SITE (29): Xaa equals any of the naturally occurring L-amino acids
  SITE (31): Xaa equals any of the naturally occurring L-amino acids
  SITE (47): Xaa equals any of the naturally occurring L-amino acids
  SITE (57): Xaa equals any of the naturally occurring L-amino acids
HLQLFPVRNIFSIRNTVYDERLLFGGGNXEXLTNQVTLLKDIEGVKXIAPSSYHLVXIF

SEQ ID NO: 4610 - protein, 46 aa, Homo sapiens
RRGVAVLPRQVLNSWLLASSDLPASASQSAGITVSHCTGNVFNRDP

SEQ ID NO: 4611 - protein, 103 aa, Homo sapiens
  SITE (60): Xaa equals any of the naturally occurring L-amino acids
FGTRKRPLWTMDVNKFEASVGFLDVKKFLSTWKLQNPRTHFVLSPHCFMGGIMAPKDIMXNTHAKSILNSMNSLRKSNTLCDVTLRVEQKDFPAHRIVLAACK

SEQ ID NO: 4612 - protein, 56 aa, Homo sapiens
FGTRRERERERGIHDFFLSYRSGIMFEIFIALHLPELEFLTWNLRVSRILKSLGRN

SEQ ID NO: 4613 - protein, 112 aa, Homo sapiens
PNACLDQSSEELTIAGMTFTTFDLGGHVQARRVWKNYLPAINGIVFLVDCADHERLLESKEELDSLMTDETIANVPILILGNKIDRPEAISEERLREMFGLYGQTTGRGVYL

SEQ ID NO: 4614 - protein, 83 aa, Homo sapiens
  SITE (19): Xaa equals any of the naturally occurring L-amino acids
  SITE (74): Xaa equals any of the naturally occurring L-amino acids
  SITE (75): Xaa equals any of the naturally occurring L-amino acids
  SITE (77): Xaa equals any of the naturally occurring L-amino acids
NSARGGEGPRTEADRHGSXCRFRSRMPPTQAESVIRSIIREIGQECAAHGEIVSETLIAFMVKAVVLDPSNGFXXDXTLMKSD

SEQ ID NO: 4615 - protein, 102 aa, Homo sapiens
  SITE (84): Xaa equals any of the naturally occurring L-amino acids
  SITE (92): Xaa equals any of the naturally occurring L-amino acids
  SITE (102): Xaa equals any of the naturally occurring L-amino acids
KCIFFKQLGLNCRSVLLSVVQPKWLQSGPVVEETLAVLGFRENGMLFSKMVPQGIFTLQAAVIAQWPHKSQDHSGVRDLGFGIXHIYPRVGXYPGNFWARGX

SEQ ID NO: 4616 - protein, 120 aa, Homo sapiens
  SITE (113): Xaa equals any of the naturally occurring L-amino acids
IRHERHEQKSLLHLGAQLWFFSSVLALVSYRSGTKKLTCSLVLCQGRTYDPTVLLCSQKNRSIPFLPYAQNLARGPSLAITQGKWTLPRRRSQSEQEVYKQFPFITYYQPFEXSDLAMSF

SEQ ID NO: 4617 - protein, 70 aa, Homo sapiens
LPKVTQAARNGAGIQQGGSGLPVFTTTLRSVPSLNAKIWLHSRIRKSNPTTISIESPSAAVGIHFQALQM

SEQ ID NO: 4618 - protein, 132 aa, Homo sapiens
  SITE (96): Xaa equals any of the naturally occurring L-amino acids
  SITE (104): Xaa equals any of the naturally occurring L-amino acids
NSARGSPRHARHSLEAKLTDSSDSELLRDILQKTVKHPVCVTHPPSVKYARCFLSELIKKHEAVHTEPLDELYEVLVETLMAKESTQGHWSYLLDXPRAWQWCXPHSPGHLQVCRPGHTFQRLSQRVSTVRG

SEQ ID NO: 4619 - protein, 58 aa, Homo sapiens
NSARVLLLHLELKRCLFTVEPLGDKEPSPEQRRRLLRNFYTLVTSTHFPPVPLHVMKE

SEQ ID NO: 4620 - protein, 92 aa, Homo sapiens
IRQSQPEEKKQVEYAVLRNITELRRIYSFYSSLGCGHSLDNTFLMTKLHFWRFLKDCKFHHHKLTLADMDRILSANNAIPVEESILHLHQYF

SEQ ID NO: 4621 - protein, 123 aa, Homo sapiens
  SITE (100): Xaa equals any of the naturally occurring L-amino acids
  SITE (106): Xaa equals any of the naturally occurring L-amino acids
  SITE (119): Xaa equals any of the naturally occurring L-amino acids
EKSTNKQIHSEFSISRLPRTRPRQLGSEQDSEVFPSDQGVKKNCKQIESAKLLPDTPVQFIPPNTLNLRSFTKIIKRLAELHPEVSRDHIINALQEVRIXHKGFLXALSITTYCGGAFXLPEN

SEQ ID NO: 4622 - protein, 101 aa, Homo sapiens
  SITE (97): Xaa equals any of the naturally occurring L-amino acids
GPPGPRWACSLEDRIAAMSSKDFFACGHSGHWARGCPRGGAGGRRGGGHGRGSQCGSTTLSYTCYCCGESGRNAKNCVLLGNICYNCGRSGHIAKGXKDPK

SEQ ID NO: 4623 - protein, 57 aa, Homo sapiens
YPLFNSNIYFILACSNFMSQALPITHKRDLFWLLNGMKRRKRRTEQNYKKRGCKRLL

SEQ ID NO: 4624 - protein, 123 aa, Homo sapiens
  SITE (62): Xaa equals any of the naturally occurring L-amino acids
  SITE (120): Xaa equals any of the naturally occurring L-amino acids
NSARANLLVPETWPHEVSASHAGRSKQPQGGILKINEEHRRGAIQDLLASPGFTFGKRVVFXSHCLKRQHTFADGLHSSCTSSKLAPSATVLPSTLLNHCAGVSEPPDVFLYHYTLFAIXGHK

SEQ ID NO: 4625 - protein, 129 aa, Homo sapiens
RRNQSQLLSSQKATVIEYMTISLLARSLFSSSRSCRRLFSLIICRLSEAASTTVRSSDVPSMVVSIFEMPYVYSGAEIGAWNLEILFLGAESDLCHRESFLTSCPFWRTAFSLIDRSLFSLPTARISSF

SEQ ID NO: 4626 - protein, 66 aa, Homo sapiens
GSQSSMAVSPGCSALLGPAAFLPELSTLPLQQQQVKPSSRFESLRLQLEECFLLLRAHGIRLGHPD

SEQ ID NO: 4627 - protein, 113 aa, Homo sapiens
  SITE (71): Xaa equals any of the naturally occurring L-amino acids
  SITE (78): Xaa equals any of the naturally occurring L-amino acids
  SITE (85): Xaa equals any of the naturally occurring L-amino acids
  SITE (87): Xaa equals any of the naturally occurring L-amino acids
  SITE (90): Xaa equals any of the naturally occurring L-amino acids
  SITE (96): Xaa equals any of the naturally occurring L-amino acids
  SITE (101): Xaa equals any of the naturally occurring L-amino acids
  SITE (108): Xaa equals any of the naturally occurring L-amino acids
ICLCHLLCVVELKTLITNFSVTSSSNSLLLSKAAVKSPKSQELSKIKDGHQCQLHFMKIESRYTVKNGILXLHNDKEXGDANQQXKXWGXNTLQNXKFSLXWGRQNQXGAEPG

SEQ ID NO: 4628 - protein, 57 aa, Homo sapiens
  SITE (28): Xaa equals any of the naturally occurring L-amino acids
WGFLMNQGIFLVHRDGLSLPSAFMGTMXTVKFDSCKMLLWANFIVSSTCQEFLQSVI

SEQ ID NO: 4629 - protein, 51 aa, Homo sapiens
IRQSRPQSCVTVPSQKMESCMHPVQVFDQAGKLKDQKAREIERLIQAVIEI

SEQ ID NO: 4630 - protein, 110 aa, Homo sapiens
  SITE (108): Xaa equals any of the naturally occurring L-amino acids
NSARAARGSKIPGLGQRPEGVRQATWPVTWRRTTRPRNKTSSPSSTGRTTPSDPCSISFDTSSSVPCAGGRGFPQRRWRRSRLMTQSTGCGPEIAPSFSRVPGTWRPXVI

SEQ ID NO: 4631 - protein, 37 aa, Homo sapiens
  SITE (7): Xaa equals any of the naturally occurring L-amino acids
  SITE (36): Xaa equals any of the naturally occurring L-amino acids
SITYRKXLFGPGIVAYTVIPALGRPRQVGPLGSGFXT

SEQ ID NO: 4632 - protein, 70 aa, Homo sapiens
  SITE (65): Xaa equals any of the naturally occurring L-amino acids
IRQRAVEGDKVSAAGVWGHSDKGVDRVARGRENSKKLADGGNSFPGAVGTNYHKLGASNNRNVYXHSSGG

SEQ ID NO: 4633 - protein, 66 aa, Homo sapiens
  SITE (35): Xaa equals any of the naturally occurring L-amino acids
  SITE (66): Xaa equals any of the naturally occurring L-amino acids
KTVNLAMEPIYEEYLANHGTIVKPYYWLSFSLDCXNCPYHIRTGEEARVSLTEFLSDFWVPLWDNX

SEQ ID NO: 4634 - protein, 39 aa, Homo sapiens
FGTRRFHHTAQNCTRFKTYELFLSGRLFYICILWLTIGN

SEQ ID NO: 4635 - protein, 83 aa, Homo sapiens
FGTRFFPVRGTLRLLGGLGLTPPRAPPGQPRVRRVARVLGGGRCWAPDRGVEAAQSRSQAPPAVETATESRPGLLHALDSACL

SEQ ID NO: 4636 - protein, 57 aa, Homo sapiens
FGTSSFSLHWVHLVHTCTPDIHVAGRVLCRVVLLTLLRETTKRSKTRGGSRPPRGTC

SEQ ID NO: 4637 - protein, 41 aa, Homo sapiens
FRKAGQQSRGFQGIGKFKHFLVDNWLSLSEDLGSTEKKCLG

SEQ ID NO: 4638 - protein, 43 aa, Homo sapiens
KSYLFSMIISVVFISLQVTHSDLPQESGSSAGGDNRTYLAGLL

SEQ ID NO: 4639 - protein, 121 aa, Homo sapiens
  SITE (48): Xaa equals any of the naturally occurring L-amino acids
  SITE (101): Xaa equals any of the naturally occurring L-amino acids
  SITE (106): Xaa equals any of the naturally occurring L-amino acids
RQSSAPAQDCALGSRWGPAGAASAGGTCRRAAGSAAMKVKIKCWNGVXTWLWVANDENCGICRMAFNGCCPDCKVPGDDCPLVWGQCSHCFHMHCILKWLXGQQVXQHCPMCRQNGSSRIR

SEQ ID NO: 4640 - protein, 50 aa, Homo sapiens
IRHEGHLSGLRWVGWAWGLPSDHRWVAWAWGHLSGHKWVGWAWEHLSALI

SEQ ID NO: 4641 - protein, 128 aa, Homo sapiens
  SITE (116): Xaa equals any of the naturally occurring L-amino acids
  SITE (119): Xaa equals any of the naturally occurring L-amino acids
FPQINSRWSRWPSEQRANKRSLKQELLEGDQDLVGQRWNPGLQESHLKETPSLRRVHLGTGACPWSGSFPLENTELANVGANQVTVRKGEKDHTTSLSRQRSCQPTVHSNSWLELXGQXTQKFFLGSS

SEQ ID NO: 4642 - protein, 44 aa, Homo sapiens
RLVLVLSCGFRDTNRGLEKASSAEEALMGTVCEIDVLRRPRYQE

SEQ ID NO: 4643 - protein, 62 aa, Homo sapiens
  SITE (45): Xaa equals any of the naturally occurring L-amino acids
  SITE (54): Xaa equals any of the naturally occurring L-amino acids
  SITE (62): Xaa equals any of the naturally occurring L-amino acids
FCGLGEVILICYFQRVILSLRDPRRVVGKMRWKFSYLDGFLKEVXNRHRMCPGXAFLPLEVX

SEQ ID NO: 4644 - protein, 88 aa, Homo sapiens
  SITE (77): Xaa equals any of the naturally occurring L-amino acids
HELVPLVSPHSLSSNARTAVPSPVEAAAASDPAAARNGLAEGTEQEEEEEDEQVRLLSSSLTADCSLRSPSGREVEXGGGSDDTICPI

SEQ ID NO: 4645 - protein, 51 aa, Homo sapiens
ILEVLIQSGLWFHTIESGSGKLNHMGNGSEEYEVTQQKAGILQRWMEPRLF

SEQ ID NO: 4646 - protein, 86 aa, Homo sapiens
  SITE (73): Xaa equals any of the naturally occurring L-amino acids
  SITE (86): Xaa equals any of the naturally occurring L-amino acids
KPGHFTPIQDSWCWPPKYFLINLLHEITISKCTFWRIQCLESSKSWLNTAICSGVHLDTSLGKRQVQLWINMXRLRAQHQEKPFHX

SEQ ID NO: 4647 - protein, 59 aa, Homo sapiens
VSVHLIDVGYHKALVAHQKLPVGSLCLQTDTSLFHGVISIRLYLNTSNAFGCLLVWVLN

SEQ ID NO: 4648 - protein, 108 aa, Homo sapiens
  SITE (16): Xaa equals any of the naturally occurring L-amino acids
VGRIYHEEGQEEKGLXFAPARIPAPVPLAPAAPLAGVVWGYAIAASSMSFCLGTGRWRQGEDSPTCSPSTENLQENPPVIVTRVLQALGTVAVALGALGAAYYITESL

SEQ ID NO: 4649 - protein, 87 aa, Homo sapiens
VKFRSTACRRKSVAPDTRNRVSTEIRARWGVHTKGLRPSLPTYLFSIINPALFLPGLPSTNDLGASLQFKGKMLYKIISLSNISAEE

SEQ ID NO: 4650 - protein, 104 aa, Homo sapiens
  SITE (9): Xaa equals any of the naturally occurring L-amino acids
HTKTKHSAXGKALVRFSVGLTPTLPRSTGLALGTASVCFDKGVMWPRPYLDFTLYPLGTDILENLSFTLVKATYPHLFHFLSVLCSNLLKYLLSNKYCQVEKKK

SEQ ID NO: 4651 - protein, 76 aa, Homo sapiens
  SITE (32): Xaa equals any of the naturally occurring L-amino acids
CLMKILTSDRGPHWNTPMNRNVILGKTLQALXLGNVIKKNQNIVSIAESVALEVTAEVLPVGGYGNPLVSCALKCE

SEQ ID NO: 4652 - protein, 89 aa, Homo sapiens
  SITE (6): Xaa equals any of the naturally occurring L-amino acids
LRQTAXCHWLIRSTWRWRHAPRLRAFLSEPIGEKDVCWVDGISHELAINLVTKGINKAYILLGQFLLMHKNEAEFQRWLICCFGCHLSG

SEQ ID NO: 4653 - protein, 82 aa, Homo sapiens
  SITE (1): Xaa equals any of the naturally occurring L-amino acids
XLLPTPRTNLPSMRVGRLESGRMWSVFQPVLAAEAGENNCVKRGLPQCRTGSHHVSTTSTCRSQASSCPEYHALAFYLDEIM

SEQ ID NO: 4654 - protein, 48 aa, Homo sapiens
KTSGSAESVANSPCWVQISSGKYRWWWYSCLTFSVYLTPSSSIIRSHL

SEQ ID NO: 4655 - protein, 132 aa, Homo sapiens
  SITE (42): Xaa equals any of the naturally occurring L-amino acids
AQVHKLREELINVNSQRKQQLVELCLLREEEKQRATREHEIXVNKLKAESEKMKIELKKTHAAETEMTLEKANSKLKQIEKEYTQKLAKSSQIIAELQTTISSLKEENSQQQLASKGGSRMLDKSLKMRRSS

SEQ ID NO: 4656 - protein, 73 aa, Homo sapiens
  SITE (69): Xaa equals any of the naturally occurring L-amino acids
TSELKPTASFRDPSRSLPSVGPSSSLDSPTQDKTQRFKVQPRRKTENRMGSQLSFLPHSPFLSVHDSSXKFQG

SEQ ID NO: 4657 - protein, 64 aa, Homo sapiens
  SITE (45): Xaa equals any of the naturally occurring L-amino acids
DLGVGCVHYNWCIYFSILQRPLVIENLKFQVFIGPSDLVLRRRKXLSPLVFPSTPLNKGLYWSC

SEQ ID NO: 4658 - protein, 41 aa, Homo sapiens
IAAPFEGSLNHDHTATKSPSSNSLPNPLPRTPSVSCKNPDC

SEQ ID NO: 4659 - protein, 52 aa, Homo sapiens
NKLFDSLLFCLQFFWVGSPATLYWFPYCLLSFVAFPFAGETPQVNFLYRSHG

SEQ ID NO: 4660 - protein, 106 aa, Homo sapiens
  SITE (40): Xaa equals any of the naturally occurring L-amino acids
  SITE (82): Xaa equals any of the naturally occurring L-amino acids
  SITE (84): Xaa equals any of the naturally occurring L-amino acids
  SITE (85): Xaa equals any of the naturally occurring L-amino acids
RDPAGHNAPLLGAQTLSPTERHCEPEGRPASASERVFGSXGKRLESLPKALYPGAKEETLASSSCWDCAGLSTQKTQGYLSXDXXMNSSLPFCSWKKAAAQRPRTA

SEQ ID NO: 4661 - protein, 81 aa, Homo sapiens
  SITE (66): Xaa equals any of the naturally occurring L-amino acids
EKLSAFSSWFQSFVTASLIREKRSFGKYSHFWKTEQPRFLSIGDWDKTKKRFITVHYFIYILKPTXMKKIMVSDDRPLLTV

SEQ ID NO: 4662 - protein, 44 aa, Homo sapiens
  SITE (23): Xaa equals any of the naturally occurring L-amino acids
KDIRCFQMSVKLSFRFRVQNQGXSHRMFPAFLGPLDLYWLVKSG

SEQ ID NO: 4663 - protein, 126 aa, Homo sapiens
  SITE (32): Xaa equals any of the naturally occurring L-amino acids
  SITE (40): Xaa equals any of the naturally occurring L-amino acids
  SITE (112): Xaa equals any of the naturally occurring L-amino acids
  SITE (125): Xaa equals any of the naturally occurring L-amino acids
ITSSPGDLGFAQAGLEIRAFPATPRACARRPXAWQARARXQAPSPTRAGGPWKEGSSSPVSPVDSLGTTKEELERQPKRFRPESGAYSKNSSEVGQPGPRASDGKKGSPSAXSFRGVAEPALLGXT

SEQ ID NO: 4664 - protein, 47 aa, Homo sapiens
FSNNFRCCNYNFIVNGQFVALQMVNYMINNMIIILVANIIIRNDGPH

SEQ ID NO: 4665 - protein, 130 aa, Homo sapiens
  SITE (98): Xaa equals any of the naturally occurring L-amino acids
  SITE (121): Xaa equals any of the naturally occurring L-amino acids
  SITE (122): Xaa equals any of the naturally occurring L-amino acids
  SITE (123): Xaa equals any of the naturally occurring L-amino acids
YLRCFTCFTKAIKNLQRRENNADTLTSQPSTPPTFSKICNGLCACPKASPPPVHEEPSFLRSEMLLHLPRRSYSLYIFFVAKCLSRETLYIIRIFKIXCLYIKEKPNWQKKKKKRGGRSKXXXGGPSLGG

SEQ ID NO: 4666 - protein, 73 aa, Homo sapiens
KEGNQKSSMSMNGLLYLSWLRDLTTELLRPTHCGQGSGLWAFLCVCHSCSVSLAPFTLRGLAPWRMACDFATR

SEQ ID NO: 4667 - protein, 54 aa, Homo sapiens
  SITE (44): Xaa equals any of the naturally occurring L-amino acids
TVVRQVSFTLLMMCCCHGNPAQYERNRSSDIWCMCLAEEPMGRXTICGIMTERL

SEQ ID NO: 4668 - protein, 75 aa, Homo sapiens
  SITE (37): Xaa equals any of the naturally occurring L-amino acids
  SITE (60): Xaa equals any of the naturally occurring L-amino acids
  SITE (62): Xaa equals any of the naturally occurring L-amino acids
  SITE (63): Xaa equals any of the naturally occurring L-amino acids
ILSLGWWKLIFEISGVTFLQSNVAETLDQVLRSFFHXRIFSPGCSFKEWHSGASRPRQSXQXXESSARQGWSSPK

SEQ ID NO: 4669 - protein, 119 aa, Homo sapiens
  SITE (45): Xaa equals any of the naturally occurring L-amino acids
  SITE (97): Xaa equals any of the naturally occurring L-amino acids
STLALNFIAVNQLHCVAFQLLILPFRLFRAQIKAKRRQCLVIISXIRPSLHVLHTPRQSAAHHSDDKIHALSGCIRSRGNSDAFADKPAQDQQPVYXAALVTGKTRSIQHVSSFTAELV

SEQ ID NO: 4670 - protein, 65 aa, Homo sapiens
NISMLPTSDKTLSIGLGINPRLKSRTSITSLQLQVLSLSRKTKVQMRHHSSQLLSHFHLVGKRFL

SEQ ID NO: 4671 - protein, 131 aa, Homo sapiens
  SITE (59): Xaa equals any of the naturally occurring L-amino acids
  SITE (124): Xaa equals any of the naturally occurring L-amino acids
  SITE (129): Xaa equals any of the naturally occurring L-amino acids
FCFTVPLQKFSTSPRAPVSLQELRKFSPFLVPVPRLCQLVHVEAPGKTVNLCTFKTAIXLLLKSHQSCEQNFFMVEIVPRETRLAIQTFHGDRFQTFHPVSHFPCSHGRVRFSLSVAALQIVHXYFPKXDT

SEQ ID NO: 4672 - protein, 95 aa, Homo sapiens
WPLPTKSFTFISGTPNWTNFLCWGVGNSALLNASKSLHCVFIESATLFLTIILLNSANMELRLCKQHTQAWEETWLTLGSRAQLLGAQAPICAGE

SEQ ID NO: 4673 - protein, 42 aa, Homo sapiens
  SITE (41): Xaa equals any of the naturally occurring L-amino acids
NLNFYFKNSREVCINDRNTECKEPGPVPYVIPVPRSTNKVXL

SEQ ID NO: 4674 - protein, 127 aa, Homo sapiens
CTDSSPDAGRKSPARNMPATTSRRSSGSSCNSTRRGTFSDQELDAQSLDDEDDNMHHAVYPAVNRFSPSPRNSPRPSPKQSPRNSPRSRSPARGIEYSRVSPQPMISRYSNLAFHFKAIPQIYRQAM

SEQ ID NO: 4675 - protein, 89 aa, Homo sapiens
YRSTLSLFKRNILIVLKSFFFFKDSLTPSPRLECSGVILAHCKSASWVQVILYLGLPSSWDYRHTPPHSANFLFLFTRDRVSPCWPGWS

SEQ ID NO: 4676 - protein, 43 aa, Homo sapiens
  SITE (43): Xaa equals any of the naturally occurring L-amino acids
TSLLYSFLDTLSVNSQSPVFLLVSSYSVLVGNKYHGELKTRLX

SEQ ID NO: 4677 - protein, 90 aa, Homo sapiens
  SITE (38): Xaa equals any of the naturally occurring L-amino acids
  SITE (88): Xaa equals any of the naturally occurring L-amino acids
RYRMEIRCPWDEHPTMEGTALGLRAVEAPFSGRGSRRXSSFLISWAALFSSDYVHLKVFPCLASYSKLSQLRKLLPHGTFFHIFPAVXYL

SEQ ID NO: 4678 - protein, 62 aa, Homo sapiens
CGVPQCCPRGFLLRNLSLHHSCSEIKPSPCNLLILFFEKYPLFESKYYRNSSLNIPFYFIPK

SEQ ID NO: 4679 - protein, 49 aa, Homo sapiens
  SITE (27): Xaa equals any of the naturally occurring L-amino acids
QLNTTHDSETGSFCLKGKLQGQLEKFXWGLQCRGNECVRVNFLIFMVAC

SEQ ID NO: 4680 - protein, 48 aa, Homo sapiens
  SITE (8): Xaa equals any of the naturally occurring L-amino acids
ELTHLLIXLTFLYRTFCGNYQTSLPENTKVSQAWWQVLVFPAAQEAEA

SEQ ID NO: 4681 - protein, 83 aa, Homo sapiens
PSQPQTPSPDISLCGLQEFSFRLSGTTGIPQTGVDSYSYEKCGSISGLNRRTGAEDKDPKLQVRPICKQSLSLAHLFPSSISH

SEQ ID NO: 4682 - protein, 67 aa, Homo sapiens
LLHCTPAWVTVRPCLKNKKEVGRGVTPVIPALWKAEAGGSPEVKSSRPASPTWWDPVTTKKKKKKLV

SEQ ID NO: 4683 - protein, 49 aa, Homo sapiens
KPYLKTPTLTLQWSLRNIVLMVVKGGLRNSRKNIPPTPYYSPSPVGQGL

SEQ ID NO: 4684 - protein, 59 aa, Homo sapiens
EVENLNKMLNAFAGSGTLLPKVGSLCYTVCVWGGGRCELFVSHISCLMGHNLSCSFPFK

SEQ ID NO: 4685 - protein, 88 aa, Homo sapiens
  SITE (69): Xaa equals any of the naturally occurring L-amino acids
  SITE (72): Xaa equals any of the naturally occurring L-amino acids
FSGFKGVEDSMENKRRMFYSPLFQCLPHAHGAVPKPIPQYLLMPKTRTPWNWGNFGSSTLSNEAVLMRXCAXHTWYRSWPGDSWGEKK

SEQ ID NO: 4686 - protein, 212 aa, Homo sapiens
  SITE (62): Xaa equals any of the naturally occurring L-amino acids
  SITE (197): Xaa equals any of the naturally occurring L-amino acids
  SITE (205): Xaa equals any of the naturally occurring L-amino acids
SSSDLDLLHKIVLKVGNLSPHLQNIFSKSPIFAGVVLPQVQHPKNARKKYPKLNGLLADIVXEIEKEKKPKEIKVRVIKVKGGRGDISEPKKKEYEGGLGQQDANENVHPMSPDTKLVTIEPPNPINPSTNCNGLKENPHCGGSVTMPPINLTNSNLMAANLSSNLFSPQCGGLTGKEAKKEDGTSSTILLGTSYGXIAGQEGSXFLFQSQF

SEQ ID NO: 4687 - protein, 46 aa, Homo sapiens
  SITE (8): Xaa equals any of the naturally occurring L-amino acids
TPELKQSXQVAGIQAQATMPGCFSFKDFVSLSMFNKRKRNLSNIFL

SEQ ID NO: 4688 - protein, 58 aa, Homo sapiens
IPMKIWQAFCILNIRGHEGKVQLEDILHHLEKEEINPLATTEEQLCLVLIPASTVKTG

SEQ ID NO: 4689 - protein, 53 aa, Homo sapiens
LRMRGLGYRNAIWAQMWEELGSEALEGRGRELEEEALVQGRQFRTCTESEKLK

SEQ ID NO: 4690 - protein, 87 aa, Homo sapiens
  SITE (57): Xaa equals any of the naturally occurring L-amino acids
KVCFELQQFMEIKLLLCREKRDVIYYRVYTHKCSAACCVPTEIQGVYLHLYLKKNDXIWLTLSQDDTGPKFFMEEWGSKGNRNIWKK

SEQ ID NO: 4691 - protein, 130 aa, Homo sapiens
  SITE (5): Xaa equals any of the naturally occurring L-amino acids
RPEGXLLICTAAAGPTQGVKGYGKPFEPRSVKNIHSTPAYPDATMHRQLLAPVEGRMAETLNQKLHVANVLEDDPGYLPHVYSEEGECGGAPSLSSLASLEQELQPDLLDSLGSKATPFEEIYSESGVPS

SEQ ID NO: 4692 - protein, 59 aa, Homo sapiens
SRTLSPYYTSASFWMIVEMFSVQNSLEGNVVHFPFGIYMMRDDSPIAGWHCELLGPPRS

SEQ ID NO: 4693 - protein, 47 aa, Homo sapiens
WDPCEHALKYHGYLQKLESGLLMVFKCFSLGSCPHTVVAGPMHFVSG

SEQ ID NO: 4694 - protein, 55 aa, Homo sapiens
  SITE (23): Xaa equals any of the naturally occurring L-amino acids
  SITE (35): Xaa equals any of the naturally occurring L-amino acids
NYKITSIILFSELCLDKSLRNTXSVYVYLDIFETXYVFDKFNNSFSHSSISLLSA

SEQ ID NO: 4695 - protein, 78 aa, Homo sapiens
ARGLICKAVSKDMKQRSRSLCSCAVLCPNQLLILGITINIEQPECVAVLQIYPIKRLSSVCFSMTYIFGVEKFEKNGQ

SEQ ID NO: 4696 - protein, 82 aa, Homo sapiens
  SITE (41): Xaa equals any of the naturally occurring L-amino acids
MHCKAGDESPDVLEELSQAIETSDLEKSQSSDSFSQDTSVXLMPVSVKLPVHPVENSVVEFDSHSDGSYCKLRSMNPTLMEL

SEQ ID NO: 4697 - protein, 99 aa, Homo sapiens
  SITE (25): Xaa equals any of the naturally occurring L-amino acids
  SITE (30): Xaa equals any of the naturally occurring L-amino acids
  SITE (66): Xaa equals any of the naturally occurring L-amino acids
  SITE (81): Xaa equals any of the naturally occurring L-amino acids
  SITE (99): Xaa equals any of the naturally occurring L-amino acids
IRHEQVYLITVLAMILAVFFAQIHXNYLTXQWQRLRSIIFCSVSGYGVIPTLHWVWLNGGIGAPIXQDFAPRVNCDVYDCXSCFPILHFQSPRAVLSRX

SEQ ID NO: 4698 - protein, 96 aa, Homo sapiens
  SITE (77): Xaa equals any of the naturally occurring L-amino acids
  SITE (95): Xaa equals any of the naturally occurring L-amino acids
IDQSVPMLNHFELDGFLILQGKQQDLLMSLVMNEPLLLEEEVNRSSGALCWPFSVETRVTVKDHANLLWQPSSWIWXRSLCLCWGPRQKGVPHAXG

SEQ ID NO: 4699 - protein, 38 aa, Homo sapiens
IRHRWRLGCLLVYLVMVLYFRKQVREVNGHEGRIYLVA

SEQ ID NO: 4700 - protein, 46 aa, Homo sapiens
  SITE (28): Xaa equals any of the naturally occurring L-amino acids
SQLLRRLRQENRLNLGGGSCSELRSRHXTPAWATSETLSQKKKKRQ

SEQ ID NO: 4701 - protein, 58 aa, Homo sapiens
  SITE (20): Xaa equals any of the naturally occurring L-amino acids
ATMPSPHFSVNFKQYFSPYXSSPLFKIRILITLLFLPLSLLNFCVLKAVLDHTHSCIC

SEQ ID NO: 4702 - protein, 85 aa, Homo sapiens
GKGISLQKNVLVVHPIFNLAPLSLWSNMSTFIKCFPGAAWKKLCLESDITLRTLGQEASAASVAIALKIITHCSKSSMNSCKFRC

SEQ ID NO: 4703 - protein, 45 aa, Homo sapiens
  SITE (10): Xaa equals any of the naturally occurring L-amino acids
  SITE (22): Xaa equals any of the naturally occurring L-amino acids
  SITE (23): Xaa equals any of the naturally occurring L-amino acids
  SITE (27): Xaa equals any of the naturally occurring L-amino acids
  SITE (36): Xaa equals any of the naturally occurring L-amino acids
MRNPFSGSNXEKLSVVPLPLKXXKREXVKEPLDNCXFELRRETCR

SEQ ID NO: 4704 - protein, 54 aa, Homo sapiens
IFFALFVCKQKLFSQSTVFKSYSDPLQSSYIIYLKSVLPTFEFHIIILKDLLML

SEQ ID NO: 4705 - protein, 128 aa, Homo sapiens
  SITE (81): Xaa equals any of the naturally occurring L-amino acids
  SITE (85): Xaa equals any of the naturally occurring L-amino acids
  SITE (86): Xaa equals any of the naturally occurring L-amino acids
KPRGQVSSLRGSLGQSFCSGALHESSPGKLSLKSETAQAQHRGQSLATGSGPSLDFLPSSIFASLGLSSSMPALRCSPTPXCTWXXRPLVFSFSCESPPGYCCFLEGCPGLRPALLSLPRKDNQKDKP

SEQ ID NO: 4706 - protein, 43 aa, Homo sapiens
RRQKLTLVTWISEMVSNEQCNIRRCNRGPVGKMSFAGELDSVG

SEQ ID NO: 4707 - protein, 35 aa, Homo sapiens
VVYRGKKSEFFIYKEVCKLYFMSSLLSSGMVIYTK

SEQ ID NO: 4708 - protein, 65 aa, Homo sapiens
PSLPHELGSSLSRAHDVCSENSKGSGASSHTGPSCQFKCLAFWCSQSYSSLCCLLRLQAAALLLG

SEQ ID NO: 4709 - protein, 106 aa, Homo sapiens
  SITE (76): Xaa equals any of the naturally occurring L-amino acids
  SITE (77): Xaa equals any of the naturally occurring L-amino acids
  SITE (79): Xaa equals any of the naturally occurring L-amino acids
  SITE (82): Xaa equals any of the naturally occurring L-amino acids
  SITE (85): Xaa equals any of the naturally occurring L-amino acids
  SITE (101): Xaa equals any of the naturally occurring L-amino acids
GEGRELFLHLLVLCCPHLKIIFMPTWHNLGVTYSDPLHWGWGIWRIKLASALHLVMNRILKGISASSLPHFLPSFXXFXSFXLNXSCYRLALQILQFATTXLHLSF

SEQ ID NO: 4710 - protein, 66 aa, Homo sapiens
SPGTLGGRGGRFTRSGARNQSGQHSETPSLLRMQKISWVWWCVHVIPATREAKAGESCEPGRRKLQ

SEQ ID NO: 4711 - protein, 77 aa, Homo sapiens
  SITE (24): Xaa equals any of the naturally occurring L-amino acids
KLSSALSSVGPETGWSYGREHRMXVLKRRCSLLAPSLVASLHLAWISSVKWDNAYSTKLMCFEIFNTNICYWKLNTN

SEQ ID NO: 4712 - protein, 135 aa, Homo sapiens
  SITE (26): Xaa equals any of the naturally occurring L-amino acids
ARGKNDQALQLTQMDKMHKKATKWMXWKHLKEDGFPSPRSKKTFGQRLLGMLPSENSSKRMEDQDSPQEVLKMLIDLLNDKEEALAHQRKVSYMLARALEDKDTASNENKEKNPIKENFPFNNPWRWRTDILNGY

SEQ ID NO: 4713 - protein, 59 aa, Homo sapiens
FSKKKIIVSDILKHKNPKFYIEEIDSVKRNEIVLFLNSLKEAFSPFVKIIFKYLGQNFC

SEQ ID NO: 4714 - protein, 59 aa, Homo sapiens
  SITE (37): Xaa equals any of the naturally occurring L-amino acids
NNCLVETSNFSSSPASLLWLPGAGFLAFGDILTEGSXSRDPRHLAPSPKSHPKHTGVNN

SEQ ID NO: 4715 - protein, 63 aa, Homo sapiens
YSSFIHSRILNARSVEDTRRIAFQLLDGCCSGFLELEINFYLEQRRKSFKRLKSCCYYCCEIV

SEQ ID NO: 4716 - protein, 65 aa, Homo sapiens
  SITE (20): Xaa equals any of the naturally occurring L-amino acids
  SITE (29): Xaa equals any of the naturally occurring L-amino acids
VQFYRTTMLIHFRIVHGCSXAESLVVRTXPAQPAQPAQLSKAEYLLSGSLEKVCNSYFRLMLLQC

SEQ ID NO: 4717 - protein, 82 aa, Homo sapiens
SQQPAQAVGAGLSPLGQWPGISDLSSDLYSLGLVSSYMDNVMSEVLGQKPQGPRNNTWPNRDQSDGVFGMLGEILPFDPAGM

SEQ ID NO: 4718 - protein, 57 aa, Homo sapiens
PYGALLSNRSQFVKNNNNNNKKKQRERDECASRCLEKSLNVCILNINTSYSALWDFG

SEQ ID NO: 4719 - protein, 82 aa, Homo sapiens
  SITE (73): Xaa equals any of the naturally occurring L-amino acids
HAGGLLGSIVGVGRKEIKIEQRGKLGCDMSNKGLRKPTRRSKLGMNLLTCPSWGEELGLYSPYINQSLNVDFXQERKGHDLG

SEQ ID NO: 4720 - protein, 86 aa, Homo sapiens
  SITE (27): Xaa equals any of the naturally occurring L-amino acids
  SITE (76): Xaa equals any of the naturally occurring L-amino acids
AKLHPGRPEQNSISKKKKKRITRCSSXEVVQIISSPVLLSQILLFILRNKFPNAHSHSRKKCFSIRLLKAILSERXPGGKVLSVVN

SEQ ID NO: 4721 - protein, 80 aa, Homo sapiens
  SITE (77): Xaa equals any of the naturally occurring L-amino acids
VSPTCQTCSCLRAFVQAILYARKALHSDIISLILAIHLDLNSDVTPERPLTSKFKVALYSQPFYFPNSTSYLLTLPXMLN

SEQ ID NO: 4722 - protein, 48 aa, Homo sapiens
  SITE (17): Xaa equals any of the naturally occurring L-amino acids
  SITE (45): Xaa equals any of the naturally occurring L-amino acids
  SITE (46): Xaa equals any of the naturally occurring L-amino acids
FLPLLGHGGLKNLMRAXAQWLISIILTLWKAKVEGSLEPRSSRPXXAT

SEQ ID NO: 4723 - protein, 107 aa, Homo sapiens
  SITE (29): Xaa equals any of the naturally occurring L-amino acids
  SITE (90): Xaa equals any of the naturally occurring L-amino acids
KKEILWQEESKRGGRREGTIDSEKHTRMXRPGGVQGGPQTLTSCLAPPIAKNADFRVGPFLEPCIRNRFLYRSGLAKIHFEKFRDGMEQXKIEILASFSSYNSPLVL

SEQ ID NO: 4724 - protein, 56 aa, Homo sapiens
EYNSNIIRLCNLKHIPASHTICTPASPLKPIASPLAAPYPPPKKKKKRKRKEKRRR

SEQ ID NO: 4725 - protein, 109 aa, Homo sapiens
  SITE (1): Xaa equals any of the naturally occurring L-amino acids
XKSLWFLKVLPAGSYFQSFPWRLLVCFRWGYCFSLWLLPSLLLSLVSSSSISLSTHLLLCTPDPSRRGESCGEGGVSVHYPGLGFPINAHSFVLFNKRTKSKKPQPTAF

SEQ ID NO: 4726 - protein, 63 aa, Homo sapiens
YQFCLQSIQNLLSAQARWLTPIIPAPWEAEAGGSPEVGSSRPAWPTWRNATSTKNTKIGQVWW

SEQ ID NO: 4727 - protein, 67 aa, Homo sapiens
  SITE (35): Xaa equals any of the naturally occurring L-amino acids
  SITE (39): Xaa equals any of the naturally occurring L-amino acids
KRLFISLGHTLKHKLNDPTLNTKEVESIIASTDRXLLDXTNNTHLFIPFFFFPLSPRRAFSSFITHS

SEQ ID NO: 4728 - protein, 58 aa, Homo sapiens
  SITE (33): Xaa equals any of the naturally occurring L-amino acids
  SITE (35): Xaa equals any of the naturally occurring L-amino acids
  SITE (37): Xaa equals any of the naturally occurring L-amino acids
  SITE (41): Xaa equals any of the naturally occurring L-amino acids
  SITE (45): Xaa equals any of the naturally occurring L-amino acids
  SITE (47): Xaa equals any of the naturally occurring L-amino acids
  SITE (48): Xaa equals any of the naturally occurring L-amino acids
  SITE (52): Xaa equals any of the naturally occurring L-amino acids
  SITE (55): Xaa equals any of the naturally occurring L-amino acids
  SITE (56): Xaa equals any of the naturally occurring L-amino acids
SWLLVCRGLFTPVALPIVSPSYRSLLCPCYWNXLXLXCCYXRCLXKXXGRPXAPXXRK

SEQ ID NO: 4729 - protein, 88 aa, Homo sapiens
TSSNTSVPSFCMADSLMRFILVLAITLLKIGGPGDMSSAMVVMVFVSREVQPRTFSQTPGQRFDITVLLVCSVSRLGSLIPDFFLWSF

SEQ ID NO: 4730 - protein, 37 aa, Homo sapiens
  SITE (34): Xaa equals any of the naturally occurring L-amino acids
TREAEVAVSRDCATALSSLGNRARICLKKKKSSXFIK

SEQ ID NO: 4731 - protein, 68 aa, Homo sapiens
AYCFPQPHEVGKRCLETYFSFRKKCRTTETWTTVGLIFCLDEIPSCYFLRKYSYPSSQSQLNTRQLVE

SEQ ID NO: 4732 - protein, 52 aa, Homo sapiens
  SITE (17): Xaa equals any of the naturally occurring L-amino acids
GIGLEARIRHGGSEFSXGFFFPAFITLLFFQHNRTAYDIVAGTIVVKRNGVR

SEQ ID NO: 4733 - protein, 130 aa, Homo sapiens
  SITE (21): Xaa equals any of the naturally occurring L-amino acids
  SITE (22): Xaa equals any of the naturally occurring L-amino acids
  SITE (41): Xaa equals any of the naturally occurring L-amino acids
  SITE (53): Xaa equals any of the naturally occurring L-amino acids
LPWPELWEKLCSVLDPVNSFXXYYYYYYYLLLCWALALLPXLECICVIIAHCXLKFPGSSDPPASTSRVAGTMGTCHHSLLRPCEFYFPNLAGISSLLPSSWLSPSLSWSGLSTTSCHPVLSDCFISHPD

SEQ ID NO: 4734 - protein, 155 aa, Homo sapiens
  SITE (91): Xaa equals any of the naturally occurring L-amino acids
AASASKPGFGVAGGCSSGASWSRLAALRRVRCGCFQVPEAPVRNPPGPKLPPGPGPRTPQRRATFSSVGGKRWRSQSNLRGTTSVGAKLWXESPPSCVPRPPYHSLLEVGAVTAFSSKCQIPGHYKRLINTKLALWLSSLGTDKWKRWSRGKSLP

SEQ ID NO: 4735 - protein, 120 aa, Homo sapiens
  SITE (89): Xaa equals any of the naturally occurring L-amino acids
  SITE (116): Xaa equals any of the naturally occurring L-amino acids
  SITE (117): Xaa equals any of the naturally occurring L-amino acids
AQLGRLRRENHLNPGVRGYSEPRLCLHSNLGDRARLCLQKKIVSCVKKNINYIIWQFLWRVWQKSRGLGSFFFALATGWMQFIYFSTSXWPPQPNFLPVVTWWPEGAGLMAWARPXXPSF

SEQ ID NO: 4736 - protein, 51 aa, Homo sapiens
  SITE (45): Xaa equals any of the naturally occurring L-amino acids
  SITE (51): Xaa equals any of the naturally occurring L-amino acids
PQHHLFGIPLSNASDPIHVELRNPPYATSQKSHRGVYPGRSSPQXTSFPGX

SEQ ID NO: 4737 - protein, 130 aa, Homo sapiens
REAWKRSNFSCASTSGVSGASASASSSSASMVSSASSSGSSVGNSASNSSANMSRAHSDSNLSASAAERIRDSKKRSKQRKLQQKAFRKRQLKEQRQARKERLSGLFLNEEVLSLKVTEEDHEADVDVLM

SEQ ID NO: 4738 - protein, 86 aa, Homo sapiens
GTRKKVQKGNVVHLNSLITSGYTKKVDITFIPRRIWSPEATTAELIRKRELRRERFTHEVDFDDFMMPFQKNITEKARALEAALKT

SEQ ID NO: 4739 - protein, 37 aa, Homo sapiens
LYPLKNGLKCHCYLKTRCVGTSLICCFLFFPPFESFA

SEQ ID NO: 4740 - protein, 50 aa, Homo sapiens
NWLFRLMACFFSNGDLKVISNVLLTSGQFPVGYRINSFHIIKKKKKKKKI

SEQ ID NO: 4741 - protein, 68 aa, Homo sapiens
  SITE (25): Xaa equals any of the naturally occurring L-amino acids
IKNGCVFFKITFEILPPVVLPASLXPHKNPINICHMGKVDFFKGQILNLHLEECIKSLVTIAFISLIN

SEQ ID NO: 4742 - protein, 56 aa, Homo sapiens
  SITE (33): Xaa equals any of the naturally occurring L-amino acids
  SITE (47): Xaa equals any of the naturally occurring L-amino acids
HSSGGGSSGDEEEWYQGLPAVPGGTSGIDGGQXGRAWDPEKLAQELXASLTQDTGP

SEQ ID NO: 4743 - protein, 40 aa, Homo sapiens
SQLLGRLRQEKLLNRGDKGYSEPRPHHCTPAWTTRAKLRL

SEQ ID NO: 4744 - protein, 85 aa, Homo sapiens
  SITE (51): Xaa equals any of the naturally occurring L-amino acids
  SITE (71): Xaa equals any of the naturally occurring L-amino acids
  SITE (79): Xaa equals any of the naturally occurring L-amino acids
MRCVSLGSPRLLGSSIPALITLDHNCVRGVCPPKPYRIVCPTVGQRAEQRXSQSSLCSTTSTRTHNWALGXCCWELNWXDVFLKI

SEQ ID NO: 4745 - protein, 51 aa, Homo sapiens
ARVKTSVKILSELLMKMKRRRKVGGSREVKKGKEGRRKEVKKQTKTLTTLL

SEQ ID NO: 4746 - protein, 51 aa, Homo sapiens
  SITE (4): Xaa equals any of the naturally occurring L-amino acids
LLKXQKLAGHGGTCLQSQLLGRLRQENRLNPGGRGCSEWRSCHCTPSWAKE

SEQ ID NO: 4747 - protein, 50 aa, Homo sapiens
  SITE (11): Xaa equals any of the naturally occurring L-amino acids
  SITE (20): Xaa equals any of the naturally occurring L-amino acids
KVPSKYLKKIXHRRFSNEFXFLLNTIWQDGQNRGGPFHLNVSIQVSPPFP

SEQ ID NO: 4748 - protein, 47 aa, Homo sapiens
ILKNLFLMKFLICNFCGYIVGIYKNLIFCCFPCYYKFITASHGGSCL

SEQ ID NO: 4749 - protein, 73 aa, Homo sapiens
VDPEAEERGRGPVRVLLTLLPLVEDLDRTVCGDHCKRCLLLRSEGKRKTLQRRDLDNAIEAVDEFAFLEGTLD

SEQ ID NO: 4750 - protein, 92 aa, Homo sapiens
ETFIEQIEGCHGQGRGHAQRGHRRRPWLRPRDQPATPQHLRPGHRGGEPTIPMPTPPCISRTSCTPGRGGSSSVRWLSTPPPRPLNLRPHFL

SEQ ID NO: 4751 - protein, 54 aa, Homo sapiens
  SITE (48): Xaa equals any of the naturally occurring L-amino acids
EDYSRIVALPLGHHSSSRAVFPTYRSQATTLLAVTHSQEGIQTLMGRXEEVVSY

SEQ ID NO: 4752 - protein, 55 aa, Homo sapiens
PHSRSQGDHKRAFGSVPFLLSRIEVYFKISGRGEFSEQSTLICQYFFKFFKDMKK

SEQ ID NO: 4753 - protein, 56 aa, Homo sapiens
QKHFEILGSLSHQPLLLVTGLNAYLHENQLVLATDIRQRQRANYTKGKAVHFQTSS

SEQ ID NO: 4754 - protein, 67 aa, Homo sapiens
AMPARWKELIQDVPLPHTKKDPSFLGLVGYFQLWIINFGLLTKPLCTASRGSILEHLDPACPLTPTS

SEQ ID NO: 4755 - protein, 46 aa, Homo sapiens
KIAYVKQKPYKNIHPSKSLQGWRVRGKVSKHVDSPDLGCPVLIRLP

SEQ ID NO: 4756 - protein, 49 aa, Homo sapiens
GVFNTSSPKQYLHQDSSLIVFISFFSMDALKKKSYKETCTPQIHHSGDH

SEQ ID NO: 4757 - protein, 61 aa, Homo sapiens
  SITE (25): Xaa equals any of the naturally occurring L-amino acids
LYSELGRHRPMLIYSGTPGRDIKTXTSHIGSFQCIVIRTQIIPFSFFFSVLKGAHCWRRTG

SEQ ID NO: 4758 - protein, 85 aa, Homo sapiens
FFDFTTKFYYLRTVPLFASLRKFPSSRSNAKPLQQKSQSSGVTLSNSLSYPFSLTMVWRKHDILQMRLPPAPYRTLLTQSHPLAV

SEQ ID NO: 4759 - protein, 135 aa, Homo sapiens
GPFAIRSQMDKGSAGHPGGVLVWGRSPAPTALWGASPWLSPLTSALRQPLHRTPLLPGQLCCLPVPWRRTRPWVGPCCCPCCSCCSRQHFCSLVSTQDRPGMVSAQTTGGANPRQRQNIWGRGQAPTSSKQGRVP

SEQ ID NO: 4760 - protein, 65 aa, Homo sapiens
IKKQSKIITEFQWFLIAVVVPSHYTKPSMHKSTGKKNVSVFRYSWPYSTSVLHLLSSEIMTFFCP

SEQ ID NO: 4761 - protein, 136 aa, Homo sapiens
  SITE (25): Xaa equals any of the naturally occurring L-amino acids
  SITE (29): Xaa equals any of the naturally occurring L-amino acids
  SITE (42): Xaa equals any of the naturally occurring L-amino acids
CFLFSVFSDSSALSSQRNSFPTSFXTSSXQPPPAPCLGGVHXDFQVTGPPGTFSAADPSPWPGHNLHQTGPAPPPAVSESWPYPLTSQVSPSYSHMHDVYMRHPTLMPTCTTATATIITITTLLLALPWIHPMGLC

SEQ ID NO: 4762 - protein, 42 aa, Homo sapiens
PLGDLEALQKQEVKAKAELFGWLVQKIAVLSFQRNYFGTNLM

SEQ ID NO: 4763 - protein, 109 aa, Homo sapiens
  SITE (107): Xaa equals any of the naturally occurring L-amino acids
  SITE (109): Xaa equals any of the naturally occurring L-amino acids
VLSEFLHEEKTSIWVVMLMVGAVDPVFYNNMISNNNMTNMISNMISNNMTNMISNMISYNMIILLIILLIILTISYGIVILGSGLISILALYINTIIILNFINKETXVX

SEQ ID NO: 4764 - protein, 48 aa, Homo sapiens
  SITE (9): Xaa equals any of the naturally occurring L-amino acids
  SITE (13): Xaa equals any of the naturally occurring L-amino acids
  SITE (15): Xaa equals any of the naturally occurring L-amino acids
DRVSLCRPXWGAXAXSRLTASSASRVHAILLPQPPEQLGLQAPATMPS

SEQ ID NO: 4765 - protein, 64 aa, Homo sapiens
FIKQSLIVVQTTSLSFFGCSVTKISQSTSVTPIDKLTDRGKKGAVSGVQALAILMGILCPVLMT

SEQ ID NO: 4766 - protein, 100 aa, Homo sapiens
  SITE (62): Xaa equals any of the naturally occurring L-amino acids
AVGVGNGESLDQSKACSPEDPGVAKAATETTAAGAVAAAPTHELTLIPSPGAPAPPSPIQPXGGRLGKFPALQEASWLLIGQCEQTVETGGHVTLKIPAS

SEQ ID NO: 4767 - protein, 57 aa, Homo sapiens
  SITE (48): Xaa equals any of the naturally occurring L-amino acids
  SITE (52): Xaa equals any of the naturally occurring L-amino acids
WPLSSHCFKQGIKHLWLKFVKLCSHPPFRPDRRDFRILREQLFPDLKXHSSXKANVT

SEQ ID NO: 4768 - protein, 60 aa, Homo sapiens
  SITE (59): Xaa equals any of the naturally occurring L-amino acids
MKASFLFFPLVSNSWTQVILLPQPSEMLELQAEPLHPAQFSSSVAVLSNFSLISISHHXQ

SEQ ID NO: 4769 - protein, 121 aa, Homo sapiens
  SITE (38): Xaa equals any of the naturally occurring L-amino acids
  SITE (68): Xaa equals any of the naturally occurring L-amino acids
  SITE (69): Xaa equals any of the naturally occurring L-amino acids
  SITE (72): Xaa equals any of the naturally occurring L-amino acids
  SITE (73): Xaa equals any of the naturally occurring L-amino acids
  SITE (75): Xaa equals any of the naturally occurring L-amino acids
IMFLLHITSQLYPIYQKLEFGDVTSSWFVGTINPVTNXRKTYTQNLEWKWCWGISESLQLLFSVLLSXXYKXXLXRDMLVCEGASSTKLMFFNSCKIKCTPLSFTSLFLMCQVRHFTSSHD

SEQ ID NO: 4770 - protein, 72 aa, Homo sapiens
  SITE (53): Xaa equals any of the naturally occurring L-amino acids
  SITE (58): Xaa equals any of the naturally occurring L-amino acids
  SITE (60): Xaa equals any of the naturally occurring L-amino acids
  SITE (61): Xaa equals any of the naturally occurring L-amino acids
CLGSQPEAPELRVTLVYEAVAGGSPSKVFFLVLCLTHWQGWLEGWAQLGRLLXHLSAXTXXWQPPWVVRLLK

SEQ ID NO: 4771 - protein, 49 aa, Homo sapiens
  SITE (37): Xaa equals any of the naturally occurring L-amino acids
MCIHTRVSQIVRLIPQYSICFVTDFTVLSTFLIYKKXKKENLIQQFLKS

SEQ ID NO: 4772 - protein, 46 aa, Homo sapiens
CGRSLKDGSLCSQCEYLVPERAEQTLFSENCVYLFDSSAEGIRVKE

SEQ ID NO: 4773 - protein, 49 aa, Homo sapiens
VSETLKGRQYQIYIIKNCRQFMDYFPLNFQRCNSIPFRDVATALWRELG

SEQ ID NO: 4774 - protein, 87 aa, Homo sapiens
  SITE (69): Xaa equals any of the naturally occurring L-amino acids
  SITE (82): Xaa equals any of the naturally occurring L-amino acids
QKRKCSFQRAQPEPHGCAGQQEGSRSLKPSMPLSPYRYSDGYRSSSLLRAVAHLRSQLWAHLPRAPLAXRWSPSAWCWVGGXCRPWY

SEQ ID NO: 4775 - protein, 65 aa, Homo sapiens
  SITE (1): Xaa equals any of the naturally occurring L-amino acids
XFFETYLSLSPRLECSGKISAHCKLRLPGSRHSPASASRVAGTTGARHHALLIFFIFSSDGVSPC

SEQ ID NO: 4776 - protein, 83 aa, Homo sapiens
ITPHNRQNLNAVHHRSYGVHSFIESISPQARYIEQVQNYSIYSFRLLLNKSKDSLMRSCVLSRISIIEHFLLFLLIFLLVDSH

SEQ ID NO: 4777 - protein, 142 aa, Homo sapiens
  SITE (16): Xaa equals any of the naturally occurring L-amino acids
  SITE (96): Xaa equals any of the naturally occurring L-amino acids
RFKGRRGRVLAGRPAXGERPASGSALGLGLRSGSVPRPRQLRAFPAPARALPLSPALTAVSLHFSLLGPRRLGHLLRTPTRAALATVTRETSDVTXAFSTLLYGGRGGAKSSESDRRADGALGWIQASTISRGGPYPIRPNT

SEQ ID NO: 4778 - protein, 75 aa, Homo sapiens
WDMGAGTPSLAFPLPSLLSFSPLLPMGLGSHHSPLRESSSKDIALFRNRFKASKLLISASQAKIWHQTTHIGCTD

SEQ ID NO: 4779 - protein, 87 aa, Homo sapiens
YLWGFVFNWPNKPAVKSESSVKRRLHRVWGESALVRRASIHFPEQSRQEELQAHFRTSTSDSRFRTAVLCVHAPGTNHTSGPDFRSH

SEQ ID NO: 4780 - protein, 32 aa, Homo sapiens
IISNCLPTKYLLIRKRKKRHATVKKSGRPYLN

SEQ ID NO: 4781 - protein, 70 aa, Homo sapiens
  SITE (47): Xaa equals any of the naturally occurring L-amino acids
RSLREIRALGLSTHPSISEIRGDRVSDNVSQSWSTFGERPESNGGRXGEGARSETKASPDILCFAGHSSG

SEQ ID NO: 4782 - protein, 56 aa, Homo sapiens
  SITE (45): Xaa equals any of the naturally occurring L-amino acids
MAGSAQCSLREMRNRHTSMLDADAVQEMLPQNMAPQHTEYFKQKXIKKTTKTERSL

SEQ ID NO: 4783 - protein, 79 aa, Homo sapiens
  SITE (2): Xaa equals any of the naturally occurring L-amino acids
  SITE (55): Xaa equals any of the naturally occurring L-amino acids
  SITE (56): Xaa equals any of the naturally occurring L-amino acids
GXEDRVHASAIGQGKIQPPVTKSQAFGLQSEGKEITCSCSLICPPGGSDERRDSXXRGPSAWREGRNQFPNWYHIHQVK

SEQ ID NO: 4784 - protein, 60 aa, Homo sapiens
  SITE (25): Xaa equals any of the naturally occurring L-amino acids
  SITE (27): Xaa equals any of the naturally occurring L-amino acids
SSSLITVARVRELRLYKRRPRCFPXVXTELAETGVLSREAPSDTTAALTSVTTCKQMLSP

SEQ ID NO: 4785 - protein, 94 aa, Homo sapiens
  SITE (33): Xaa equals any of the naturally occurring L-amino acids
  SITE (90): Xaa equals any of the naturally occurring L-amino acids
NPNSVLLTTGCFQSFFLASSLIAPLQGPVYCPXNVLAHFSLRVFDYTLPSFLHLSDASQSFKTQLISNLLRGAFPDFHSPSRHCGCQLLXPSIT

SEQ ID NO: 4786 - protein, 126 aa, Homo sapiens
  SITE (9): Xaa equals any of the naturally occurring L-amino acids
  SITE (37): Xaa equals any of the naturally occurring L-amino acids
  SITE (67): Xaa equals any of the naturally occurring L-amino acids
NFIKKYNDXGTNYRPLNSHNRLRRAVLLCKVPSQTPXGYRAGMVHGLGKSIWAEREGQGQPVGGDMXGLTPHLYLKPPSHRGASWGPSLGVSIHGGHPHVWAEPGYVGMWGVQPKEGRNPQGLVLG

SEQ ID NO: 4787 - protein, 62 aa, Homo sapiens
  SITE (6): Xaa equals any of the naturally occurring L-amino acids
RSLSCXFTPCACRLTHGVTNIEHPLPPTPDTVLSSRYTHLYLPCNICILQGQCLGSGPGSGL

SEQ ID NO: 4788 - protein, 69 aa, Homo sapiens
  SITE (15): Xaa equals any of the naturally occurring L-amino acids
NFWLPIDYSSMSDKXICFLPFVLVLELAIKKYAGLLCTLFNSIIAQLHLIELFTYTRVLSLEEHLQADS

SEQ ID NO: 4789 - protein, 70 aa, Homo sapiens
IKTGFCCVHYWRKYLQWIVITSLPKVAVFWQEVRKTNQRKGGLRGKRHEVLPFLNMPRVVLQITEGHLKV

SEQ ID NO: 4790 - protein, 46 aa, Homo sapiens
TIQSTFNEGLLFSGHSTRPEDTEVNQTLPLTLRSFWTSGKEGSHEN

SEQ ID NO: 4791 - protein, 110 aa, Homo sapiens
  SITE (84): Xaa equals any of the naturally occurring L-amino acids
  SITE (102): Xaa equals any of the naturally occurring L-amino acids
  SITE (106): Xaa equals any of the naturally occurring L-amino acids
  SITE (110): Xaa equals any of the naturally occurring L-amino acids
LACLWSPPTPTRLRESPLHTHTTTYFRRAAAFPPGFLTPFLSLQGRGPEELEAQGPCSGPRAWGHLPPRAKRRMDVDTAPRAWXGHSSSSAEPRQALGTCWXSGGXPRGX

SEQ ID NO: 4792 - protein, 51 aa, Homo sapiens
  SITE (20): Xaa equals any of the naturally occurring L-amino acids
  SITE (35): Xaa equals any of the naturally occurring L-amino acids
  SITE (38): Xaa equals any of the naturally occurring L-amino acids
  SITE (49): Xaa equals any of the naturally occurring L-amino acids
LPLLKLSGYESKRDCFKMLXVIPRLTTKRIHLKYXWVXGITKGILKDPXEN

SEQ ID NO: 4793 - protein, 73 aa, Homo sapiens
  SITE (1): Xaa equals any of the naturally occurring L-amino acids
  SITE (20): Xaa equals any of the naturally occurring L-amino acids
  SITE (31): Xaa equals any of the naturally occurring L-amino acids
  SITE (40): Xaa equals any of the naturally occurring L-amino acids
  SITE (43): Xaa equals any of the naturally occurring L-amino acids
XSWNLEKLAAGTAALSMPCXTSPDASSCVLXEMGLDKQAXMQXDVGGTISPGDPSREWFSCGLCRALPGVREC

SEQ ID NO: 4794 - protein, 50 aa, Homo sapiens
  SITE (19): Xaa equals any of the naturally occurring L-amino acids
REPSSAGLSPKSQMSMNSXVFFTDFCSGRTKFQMSHSQVYSKDVVVFCFE

SEQ ID NO: 4795 - protein, 53 aa, Homo sapiens
  SITE (9): Xaa equals any of the naturally occurring L-amino acids
  SITE (51): Xaa equals any of the naturally occurring L-amino acids
SVGSWGTGXVKGISQDFSTKGSLKNYYPLSPALSQEVLTPLSANISLSVKXLP

SEQ ID NO: 4796 - protein, 62 aa, Homo sapiens
LSQSSPRVSHLGSSLVPKEQFCALDLCSHNCVTESLLEPLSCRVYPFEQLPTLLQLGAALNS

SEQ ID NO: 4797 - protein, 94 aa, Homo sapiens
  SITE (85): Xaa equals any of the naturally occurring L-amino acids
  SITE (92): Xaa equals any of the naturally occurring L-amino acids
TKILIPKPSVRGLAKFGFPYSSTSTFPCSQAEGFLNVPSSLCLLRPALHWHLSYLSLIHVMPTQLQDLIQVPSAPSRLSDNPSFXPGVLPFXDS

SEQ ID NO: 4798 - protein, 58 aa, Homo sapiens
RAYLHDLKRAKMGLGGMPDRNHPACAKADLEEVVRVCPGFKAYLDIGQVRQSLGLANS

SEQ ID NO: 4799 - protein, 34 aa, Homo sapiens
LFQNLIAGCWLKLTDNINSPLTHILYVICIIYLQ

SEQ ID NO: 4800 - protein, 59 aa, Homo sapiens
LGSPSGGKFESQPVLPSALFSSATETGCSATQDPDGEATRVRVAASPQWILMRNKPLLM

SEQ ID NO: 4801 - protein, 64 aa, Homo sapiens
QSIGDVQEGCDPIVLSLWETGGGACTLADKLLVETAGCACPSDTRFCKTDCLLKISLSLLKKKK

SEQ ID NO: 4802 - protein, 92 aa, Homo sapiens
  SITE (91): Xaa equals any of the naturally occurring L-amino acids
HEVKMDGARVSALCSGLKRSERGGSGNSSPNSNLVLVVLAAAAEAGAMAELEHLGGKRAESARMRRAEQLRRWRGSLTEQEPADDEARGGXA

SEQ ID NO: 4803 - protein, 97 aa, Homo sapiens
ELSLQRGRIRTLWAHRVVASTPEWEKAWIICKGNPVLIFATLKKNLFLVLWCYFALFYDLFLDDRYSDYRKKKDSSSLFFLNFKLFFHVCVICSLGA

SEQ ID NO: 4804 - protein, 70 aa, Homo sapiens
  SITE (56): Xaa equals any of the naturally occurring L-amino acids
  SITE (65): Xaa equals any of the naturally occurring L-amino acids
EHDQIQLVCNKMNFSAELSPSFSHYNLIVILKSPPKMEVICHFLYMCYQKGVLIQXPKRGFLGSXRQQRV

SEQ ID NO: 4805 - protein, 74 aa, Homo sapiens
  SITE (56): Xaa equals any of the naturally occurring L-amino acids
SLSHNVLIQQTLYLGYIFNNKFVSIIYLSLGGKYLHLFIYPLEAINTWATPPWNCXWGVSTMGLKIKFGGVAGF

SEQ ID NO: 4806 - protein, 80 aa, Homo sapiens
  SITE (14): Xaa equals any of the naturally occurring L-amino acids
SLISLAMILFPLIXITKNLNNIHWCVKIHLCIFCSYKDIFGLKIFLCFVLLSWCRFPTKLRVINITKDSMLECVYVCMFK

SEQ ID NO: 4807 - protein, 87 aa, Homo sapiens
VYKSHLNIYLCNVISAVLSLFYPPAPVVDVIILGTETLCLKKIRCQFSQDVLYLRFWKDVYLYRNTSTLLNVLKLFLLKKKKKKFSV

SEQ ID NO: 4808 - protein, 45 aa, Homo sapiens
QILVEMEKNSCSSWLRSWDMVAIWYPLFAYHCSHYFSSVSPVIMI

SEQ ID NO: 4809 - protein, 84 aa, Homo sapiens
  SITE (75): Xaa equals any of the naturally occurring L-amino acids
  SITE (84): Xaa equals any of the naturally occurring L-amino acids
SPVWTEKRKMQDTGSVVPLHWFGFGYAALVASGGIIGYVKAGSVPSLAAGLLFGSLAGLGAYQLSQDPRNFGFSXFADGRQSWX

SEQ ID NO: 4810 - protein, 95 aa, Homo sapiens
ERCGLGTPGAPHSSGCPAAAAHSQRWPSCVAFWRGSWKASAELALGRVSGSSRPVRAAHPRGRRLRRAWHCHLSRPALAPPELLYPSPLLHLRNP

SEQ ID NO: 4811 - protein, 34 aa, Homo sapiens
ATCDFPDGQHWATAGGSGWLLTSPRAWLHLGSLW

SEQ ID NO: 4812 - protein, 67 aa, Homo sapiens
  SITE (28): Xaa equals any of the naturally occurring L-amino acids
  SITE (45): Xaa equals any of the naturally occurring L-amino acids
SKAAIPEDDMLSATPLYGNVHSWMNSEXVRMCGASEDRKILVNDXDASKARLELREENPLNHNVVDA

SEQ ID NO: 4813 - protein, 62 aa, Homo sapiens
  SITE (1): Xaa equals any of the naturally occurring L-amino acids
  SITE (3): Xaa equals any of the naturally occurring L-amino acids
  SITE (4): Xaa equals any of the naturally occurring L-amino acids
  SITE (8): Xaa equals any of the naturally occurring L-amino acids
XEXXPFAXFSISIDITPSFSCSSQKPRVLSFSYIPHLICQQSMADCTFKIYPESNHFLLFLP

SEQ ID NO: 4814 - protein, 36 aa, Homo sapiens
  SITE (17): Xaa equals any of the naturally occurring L-amino acids
  SITE (18): Xaa equals any of the naturally occurring L-amino acids
FSCDCEDITSADFQVWXXPLPHEPDLCLIPWISTGQ

SEQ ID NO: 4815 - protein, 68 aa, Homo sapiens
  SITE (50): Xaa equals any of the naturally occurring L-amino acids
  SITE (67): Xaa equals any of the naturally occurring L-amino acids
NMFKQATWKQRDKEAKYTKPQSPPSCFPFDPVSRSLLVRAPSMTPLPTSXKNLVWASLPSPKCSHLXP

SEQ ID NO: 4816 - protein, 94 aa, Homo sapiens
PHPVATEAGKYSLYFGHPCVQQNWGFHQSARTGEWPMQWLMLVSQHFGRSRWADHLRSGVQDQPGQYGETLSLLKIKKLAGCAGAPVVPATLGS

SEQ ID NO: 4817 - protein, 84 aa, Homo sapiens
  SITE (83): Xaa equals any of the naturally occurring L-amino acids
GTSMSSLINNAMSGLNAAQAALNTASNNISSYNVAGYTRQTTIMAQPIARWALAAGLAMVSTFLVCSVSMMRLLPTSYVRRRXS

SEQ ID NO: 4818 - protein, 125 aa, Homo sapiens
  SITE (33): Xaa equals any of the naturally occurring L-amino acids
  SITE (66): Xaa equals any of the naturally occurring L-amino acids
  SITE (82): Xaa equals any of the naturally occurring L-amino acids
  SITE (91): Xaa equals any of the naturally occurring L-amino acids
  SITE (112): Xaa equals any of the naturally occurring L-amino acids
WACFGLDSPRSSAGTHTGAGIAPFRHVELAGAXGHALVWTARPWGWNRKCLRPFTLPRGQHPQPSXGFPQVNEVVFSPGESXCATCSEGWXCAGVGLGQHGACDPVPGAETXLLCLAWSPRAVAA

SEQ ID NO: 4819 - protein, 96 aa, Homo sapiens
ADIVNLNRVQFIIFPYIVGPFLGSCLRNFCILQSCEDIFLCFLQKALLFFHSYLDLLSGGFISYVWWEIGTRILFFIWTFHIIQHHIFVFKKPTKP

SEQ ID NO: 4820 - protein, 39 aa, Homo sapiens
LKNKNSTFVGTSYRECTVCYLYSENRLKIIKHVKNNNSK

SEQ ID NO: 4821 - protein, 46 aa, Homo sapiens
LNILLFHFSLNFVFGNAKFTAYGLKGPKSIKTLKNYLLIMRLFRRK

SEQ ID NO: 4822 - protein, 69 aa, Homo sapiens
  SITE (30): Xaa equals any of the naturally occurring L-amino acids
PEWAGLGVTRVTGSVASVVAGLTALVPGAXAEETSFLIPFPLCSNQRSCAIGYVLWLQHLFPRVLLGSD

SEQ ID NO: 4823 - protein, 97 aa, Homo sapiens
  SITE (22): Xaa equals any of the naturally occurring L-amino acids
  SITE (41): Xaa equals any of the naturally occurring L-amino acids
  SITE (62): Xaa equals any of the naturally occurring L-amino acids
APSCGVFPGKSWKGLFKVPVVXPRLDDTHLLCFGFWLQIIXKPTWEYLYCVLFILSGLLFYXLFVHYKFGWAQKISKPITMHLQMLMEVVPPEEDPE

SEQ ID NO: 4824 - protein, 40 aa, Homo sapiens
  SITE (3): Xaa equals any of the naturally occurring L-amino acids
  SITE (10): Xaa equals any of the naturally occurring L-amino acids
  SITE (14): Xaa equals any of the naturally occurring L-amino acids
VIXFTGHLMXDIYXVSIFCYNYAAVDTLLHVFVHMCEHMD

SEQ ID NO: 4825 - protein, 90 aa, Homo sapiens
  SITE (11): Xaa equals any of the naturally occurring L-amino acids
  SITE (69): Xaa equals any of the naturally occurring L-amino acids
  SITE (72): Xaa equals any of the naturally occurring L-amino acids
  SITE (87): Xaa equals any of the naturally occurring L-amino acids
  SITE (89): Xaa equals any of the naturally occurring L-amino acids
GKGSFEKKKKXKKKKKNSRGGPVPNSPYSESYYNSLAVVLQRRDWENPGVTQLNRLAAHPPFASCVIAXRPXRSPFPTVAQPEWRMXIXS

SEQ ID NO: 4826 - protein, 62 aa, Homo sapiens
  SITE (19): Xaa equals any of the naturally occurring L-amino acids
  SITE (40): Xaa equals any of the naturally occurring L-amino acids
KCALFSNNLYIVNFGGVSXYVYAYFFFLHKFLGIFFHKEXKIKSKFIFNSCLLGFNYSELKI

SEQ ID NO: 4827 - protein, 113 aa, Homo sapiens
PVCLGSFPASSHMTVSVYFSLWPSCLRVPVPPRVSSTALDIASAMAPHQGLLPGHIPSLSHPSSLRLPFSLPSSLCYCQWRVCALCRFDPMTLYLWLFLQVPRRGPAPGPERG

SEQ ID NO: 4828 - protein, 49 aa, Homo sapiens
LHHFLFIRTYSTKQIALSYNLLLLYPVLTLILILDLQLSIFNAKLLKFL

SEQ ID NO: 4829 - protein, 80 aa, Homo sapiens
  SITE (7): Xaa equals any of the naturally occurring L-amino acids
  SITE (41): Xaa equals any of the naturally occurring L-amino acids
PLTSAAXHQDKPPEFPSMVRLKLKAAVHRILPEKGLIFGLXLSLSCLLYSLPSFPEDHILNKSLAEKSSLHQDLLLGTPT

SEQ ID NO: 4830 - protein, 57 aa, Homo sapiens
TFFLACLFIENKARFPCCACWRLWSSLVSALSVGFSAQVKSRGSPVGFTFPTCNNSY

SEQ ID NO: 4831 - protein, 66 aa, Homo sapiens
  SITE (62): Xaa equals any of the naturally occurring L-amino acids
GRRIAGTREAEAAVRRDHATALQPGQQSETQSQKKKKKKNSRGGPVPNSPYSESYYNSLAVXLKTS

SEQ ID NO: 4832 - protein, 36 aa, Homo sapiens
  SITE (33): Xaa equals any of the naturally occurring L-amino acids
DYRCEPLRLAPYCYYLSSIPLSKVEQVKVRGIXTLH

SEQ ID NO: 4833 - protein, 60 aa, Homo sapiens
  SITE (3): Xaa equals any of the naturally occurring L-amino acids
  SITE (7): Xaa equals any of the naturally occurring L-amino acids
TGXTVCXDGLQHPASGAALPFQKRPGSGLDDGGKRAGSGGRLIANSDARTENLRGPRRLR

SEQ ID NO: 4834 - protein, 39 aa, Homo sapiens
  SITE (9): Xaa equals any of the naturally occurring L-amino acids
KCFLLSPQXAKIQNSVNSMLLYEVVFFKAHLFMTSLHSQ

SEQ ID NO: 4835 - protein, 56 aa, Homo sapiens
NIHMHCFNKQCFPRPPHRVDALERKARLFSEVLHLLGQCAHAREEQCMASLRSTAM

SEQ ID NO: 4836 - protein, 73 aa, Homo sapiens
GVATCPAAFCARLASLQATPSMGAHGAAVGSGGASTLMVPPWESWPSILPNQMTSVPPPPGSLCRSSFWVLVH

SEQ ID NO: 4837 - protein, 56 aa, Homo sapiens
GVGNGAGLNLKRTKGESGLWFSPLQTHYLCGRGLRTRGRKVDVEGGSIERSTCTYV

SEQ ID NO: 4838 - protein, 81 aa, Homo sapiens
  SITE (38): Xaa equals any of the naturally occurring L-amino acids
  SITE (39): Xaa equals any of the naturally occurring L-amino acids
  SITE (50): Xaa equals any of the naturally occurring L-amino acids
FRGGAERGQFHPSLARLGGGSSYTRSPSDHQGFLAESXXRCQPGTPQTRXSSRLRHKEPGGFYFLLINLVGSRAIVKAERY

SEQ ID NO: 4839 - protein, 131 aa, Homo sapiens
  SITE (128): Xaa equals any of the naturally occurring L-amino acids
REGHICRDESPVPCPAGGYANPHKQLEEEVKGLRGQLEACQREAAAAREEAEQALGERDQALAQLRAHMADMEAKYEEILHDSLDRLLAKLRAIKQQWDGAALRLHARHKEQQRQFGLTPPGSLRPPXPSL

SEQ ID NO: 4840 - protein, 41 aa, Homo sapiens
  SITE (23): Xaa equals any of the naturally occurring L-amino acids
IGGDKHGIFIKCNICWYLSILWXYLGWRSETVEIILIVKSR

SEQ ID NO: 4841 - protein, 64 aa, Homo sapiens
VIVMRIRMLRKCEAKLISDSDTVINIYEARFFGKPVIYVILLGHHNKSQVDTITCFADRETELG

SEQ ID NO: 4842 - protein, 37 aa, Homo sapiens
  SITE (2): Xaa equals any of the naturally occurring L-amino acids
GXERLSRQGAVAHACNPSTLGDQGGPITGSGDGDHPG

SEQ ID NO: 4843 - protein, 30 aa, Homo sapiens
  SITE (30): Xaa equals any of the naturally occurring L-amino acids
LYCSLLCVWLLVKFKKVKKKKKNLGGGPGX

SEQ ID NO: 4844 - protein, 67 aa, Homo sapiens
  SITE (44): Xaa equals any of the naturally occurring L-amino acids
  SITE (52): Xaa equals any of the naturally occurring L-amino acids
HGELRLYQKYKRIGRMWWRAPVVPATREAEAGEWRAPVKADLQXAEMVLLHXSLGYRARLCLKKKKK

SEQ ID NO: 4845 - protein, 104 aa, Homo sapiens
  SITE (91): Xaa equals any of the naturally occurring L-amino acids
GVWSTKCCEHFCCLQKPFFRGNLYVKGPNGCKALCLRRGRAEKGGDEVSGVGCAWPPLHPLSHSLRFFQGSLQNLHKDKVLRLGGCGLHAXYSQHFGEAKVEAD

SEQ ID NO: 4846 - protein, 65 aa, Homo sapiens
  SITE (60): Xaa equals any of the naturally occurring L-amino acids
SQHWEAKVDKLLEPRSSRLVWATGKALSLEKIQKISQVWWCTLLVPATQRAEVGGSPVPXRLRLQ

SEQ ID NO: 4847 - protein, 86 aa, Homo sapiens
GNISTWGGSVWYPAECVMGDGHGRNTHTEVAACHRGAAGVAMPGETRLPGLSVGPVGQQLGTSQAALQVGTPKGSLRIEEGKMGIP

SEQ ID NO: 4848 - protein, 32 aa, Homo sapiens
QRLAKCGGLPVILATWEAEVGGLLEHRSLRLQ

SEQ ID NO: 4849 - protein, 92 aa, Homo sapiens
TYFLSFFLFFPFFLLFLPSFFPFFFFFPFFVLSLLLPGLECNGRFSAHCNLRLPAQENGLNPGGGVCSEPRLCPLHPTMGDRRRRLRFKKKK

SEQ ID NO: 4850 - protein, 76 aa, Homo sapiens
IFFLKTSVLFLEKEEKKKEGRRRRKKGGRRKKKSQCDNTLSDFLKSAYMSKKLFFPFLKYGSILYRLSLHVYFSPH

SEQ ID NO: 4851 - protein, 29 aa, Homo sapiens
INSVSLFSCHSVKNVLIHKDKYLKRGNSF

SEQ ID NO: 4852 - protein, 79 aa, Homo sapiens
  SITE (65): Xaa equals any of the naturally occurring L-amino acids
LVCLGSFCFFSSGIVYFMTMCRGGDGASLTSPGGLWLRCTLALLPGTALTLLFALSWGCVTTGSXLLSTLGSLGFLKKE

SEQ ID NO: 4853 - protein, 66 aa, Homo sapiens
LGTQRQCNCLVRVVGLFARNLKFCFTPEPSHPSRNPNCLEQYSASIFCCSLYESSGTKGVQLTHIK

SEQ ID NO: 4854 - protein, 70 aa, Homo sapiens
LLLNRKQIGTFPESIELFLRMAGHEFVRSPRWGLHFNQVLCLATVSLWGTLRDLGSIVICFCSAICVKKK

SEQ ID NO: 4855 - protein, 79 aa, Homo sapiens
  SITE (59): Xaa equals any of the naturally occurring L-amino acids
  SITE (60): Xaa equals any of the naturally occurring L-amino acids
LLFVLDPVRVTLQCRWKESRTAERSSGPIFQDYCLLKTLESSENRFPSERGGRNKTTKXXSRGGPVPNSPYSESYYNSL

SEQ ID NO: 4856 - protein, 23 aa, Homo sapiens
GKSQDFLTTMYYNLKLVNKKITP

SEQ ID NO: 4857 - protein, 59 aa, Homo sapiens
  SITE (30): Xaa equals any of the naturally occurring L-amino acids
IEHLPFGQAFLGTGDSKYSHIPFLYRLARXKIHVLIHSTNICQSLLRLPDTILVLGMYQ

SEQ ID NO: 4858 - protein, 50 aa, Homo sapiens
WLMLLNIFYVFICHLYYLFNEMSVHVFCIFSNWVYYYYLLWSLERVLYVF

SEQ ID NO: 4859 - protein, 113 aa, Homo sapiens
  SITE (2): Xaa equals any of the naturally occurring L-amino acids
  SITE (98): Xaa equals any of the naturally occurring L-amino acids
  SITE (108): Xaa equals any of the naturally occurring L-amino acids
  SITE (110): Xaa equals any of the naturally occurring L-amino acids
FXAACASPFLFCHVLLVHTPDEPQMVGPDVIPLPHIYGARIKGVEVFCPLDPPPPYEAVVSQMDQEQGSSFQMSEGSEAAVIPLDLGCTQVTQDGDIXNIPCRRKLHXPXLPS

SEQ ID NO: 4860 - protein, 59 aa, Homo sapiens
TRLQAGSHCRSDKLWVVNAEKATRVKLHLKKKKKKSCIRIWPHPFVCVLLRIALATSIL

SEQ ID NO: 4861 - protein, 72 aa, Homo sapiens
  SITE (49): Xaa equals any of the naturally occurring L-amino acids
  SITE (58): Xaa equals any of the naturally occurring L-amino acids
  SITE (65): Xaa equals any of the naturally occurring L-amino acids
EVARQLVLPSLHKQGDGAQEAGFSSQNSGGRTPSPRGFPNSQRVVWQSXWALWCCLLXSSGSGWXWVLGVGY

SEQ ID NO: 4862 - protein, 41 aa, Homo sapiens
  SITE (19): Xaa equals any of the naturally occurring L-amino acids
VAEMEFEPCVMALGLKLLXLSQVGWERTICLTLTQFPSLVL

SEQ ID NO: 4863 - protein, 96 aa, Homo sapiens
GGNNSVSNKQNDTEMHSVVMKEPVYLCSKSGTIPLSRARSGGTRSASFCACRETKPHEPHPTLQEERGLDGKNLFCCFGKHTADLQTSCDGVSSDV

SEQ ID NO: 4864 - protein, 62 aa, Homo sapiens
  SITE (2): Xaa equals any of the naturally occurring L-amino acids
TXSITEHLELLAICCKVFVLKCLAYTPLTFKCPTFGLYVKKLEEKPCWSFDVECNNTSIKVF

SEQ ID NO: 4865 - protein, 41 aa, Homo sapiens
FSTINCGHTLSPCSFCNLKMVYKLPNPIGRLGSSLWFSLCA

SEQ ID NO: 4866 - protein, 31 aa, Homo sapiens
AVVLCSINKAVRQQLQRKFPFKTYIVTYLSL

SEQ ID NO: 4867 - protein, 75 aa, Homo sapiens
  SITE (58): Xaa equals any of the naturally occurring L-amino acids
VSHPMNTVFSIYGWKKSTCKWNCTVQTHAVQGLTVDCRILICISLISKELESFSYLLXVYMSSFMNYSFGCFTII

SEQ ID NO: 4868 - protein, 125 aa, Homo sapiens
HPLFPTILPTSTLCFIHLSLLPDPLSSLSPILGGTCSPVVMVLMTSSGQPPCPGIMACQHSLCPPNLRPRMRSCQHNIHPFEQMESGTLTQPSVLNNTAIIATCSVVNVNPQSQLNYFRPNILFL

SEQ ID NO: 4869 - protein, 82 aa, Homo sapiens
  SITE (78): Xaa equals any of the naturally occurring L-amino acids
QHGLWNQIDLDTNHMSNTCYLCDLGQPPPSASVFSSVKWGEFPSRLSGDLNEIIPGKCLEHSMWSLNRPWLTVLLLLXFCLN

SEQ ID NO: 4870 - protein, 112 aa, Homo sapiens
  SITE (53): Xaa equals any of the naturally occurring L-amino acids
QPWCLGSLEEARVSNNLQDALRTGTGAGTLDKVQIPGPFPLRVQKGRVRTCQXWLQDVDWTDLDSWELCAKVLGAKCHNAPRLSLAFTGDSPAASGQWESLAFGGMIQECKR

SEQ ID NO: 4871 - protein, 85 aa, Homo sapiens
PILRFIWLKRCQKFNQHSLLFTSPKSQNGGKLHNKWAAVFGSALQGTIFLNYLNFRSLLSSPTRDFGEIKRYLDIRKVIKLLPFH

SEQ ID NO: 4872 - protein, 59 aa, Homo sapiens
TPTPPQTHKNLENLDKIMKQWVLDFGQQQCRTVIPKRRETNKVSFTVTHPPWLFAWGTF

SEQ ID NO: 4873 - protein, 93 aa, Homo sapiens
AFNEPVLTDECILGTTNQRIQLRPREARVSTPGTPLAPPSSPGAGSLCLSQDAVRGLSFWKLLDLVPAPPSPTSAPGVYLSSYFLIWSSKEQI

SEQ ID NO: 4874 - protein, 50 aa, Homo sapiens
LTILKMQENDFHKVKIIDTLKGRDGVVIGEGHMSRLLGLWQCYFLIWGKR

SEQ ID NO: 4875 - protein, 61 aa, Homo sapiens
HCGIRGYGGCSAFKDKAEMFSKWLYQSILPPVPTTILSKSSLFSHFLLFASLPRINTMFLS

SEQ ID NO: 4876 - protein, 66 aa, Homo sapiens
  SITE (10): Xaa equals any of the naturally occurring L-amino acids
KCPLPSGSVXNVILYSKFRLFFGFILSCFFKVVYVIMSLLEESYSFPLISHSCPLPLCRTEYFILL

SEQ ID NO: 4877 - protein, 80 aa, Homo sapiens
  SITE (51): Xaa equals any of the naturally occurring L-amino acids
CKCSVTISCIVFHKTTLALNILYEQLSRATSLVYSNCNVRVLIYIATASFXYLISYGLMFRLFPTFLHLNSINKCGFSFL

SEQ ID NO: 4878 - protein, 110 aa, Homo sapiens
  SITE (20): Xaa equals any of the naturally occurring L-amino acids
CHFGTHRLTAEERNQAILDXKAAGWSELSERDAIYKEFSFHNFNQAFGFMSRVALQAEKMNHHPEWFNVYNKVQITLTSHDCGELTKKDVKLAKFIEKAAASVLFLPKYM

SEQ ID NO: 4879 - protein, 66 aa, Homo sapiens
VISAMLMSVRSGCFQLTLSFGGDSLYNCINHNIMFHFYLRCQETQGQIYSLNTATAIALSVRTTTF

SEQ ID NO: 4880 - protein, 109 aa, Homo sapiens
  SITE (12): Xaa equals any of the naturally occurring L-amino acids
CRYLVRNSRVRXTRPIQCKGCAVCQLYDLMYGVCCASVICKYYTILYQRLEHLWIWVSVGRSNHCPLILRGDCWHGCHKSQNSLCICCLSLHLNQYSRIFFYIFACGLH

SEQ ID NO: 4881 - protein, 46 aa, Homo sapiens
  SITE (12): Xaa equals any of the naturally occurring L-amino acids
MVKAIVPKVSPXRLPPDKSWFGGDVWSQIFSGKVAVWWILHPVPRL

SEQ ID NO: 4882 - protein, 51 aa, Homo sapiens
  SITE (2): Xaa equals any of the naturally occurring L-amino acids
  SITE (6): Xaa equals any of the naturally occurring L-amino acids
  SITE (8): Xaa equals any of the naturally occurring L-amino acids
  SITE (12): Xaa equals any of the naturally occurring L-amino acids
  SITE (15): Xaa equals any of the naturally occurring L-amino acids
  SITE (16): Xaa equals any of the naturally occurring L-amino acids
  SITE (41): Xaa equals any of the naturally occurring L-amino acids
AXWLNXLXRVRXYDXXKVHLSLTNGPLKTLSLFGKVTTVCXCVPSRESFIY

SEQ ID NO: 4883 - protein, 123 aa, Homo sapiens
  SITE (88): Xaa equals any of the naturally occurring L-amino acids
GHELVPLHFSHTVDSLKPGFKDSPKCSQAGRIHSEFGVEFSQINQPDSNCTLSIANRLYGTKTMAFHQQYLSCSEKWYQARLQTVDFXQSTEETRKTINAWVEIKLMEKSQISLERAQLTLHL

SEQ ID NO: 4884 - protein, 51 aa, Homo sapiens
HQSVTLIFKDGRIYHKIFCFLFTYMYFLGSFILKWKFVSFFLNEIKKRTHV

SEQ ID NO: 4885 - protein, 53 aa, Homo sapiens
  SITE (1): Xaa equals any of the naturally occurring L-amino acids
  SITE (41): Xaa equals any of the naturally occurring L-amino acids
XQNLQQGDLGRAATASLLCLQCLSSALCLISLNIAPAGQMXKFSWGSQIPDPV

SEQ ID NO: 4886 - protein, 67 aa, Homo sapiens
AAGITGRHHHAELIFVFLVETRFRHVAQATLELLASCDPPTSASQSAGITGVSTATSWNNLDIRVNK

SEQ ID NO: 4887 - protein, 65 aa, Homo sapiens
LQPNDNLFLQIFLEAEETDNEDEEEIEGDELEVHEEPEASHDTRGSWLPEEFEASEVPETEPEAG

SEQ ID NO: 4888 - protein, 136 aa, Homo sapiens
  SITE (36): Xaa equals any of the naturally occurring L-amino acids
GHKEESPKGPGGGPAASGGVAEGIANGRLVRHHGPXPSSLDKRKEIFSKDTLFKPLHSTLSVNSYHKSSLSLLKSHPKTPADTLPGRCEKLEPSLGTSAAQAMPASQRQQESGGNQEASFDYYNVSDDDDSEEGAN

SEQ ID NO: 4889 - protein, 80 aa, Homo sapiens
  SITE (70): Xaa equals any of the naturally occurring L-amino acids
  SITE (78): Xaa equals any of the naturally occurring L-amino acids
SCIRKNHRIGMNAATSTTATPIRRQLRPERNSTNRPESATRIDVPRSGCAATSSVGINISTSAMPVFFNXWRGPVTQXRP

SEQ ID NO: 4890 - protein, 164 aa, Homo sapiens
PMSSGLYPTTSYLMEPVLVLCVHLVHLRSCIYPAHAIDPALFASPVAASGHEKDRITGSQIHKPHQEDHPRNAWRLRSSLRLLHLETQDEDPAWGCQRFFACLTPMTPPGPYGSTQKQFSPTGGQLQPITISSLPQPLSSKHLLPVHPHPFPQTAFEKSLTYEL

SEQ ID NO: 4891 - protein, 53 aa, Homo sapiens
  SITE (23): Xaa equals any of the naturally occurring L-amino acids
YSKMHEFLCIHAKLKIPNSAFFXLHMTLQVCIIYVPDNILGDSYSYFLNYVKN

SEQ ID NO: 4892 - protein, 32 aa, Homo sapiens
HGQIKNSVTKHLYNHSQVEVAANNLDIAGRMT

SEQ ID NO: 4893 - protein, 54 aa, Homo sapiens
PIYLPKGLGLHISSDCGLRLQHMTFNSARTRGCLSIFPLKCIPIFPGVHLSFAF

SEQ ID NO: 4894 - protein, 119 aa, Homo sapiens
  SITE (63): Xaa equals any of the naturally occurring L-amino acids
  SITE (103): Xaa equals any of the naturally occurring L-amino acids
  SITE (106): Xaa equals any of the naturally occurring L-amino acids
MCLITLNNSYRMFESCSGFSGFCASPIEESHGALISSCNSRTMTDGLVTFRDVAIDFSQEEWXCLDPAQRDLYVDVMLENYSNLVSLDLESKTYETKKIFSEXDIXEINFSQWKDKSKT

SEQ ID NO: 4895 - protein, 57 aa, Homo sapiens
  SITE (28): Xaa equals any of the naturally occurring L-amino acids
LRTGKTHYRECWYACRYRSGIPGSTHAXGFNNLFNNTCLKCLSPVLEYKLREDKDHV

SEQ ID NO: 4896 - protein, 107 aa, Homo sapiens
EIDEEHVEDDGLSLDIQESEYMCNEETEIKEAQSYQNSPVSSATNQDAGYGSPFSESSDQLAHFKGSSSREEKEDPQCPDSVSYPQDSLAQIKAVYANLFSESCWSA

SEQ ID NO: 4897 - protein, 60 aa, Homo sapiens
AFRPKVAFLMDSACLSYKWSQIQSRNVSILGKENRKSSPTVGVYKNVSRLLNSQHSISFF

SEQ ID NO: 4898 - protein, 54 aa, Homo sapiens
  SITE (4): Xaa equals any of the naturally occurring L-amino acids
  SITE (21): Xaa equals any of the naturally occurring L-amino acids
  SITE (35): Xaa equals any of the naturally occurring L-amino acids
  SITE (37): Xaa equals any of the naturally occurring L-amino acids
  SITE (38): Xaa equals any of the naturally occurring L-amino acids
  SITE (41): Xaa equals any of the naturally occurring L-amino acids
  SITE (42): Xaa equals any of the naturally occurring L-amino acids
SRVXIFISVFQTNVVGHSLGXTWHSLRNSPGEKIXLXXRSXXSIPNPDYIQRPK

SEQ ID NO: 4899 - protein, 53 aa, Homo sapiens
  SITE (52): Xaa equals any of the naturally occurring L-amino acids
KLRKEKPKRNEQILRDLWDTVRCTNIGHDESLMSTIIFTHSHTCPRELKTCXT

SEQ ID NO: 4900 - protein, 53 aa, Homo sapiens
  SITE (40): Xaa equals any of the naturally occurring L-amino acids
  SITE (41): Xaa equals any of the naturally occurring L-amino acids
ILLIHYFLLCAFIWEILLVYLAIESLSLTRKCQPYESGKXXLSLSHMKNELNT

SEQ ID NO: 4901 - protein, 33 aa, Homo sapiens
  SITE (29): Xaa equals any of the naturally occurring L-amino acids
AALPEALRQECSPPNKLTSQLTFLSNASXKKCF

SEQ ID NO: 4902 - protein, 43 aa, Homo sapiens
  SITE (18): Xaa equals any of the naturally occurring L-amino acids
  SITE (40): Xaa equals any of the naturally occurring L-amino acids
YPKPVSWLGYYLIMLCSXMIILGEKWSPGVVCFGTVFKIXESS

SEQ ID NO: 4903 - protein, 288 aa, Homo sapiens
  SITE (50): Xaa equals any of the naturally occurring L-amino acids
  SITE (69): Xaa equals any of the naturally occurring L-amino acids
  SITE (162): Xaa equals any of the naturally occurring L-amino acids
NHSALFSEVLPGAPRQGWGLAGEAGPECGPAASPLPGCASACPGKRSNSXGPGRKPSVPPKVLLEILGXSRSSLAEGVLGARFPNPPIPSPRHVPPAVCSRVTGMVRFSGGIHEGLNAPVSVHLKSGAKPRWRWLAPIAPMVCLADVRHQREGLFPPLWQRXTKRYYCKCALSGSAPHDYSCVKTAASTRQPQGRDPFPLSPFAEPKLAPRRAPSRDPGWRKSWGIQRHGGWEPDEPPPPRTVPTVTPPVGPPVPKKKKKKKKKALHAPAEGSEEARDEGRVRGEVAS

SEQ ID NO: 4904 - protein, 43 aa, Homo sapiens
TKQINIQDCKITSSSTGLHVQAYLGDSVHLVPDHCNKVNTAIK

SEQ ID NO: 4905 - protein, 57 aa, Homo sapiens
  SITE (35): Xaa equals any of the naturally occurring L-amino acids
  SITE (49): Xaa equals any of the naturally occurring L-amino acids
  SITE (54): Xaa equals any of the naturally occurring L-amino acids
SVLEVLPFEIMFLSQLHFVIERGMFQITGKLIYVXTTLSALLYPQQYYXAVRTXNLY

SEQ ID NO: 4906 - protein, 135 aa, Homo sapiens
  SITE (27): Xaa equals any of the naturally occurring L-amino acids
  SITE (30): Xaa equals any of the naturally occurring L-amino acids
DQSKKSFFRNSKVTRISPSPTQNQSSXPPXCLTQETVLLNVHPEYKHCVFLQMLREAKEKEKQRLAQQLTMERTAHYGMLFDEYQGLSHLEALEILSNESESKVLLHYSFEMACLVMCCLNMKETGKSAIKRSHF

SEQ ID NO: 4907 - protein, 103 aa, Homo sapiens
  SITE (8): Xaa equals any of the naturally occurring L-amino acids
  SITE (31): Xaa equals any of the naturally occurring L-amino acids
RGVKTAAXSFIILSDDCIKPFMLCGIVNFSXIPIHLRAREILIHLTLVGIYVTYPNKNVIKQPQSHSVNLALNVASKISSLPYEWNVLPRKRSITMSSCVLHH

SEQ ID NO: 4908 - protein, 77 aa, Homo sapiens
  SITE (29): Xaa equals any of the naturally occurring L-amino acids
ALFEFKILIPSRDIFYRSVSETGSGYFLXRLYRASHHTQTLHSPRAPTHSTSCSPGGKRDSNMKCLKIHFTSFPCES

SEQ ID NO: 4909 - protein, 93 aa, Homo sapiens
  SITE (49): Xaa equals any of the naturally occurring L-amino acids
  SITE (61): Xaa equals any of the naturally occurring L-amino acids
  SITE (72): Xaa equals any of the naturally occurring L-amino acids
QIKKTPLHSCLYHLLPSLGLFSSFWPTANFVSQDSSPSPSHHWLCSTLXVIMSTFLEERGXNVDVGPTLSAXLVVLFVYLFVRVLLCLPGGSA

SEQ ID NO: 4910 - protein, 67 aa, Homo sapiens
LACSLVSFLLYPHFQGVQASYLENVRQCDVAAPPLGVYRWQHIFTQCVYECSEQAFIMAKNEIIHST

SEQ ID NO: 4911 - protein, 61 aa, Homo sapiens
  SITE (10): Xaa equals any of the naturally occurring L-amino acids
WGFARKGLHXCHNILISPGLGQGGNLQVPKEIVFIISISAKALMLQKESIMWSKSSCFGLF

SEQ ID NO: 4912 - protein, 99 aa, Homo sapiens
HASGHIEQFLTIQEGSKDPFWAGRRRLGEREKGDRREVLICPTRGVEIKVWGQVGSKAAQMHLRIWTQRVHLLFLLSGNLGHQLREKDLHKQTIKIEHT

SEQ ID NO: 4913 - protein, 61 aa, Homo sapiens
  SITE (44): Xaa equals any of the naturally occurring L-amino acids
  SITE (51): Xaa equals any of the naturally occurring L-amino acids
  SITE (61): Xaa equals any of the naturally occurring L-amino acids
CAVFSEWLLSLSNILLRFLKSFHGLIANFFLLLNDIPLYDVPQXHLSILLXKFRLLLSFAX

SEQ ID NO: 4914 - protein, 69 aa, Homo sapiens
  SITE (42): Xaa equals any of the naturally occurring L-amino acids
  SITE (47): Xaa equals any of the naturally occurring L-amino acids
  SITE (65): Xaa equals any of the naturally occurring L-amino acids
GHVVVRQLKVTQSLLATFRNFTKDKSLISRETGNGVQHLHKXLSAIXQTRRKENGKRKRSAFHNXANCF

SEQ ID NO: 4915 - protein, 70 aa, Homo sapiens
  SITE (53): Xaa equals any of the naturally occurring L-amino acids
VTKNKSNRSSTYWAALYILEQHYDHDSRQNLAESWCDKLSRAFIVTRREHNTXAQLKLWAHLGFLGRQEQ

SEQ ID NO: 4916 - protein, 51 aa, Homo sapiens
DIIFILSYWQRLKRFVNILNQQNSGETGTLRAEDKLVPSLWKGDFGQLTVK

SEQ ID NO: 4917 - protein, 49 aa, Homo sapiens
  SITE (20): Xaa equals any of the naturally occurring L-amino acids
LMLIPNTSKRFVKVQVFLHXESLCGYQNVNPSNLRQVLVNLENFGRVGR

SEQ ID NO: 4918 - protein, 82 aa, Homo sapiens
  SITE (35): Xaa equals any of the naturally occurring L-amino acids
  SITE (66): Xaa equals any of the naturally occurring L-amino acids
ELRTESPAIPSRPGMGNGVKEGPVRLHEDAEAVLXSSVSSKRDHRQVLSSLLSGALAGALAKTAVXPWTEPKSSSKCLQKDF

SEQ ID NO: 4919 - protein, 53 aa, Homo sapiens
ISLNTSCLLATSMLLFYVARRATMRHPQLPGVKTEGHSASPLGFEISESGNIE

SEQ ID NO: 4920 - protein, 40 aa, Homo sapiens
  SITE (5): Xaa equals any of the naturally occurring L-amino acids
  SITE (12): Xaa equals any of the naturally occurring L-amino acids
  SITE (17): Xaa equals any of the naturally occurring L-amino acids
  SITE (23): Xaa equals any of the naturally occurring L-amino acids
NLLIXPRLPPKXINSSXENIPLXAFKNIQSNRFPLISYEV

SEQ ID NO: 4921 - protein, 58 aa, Homo sapiens
AIKFQLSRAESISFIDSANINWASLLRPSIILGGDLAVNKIKQQKPFLHGACLQKKKK

SEQ ID NO: 4922 - protein, 66 aa, Homo sapiens
PTRPYLFIFEMEPHSVAQAGGCSEPITHHCTTAWVAERHSVSKKRKVTFYKYGAENVIFKFWKKFY

SEQ ID NO: 4923 - protein, 27 aa, Homo sapiens
  SITE (2): Xaa equals any of the naturally occurring L-amino acids
DXVLYRTISEDTFLHPFLSSNVLRAGL

SEQ ID NO: 4924 - protein, 81 aa, Homo sapiens
PLITHEALSPQGPLTSQHWFSDLVFAITLQGGWALAVTPVIPALWEAEVGGSLEPRCFETSQGNKARPLSLKKKKKTDAWV

SEQ ID NO: 4925 - protein, 62 aa, Homo sapiens
  SITE (19): Xaa equals any of the naturally occurring L-amino acids
  SITE (53): Xaa equals any of the naturally occurring L-amino acids
SKQEFPIVCSFRISCLMAXMAGCSFSILVWQNLEPIIVYLGNEYAIHRNFPVXNRILTGVEL

SEQ ID NO: 4926 - protein, 54 aa, Homo sapiens
QAVDSRVQAGKHKINLKHLKVPINKERHRKKTWACQKDIGVRINVFPMAKDRGI

SEQ ID NO: 4927 - protein, 78 aa, Homo sapiens
  SITE (50): Xaa equals any of the naturally occurring L-amino acids
  SITE (51): Xaa equals any of the naturally occurring L-amino acids
AGVQWCGLGSLQSPPPGLERFFCLSLPSSWDYRRLPPRPVDFCSFSRDGXXTMLARLILELLDLKWIRLPRPSKVAGD

SEQ ID NO: 4928 - protein, 135 aa, Homo sapiens
  SITE (118): Xaa equals any of the naturally occurring L-amino acids
  SITE (123): Xaa equals any of the naturally occurring L-amino acids
DPRVRRAETVSPPTVCTIPTVVGRNVIPRITTPHNPAQGQPHLNGMSNITKTVTPKRSHSPSIDGTPKRLKDVEKFIRLESTFKDPRTAEERKRKSVDAIGGESMPIPTIGYITQKEXTQLKXYQIPPSPVSSKQ

SEQ ID NO: 4929 - protein, 74 aa, Homo sapiens
FWCGVWKCFNCFNILSDWVNVIDHLLSLLYFGMSFDSSIKCFGNLSILLHYLEKNIAYSYRYRLFLESLKKIRQ

SEQ ID NO: 4930 - protein, 50 aa, Homo sapiens
SPARWLRVPSCPLPLLFLLVFTYPPSNFCPIISPLYCKLRRKLHNCRDEK

SEQ ID NO: 4931 - protein, 90 aa, Homo sapiens
ADFTLTITAWIERAIYIFVFISHLRSLQHGTLEQRFRDTKLINTFNIAKHLKDKCTHVAKKKKSVCNFDLSQGCEESFQVSEISVAKILF

SEQ ID NO: 4932 - protein, 89 aa, Homo sapiens
GAGLSASCVLSRVETGVDPGAPVPRHRLLQFLQTVPIPPRVARRDLEFAMLRAVSTWRFRLDPSCSGARLGGPRSLSFLASLGCGTKTI

SEQ ID NO: 4933 - protein, 86 aa, Homo sapiens
STRVHRCVLHRHLVILVESLRHHSGQLPPPLCPQVPAKTVLSPQLLKAHIIGRAFAGGGPGLGASLMDRAQVPFILTATCGFCSNC

SEQ ID NO: 4934 - protein, 72 aa, Homo sapiens
VSNLLKGVPIETRSGARPPLGPGPGCGASHSAPLPKAPLCVGAPLSFPPRQQKIRAEKRIRSAERELNPSRF

SEQ ID NO: 4935 - protein, 58 aa, Homo sapiens
GIVSMVHYYRSFSGCVKHRKPGRGGTGCSPEREASSWSCLLQLPFPVDDHALPSEEGE

SEQ ID NO: 4936 - protein, 44 aa, Homo sapiens
  SITE (43): Xaa equals any of the naturally occurring L-amino acids
  SITE (44): Xaa equals any of the naturally occurring L-amino acids
GIQRCLNTAQICYLPHKFTYMHLIKFYSDLIIQKKKKKKGGGXX

SEQ ID NO: 4937 - protein, 55 aa, Homo sapiens
GLTRVYFLLCNILKEATTFGKVYLLLLGPCLYTYLNKHIHLPEKKKKKKKKKKVD

SEQ ID NO: 4938 - protein, 68 aa, Homo sapiens
PPQVPGAEVSIHSVDQKASRMCQRKALELSFLLEKERRRKKKEEAGAGGRGAGGAGQGGGSLLPLRNS

SEQ ID NO: 4939 - protein, 55 aa, Homo sapiens
PFIISHWPALTPFRKGTQSSPSSQSHAIMVGVQLLTKVSSSVKSMPSGGLLVNKY

SEQ ID NO: 4940 - protein, 57 aa, Homo sapiens
  SITE (21): Xaa equals any of the naturally occurring L-amino acids
  SITE (43): Xaa equals any of the naturally occurring L-amino acids
  SITE (47): Xaa equals any of the naturally occurring L-amino acids
WVNLRFQSQKLQVVVTFLHMXNPKMWKCCQAGQISTLKYEGNXTKQXFSQGSMIEWR

SEQ ID NO: 4941 - protein, 50 aa, Homo sapiens
  SITE (35): Xaa equals any of the naturally occurring L-amino acids
  SITE (39): Xaa equals any of the naturally occurring L-amino acids
  SITE (41): Xaa equals any of the naturally occurring L-amino acids
  SITE (48): Xaa equals any of the naturally occurring L-amino acids
RPRAQTQKECQKVQLKKSFQKGMGRGPVPFGLKVXSVSXGXCVQGMTXSF

SEQ ID NO: 4942 - protein, 67 aa, Homo sapiens
HFERPRQAYCLGSGVQNQPGQHGETLSLLKYKKLAGRGSVHLWSQLLGRLRQENRLSPEGGGCSEPR

SEQ ID NO: 4943 - protein, 128 aa, Homo sapiens
ALISNNYHDMCYLCAYCCTAFFGFLTRATAEQKHFSLVWHLMNLINVCYGKSIPLYNFMGEAMCKSEFKKKEKKKPCAELLPTQYIIYMPEMAKAAICQGLQKHEEAGMEINTLVVCNVFKVGVFNDT

SEQ ID NO: 4944 - protein, 38 aa, Homo sapiens
EKKKGKQIYLYQFGIKRFVCIDFLLKIEEIGGGSFSEI

SEQ ID NO: 4945 - protein, 115 aa, Homo sapiens
  SITE (7): Xaa equals any of the naturally occurring L-amino acids
  SITE (13): Xaa equals any of the naturally occurring L-amino acids
  SITE (57): Xaa equals any of the naturally occurring L-amino acids
  SITE (85): Xaa equals any of the naturally occurring L-amino acids
  SITE (86): Xaa equals any of the naturally occurring L-amino acids
  SITE (87): Xaa equals any of the naturally occurring L-amino acids
  SITE (94): Xaa equals any of the naturally occurring L-amino acids
  SITE (95): Xaa equals any of the naturally occurring L-amino acids
  SITE (96): Xaa equals any of the naturally occurring L-amino acids
  SITE (102): Xaa equals any of the naturally occurring L-amino acids
  SITE (110): Xaa equals any of the naturally occurring L-amino acids
  SITE (111): Xaa equals any of the naturally occurring L-amino acids
  SITE (113): Xaa equals any of the naturally occurring L-amino acids
GNLGSLXPPPPGXKQFSCLSLPGSWDCRRAPPHPADFFVFLVEMGFHHVGQAGLKLXTSSDPPASASQSAGITGVSHCAQSGLFXXXFTFNLSXXXRMDCAXRVTPKSPXXKXRS

SEQ ID NO: 4946 - protein, 72 aa, Homo sapiens
  SITE (50): Xaa equals any of the naturally occurring L-amino acids
  SITE (53): Xaa equals any of the naturally occurring L-amino acids
STDVIISLEVWPSWKLCGSHTYNKTSVKKKKTLSVVLLRFLFTLLIFPFXWLXFLRPSLTLSLRLECMAKSQ

SEQ ID NO: 4947 - protein, 39 aa, Homo sapiens
  SITE (23): Xaa equals any of the naturally occurring L-amino acids
ACVEESLGRKKTLKFYSSMVVVXIYLVFNSEECIPSVIN

SEQ ID NO: 4948 - protein, 103 aa, Homo sapiens
  SITE (7): Xaa equals any of the naturally occurring L-amino acids
  SITE (74): Xaa equals any of the naturally occurring L-amino acids
  SITE (76): Xaa equals any of the naturally occurring L-amino acids
  SITE (88): Xaa equals any of the naturally occurring L-amino acids
DVPTQWXHEIAYQYGKNVGIAFQLIDDVLDFTSCSDQMGKPTSADLKLGLATGPVLFACQQFPEMNAMIMRRFXLXGDVDRARQYVLXSDGVHKQPTSPSSTA

SEQ ID NO: 4949 - protein, 48 aa, Homo sapiens
SRRYPCRYRSGIPGSTHASGFFFFCAYHEMSIKDLRLLKFNYISTPPA

SEQ ID NO: 4950 - protein, 84 aa, Homo sapiens
  SITE (75): Xaa equals any of the naturally occurring L-amino acids
  SITE (81): Xaa equals any of the naturally occurring L-amino acids
ILGLLAGLLFLLSYIFIFGDFIYSWGAVNFNFLKKIYKVTGSHCVSQTSLSNFWAEVIILPQPPKVLDVSHCTWXLLFNNXYNN

SEQ ID NO: 4951 - protein, 83 aa, Homo sapiens
  SITE (22): Xaa equals any of the naturally occurring L-amino acids
  SITE (36): Xaa equals any of the naturally occurring L-amino acids
  SITE (69): Xaa equals any of the naturally occurring L-amino acids
  SITE (79): Xaa equals any of the naturally occurring L-amino acids
  SITE (82): Xaa equals any of the naturally occurring L-amino acids
APLHHWHHFKIDNKGNAHHIPXHWRSLVGKLRLNNXPRYTQLISNPAPSISQHDIGIHLIRQSSTAYSXKNGELDQLQXLEXS

SEQ ID NO: 4952 - protein, 125 aa, Homo sapiens
  SITE (24): Xaa equals any of the naturally occurring L-amino acids
  SITE (30): Xaa equals any of the naturally occurring L-amino acids
  SITE (31): Xaa equals any of the naturally occurring L-amino acids
  SITE (79): Xaa equals any of the naturally occurring L-amino acids
  SITE (80): Xaa equals any of the naturally occurring L-amino acids
  SITE (115): Xaa equals any of the naturally occurring L-amino acids
TQHTLIPRTGTCAGFLITGPSCRXDCDICXXYTPEWFDVPALVQPKVKIVMCHWTQHLSDVTLLFGHHKFWVLSNIAGXXYPCYVTLQPMSCMLCHICSTMCHIRTSLHIAGGQXPSDVTFSGGL

SEQ ID NO: 4953 - protein, 79 aa, Homo sapiens
  SITE (22): Xaa equals any of the naturally occurring L-amino acids
  SITE (78): Xaa equals any of the naturally occurring L-amino acids
LCYISWLLTFFSIWVAVISTLXIHQEHIIKFKKLGWDYRRDTWHLGLRIRLYVKMYIVLHDSFSFFLLLKTVSYETLXN

SEQ ID NO: 4954 - protein, 80 aa, Homo sapiens
  SITE (22): Xaa equals any of the naturally occurring L-amino acids
  SITE (33): Xaa equals any of the naturally occurring L-amino acids
  SITE (39): Xaa equals any of the naturally occurring L-amino acids
EIYRWRLCPAFTGNFPAWANQXGDPYLPNFPAXKKGNPXSDTCCGHRWTLKALLSSISPVTKRQMLYDSNYMRYRKSSNS

SEQ ID NO: 4955 - protein, 202 aa, Homo sapiens
  SITE (43): Xaa equals any of the naturally occurring L-amino acids
FHFVAFILLTRHRTAFPASGKKRETDYSDGDPLDVHKRLPSSXGEDRAVMLGFAMMGFSVLMFFLLGTTILKPFMLSIQREESTCTAIHTDIMDDWLDCAFTCGVHCHGQGKYPCLQVFVNLSHPGQKALLHYNEEAVQINPKCFYTPKCHQDRNDLLNSALDIKEFFDHKNGTPFSCFYSPASQSEDVILIKKYDQKKKKK

SEQ ID NO: 4956 - protein, 67 aa, Homo sapiens
  SITE (13): Xaa equals any of the naturally occurring L-amino acids
RTRGLIASGSKCXWDICLSPLMLGEVEIDQHRYLRHAAVESLHVHQPNYNFISEFYVMNRLLSKLMY

SEQ ID NO: 4957 - protein, 128 aa, Homo sapiens
  SITE (78): Xaa equals any of the naturally occurring L-amino acids
  SITE (123): Xaa equals any of the naturally occurring L-amino acids
PSLELEPWDVLPAACGPVPTSRGGALIHLDCALVQSGLTPTRSGPFLRVLNFASPSVSGLFPPAGSAVAGGAVLLVPXRTLTFPGQKREMLSAFQRLFRVLFVIETVSEYGVLIFIYGWPFLXPLRCS

SEQ ID NO: 4958 - protein, 49 aa, Homo sapiens
  SITE (44): Xaa equals any of the naturally occurring L-amino acids
  SITE (49): Xaa equals any of the naturally occurring L-amino acids
FVNHWCKTLVIYDLHFLELIIENFMKPKQKSHIIFSVHYGNNSXCLCVX

SEQ ID NO: 4959 - protein, 47 aa, Homo sapiens
VGDNNSTYLTRLLRLNDVMHEKHSLVQTRYLLSKQLLIIIFSLPPGF

SEQ ID NO: 4960 - protein, 68 aa, Homo sapiens
  SITE (20): Xaa equals any of the naturally occurring L-amino acids
  SITE (27): Xaa equals any of the naturally occurring L-amino acids
  SITE (53): Xaa equals any of the naturally occurring L-amino acids
  SITE (56): Xaa equals any of the naturally occurring L-amino acids
  SITE (58): Xaa equals any of the naturally occurring L-amino acids
  SITE (59): Xaa equals any of the naturally occurring L-amino acids
  SITE (64): Xaa equals any of the naturally occurring L-amino acids
IREFLENRPLRKRKPPLWGXEWPVYVXGKSFQGLLWFLSWVSLLLSDVIAKAXNLXVXXREGFXSLWD

SEQ ID NO: 4961 - protein, 53 aa, Homo sapiens
SSLLLGVIYRKHCQLKSIRRGGWMEPGSGCLFVLATRRLLLTDNSSVNILMPQ

SEQ ID NO: 4962 - protein, 54 aa, Homo sapiens
RPTRPEQGARDPFSGSLDVISLSENWNHVNLNARCRISCQVSIVDFLNHTPSIG

SEQ ID NO: 4963 - protein, 65 aa, Homo sapiens
  SITE (3): Xaa equals any of the naturally occurring L-amino acids
  SITE (27): Xaa equals any of the naturally occurring L-amino acids
  SITE (56): Xaa equals any of the naturally occurring L-amino acids
TSXPLYPHFVYVICLVYITTYTIYTIXVYTLYVYSVCVCVCVLWWNITSSYVCVFXGGICCIKIK

SEQ ID NO: 4964 - protein, 51 aa, Homo sapiens
VLKSEQQFESLVEKHTKYIFCRGGGLALLPRLVLNSRFSCFGLPQVLGIQA

SEQ ID NO: 4965 - protein, 59 aa, Homo sapiens
  SITE (55): Xaa equals any of the naturally occurring L-amino acids
RIQHGYTGQRDDSRPRQEGANFHFATQNMLLPHLKLRNWPKCWGLQGVTRGTRPXFLIF

SEQ ID NO: 4966 - protein, 69 aa, Homo sapiens
LCMPHLHCSSGTLEVAWLGFYDPGQCDHWAKALEGHPVPGRAFGGIWNRAQGSSWLSPFLCQDITFQHI

SEQ ID NO: 4967 - protein, 211 aa, Homo sapiens
KYSHVILGDKVTKNSSGIISENQANNFVVPTLDENIFPKQISLRQAQQQQQQQQGSRPPGLSKSQVKLMDLEDCALWEGKPRTYITEERADVSLTTLLTAQASLKTKPIHTIIRKRAPPCNNDFCRLGCVCSSLALEKRQPAHCRRPDCMFGCTCLKRKVVLVKGGSKTKHFQRKAAHRDPVFYDTLGEEAREEEEGIREEEEQLKEKKKK

SEQ ID NO: 4968 - protein, 93 aa, Homo sapiens
  SITE (45): Xaa equals any of the naturally occurring L-amino acids
  SITE (46): Xaa equals any of the naturally occurring L-amino acids
  SITE (71): Xaa equals any of the naturally occurring L-amino acids
  SITE (73): Xaa equals any of the naturally occurring L-amino acids
  SITE (85): Xaa equals any of the naturally occurring L-amino acids
APMQCRFPGVYLSSGSTCLLGNTFLGCPMGPLDSACPQQSLFLPXXRAPLFFCCSSRKTQSPPEVCLHNPXSXNQRVFLKMGVWXSKKHLRKS

SEQ ID NO: 4969 - protein, 85 aa, Homo sapiens
  SITE (11): Xaa equals any of the naturally occurring L-amino acids
KTLCIYTYGSXGLSFHYTTGYDLHVVHINLQSDFPECSILLITSPLGLKRMTYVSVYSCVAFDVVLLYTEVCALRLCVWSVWKAW

SEQ ID NO: 4970 - protein, 97 aa, Homo sapiens
  SITE (84): Xaa equals any of the naturally occurring L-amino acids
  SITE (97): Xaa equals any of the naturally occurring L-amino acids
LFVGWGPFGGEQLSQFPWSAPFHLGPAWGRPLCAVMPKRKVTFQGVGDEEDDEDISVPKKKLADPVTGAGGPGSRFKDKHSLDXDEEEDDDEGPSKX

SEQ ID NO: 4971 - protein, 62 aa, Homo sapiens
LVSAFYMAIVNSVTLSEWESRPHLSHGFNDKAKSNLKIGGSKKEERIYIQKRLKSQFLARLN

SEQ ID NO: 4972 - protein, 44 aa, Homo sapiens
GSTHASGQFVEGVYSTVKSGGRDLQVNNVCPGITRGGSLTWKWG

SEQ ID NO: 4973 - protein, 143 aa, Homo sapiens
  SITE (97): Xaa equals any of the naturally occurring L-amino acids
  SITE (104): Xaa equals any of the naturally occurring L-amino acids
  SITE (108): Xaa equals any of the naturally occurring L-amino acids
  SITE (111): Xaa equals any of the naturally occurring L-amino acids
  SITE (114): Xaa equals any of the naturally occurring L-amino acids
  SITE (135): Xaa equals any of the naturally occurring L-amino acids
  SITE (142): Xaa equals any of the naturally occurring L-amino acids
DPRVRWVDVVVDDRLPTKNGELLFVHSAEAVNSGARCWRRPTPRSTAVMKHCRGAPPLRASRTSLGASRVVRAQEGPSQPVQDHPEGPAEGLPSSAXSIDIHQXGRYXRSXPRXQKAGERGHALLQFTGGRRKFXKLQGSLXE

SEQ ID NO: 4974 - protein, 39 aa, Homo sapiens
IVLYSLPVLWWNCHKEPPEMGTIKIFQARKHYSSFKTIS

SEQ ID NO: 4975 - protein, 125 aa, Homo sapiens
  SITE (119): Xaa equals any of the naturally occurring L-amino acids
  SITE (121): Xaa equals any of the naturally occurring L-amino acids
  SITE (123): Xaa equals any of the naturally occurring L-amino acids
RRGRLLGAVRDRSQVRRRRLAEAELFGFSALVPAMGLSASTPAVAVQTSNASDHQTASPPSGCPMHEGKMKGCPVSPEPSKPACENKPNAVPAHQDRAYEYVECPVNGALWLRIKENLXSXPXWK

SEQ ID NO: 4976 - protein, 115 aa, Homo sapiens
  SITE (92): Xaa equals any of the naturally occurring L-amino acids
MEVTFQGEYPSTLVSQGAEIIPSGTEHPVFPKAYELEKRTSPQVLGSILKSGTTSESGALSLEPSHIGDLQKADTSSQGALVFLSKDYEIEXQNPLASPTNTLLGSAKNRDTREA

SEQ ID NO: 4977 - protein, 126 aa, Homo sapiens
  SITE (119): Xaa equals any of the naturally occurring L-amino acids
  SITE (122): Xaa equals any of the naturally occurring L-amino acids
  SITE (123): Xaa equals any of the naturally occurring L-amino acids
VDPRVRAQTNCDDAEDAGSSSDGLGLLLAGPAAHAHVPAHAPVNPPPQVISFFWENCHERKDPVLLKSMTLEPDPIAYPGNVDYQRRAPGPCPPQQSSEGGINYREEMAISGSNSCMSXVRXXFED

SEQ ID NO: 4978 - protein, 78 aa, Homo sapiens
QPPRLSSPTAHPFPLFSPSLSLSLPHNFSLEKSLFSQRKEVRGTSPLPPPQNPPTFPVRRKQGSERAPGWPWSCCAAG

SEQ ID NO: 4979 - protein, 46 aa, Homo sapiens
  SITE (1): Xaa equals any of the naturally occurring L-amino acids
  SITE (27): Xaa equals any of the naturally occurring L-amino acids
XSGRENLDRGQQAVWVGTDTWTGTGWXRAAPRPVGKEKLRLASVET

SEQ ID NO: 4980 - protein, 74 aa, Homo sapiens
TQTLVYCVLAYLFSTLSLKLLEEKWLYFCHRKAFWYILALNYNFIQERLLQGWQRSVQRNVCYRGSCCSELAIR

SEQ ID NO: 4981 - protein, 65 aa, Homo sapiens
  SITE (7): Xaa equals any of the naturally occurring L-amino acids
RCRLDRXGGGLLEASQRNSGPLSGTSGNEGQRTRACSLRNFSRNSKSKPRWETCFMIISLQNSGS

SEQ ID NO: 4982 - protein, 67 aa, Homo sapiens
  SITE (7): Xaa equals any of the naturally occurring L-amino acids
  SITE (8): Xaa equals any of the naturally occurring L-amino acids
  SITE (66): Xaa equals any of the naturally occurring L-amino acids
NVISQFXXYHKNTDFASLAIQEYNGILKNMEHRAFHDVWNSSRAHDSNRSSIIVLLLTNGLSWRQXY

SEQ ID NO: 4983 - protein, 81 aa, Homo sapiens
  SITE (66): Xaa equals any of the naturally occurring L-amino acids
  SITE (68): Xaa equals any of the naturally occurring L-amino acids
SWWLTFQTTPSKVGGCPGSVGLEAGCCLVPVMKRGFFEPSSKLVFFLEIRMFNNCVTSCRAFAVFXCXGLQDTWWGEGQGG

SEQ ID NO: 4984 - protein, 64 aa, Homo sapiens
  SITE (2): Xaa equals any of the naturally occurring L-amino acids
  SITE (53): Xaa equals any of the naturally occurring L-amino acids
  SITE (56): Xaa equals any of the naturally occurring L-amino acids
NXKKIQKPKFWRQKQLQSMCGKAVNGFSRALQIVSFPNSNEPQNFELGPSETXPAXTRDPGSQA

SEQ ID NO: 4985 - protein, 66 aa, Homo sapiens
  SITE (15): Xaa equals any of the naturally occurring L-amino acids
  SITE (45): Xaa equals any of the naturally occurring L-amino acids
  SITE (46): Xaa equals any of the naturally occurring L-amino acids
LLHNGVGWSVAWSRXKNRRNPTPLEDTSTSTPGLAVSVRAPLLAXXSHPESNGTSDTCLSKTMLVP

SEQ ID NO: 4986 - protein, 87 aa, Homo sapiens
VDPRVRLGIGKNVVCEKAATSVDAFRMVTASRYYPQLMSLVGNVLRFLPAFVRMKQLIADTDVGCSNDLRCPHLLRQPAQPQLWLDL

SEQ ID NO: 4987 - protein, 72 aa, Homo sapiens
GRPTRPKTSDGFSFSSESEISFSTQSDTLAPAKYKYGAPLQTSDSFLRFPSPLTSSLCTDNNPGSISGEPSC

SEQ ID NO: 4988 - protein, 64 aa, Homo sapiens
  SITE (5): Xaa equals any of the naturally occurring L-amino acids
GRARXMKRHRTLSSSDSSDESLPLPLLLAQCIGANPEFQMNTRSLRRYSERPHQCHETSRFSSH

SEQ ID NO: 4989 - protein, 67 aa, Homo sapiens
  SITE (24): Xaa equals any of the naturally occurring L-amino acids
GSTHASAERKVTEAVQRETHREQXAGSHPVSGERLATRPAATLSGGLLKPQSQSQAPHGSQLCPGRS

SEQ ID NO: 4990 - protein, 105 aa, Homo sapiens
  SITE (86): Xaa equals any of the naturally occurring L-amino acids
STHASAHASGTEARAKRKQLLLFTSVILGSLALSRGAVHSSEPKVSVAENSPAKLLCSYSGFSSPRVEWKFAQGDITSLVCYNNKXTASYEDRVTFSHSGIISIL

SEQ ID NO: 4991 - protein, 35 aa, Homo sapiens
VAISIKIQNILRLGPELPLLENKEMDPRIFVAPPF

SEQ ID NO: 4992 - protein, 59 aa, Homo sapiens
  SITE (12): Xaa equals any of the naturally occurring L-amino acids
KYCLLIQLAPQXPLNVQVTEYANTTKITTCLRIAMCQTFTGKKKKKKKKKKGRGADAWV

SEQ ID NO: 4993 - protein, 22 aa, Homo sapiens
RPTRPLRPREMKRLTQGPAACE

SEQ ID NO: 4994 - protein, 82 aa, Homo sapiens
  SITE (56): Xaa equals any of the naturally occurring L-amino acids
  SITE (62): Xaa equals any of the naturally occurring L-amino acids
  SITE (65): Xaa equals any of the naturally occurring L-amino acids
  SITE (76): Xaa equals any of the naturally occurring L-amino acids
AQHSHGAYATFLTVLVSRQPHVPKYSPAEWPYNHLPSSPTGSPGHTFPTDVNCFTXVPFWQXFSXHFQLFCQQAFXGGWNLG

SEQ ID NO: 4995 - protein, 51 aa, Homo sapiens
  SITE (42): Xaa equals any of the naturally occurring L-amino acids
PTRPLEHHDLHDSGGVDRDGERRGFPCARARLPRPGRLPHLXRLVYRPARP

SEQ ID NO: 4996 - protein, 91 aa, Homo sapiens
SDLGMFGREVSVGVFFFYKSIMQRGSLFKGILKLLNKAILWLFLTTICGYFVYIVIIKTHILLTAAPPFLQARSPGCPMSPLTEQGLRGQP

SEQ ID NO: 4997 - protein, 123 aa, Homo sapiens
  SITE (9): Xaa equals any of the naturally occurring L-amino acids
  SITE (64): Xaa equals any of the naturally occurring L-amino acids
GWLPLLISXPESGLQPYSFCSLLSPSFPSPLSIHPSILPSFLSLSFFHSSFSFFPFFLSFSPSXKGAKSSVWIPAFFKDGKKIKVFLFYFVLSFKISSQVLFPLFLFFCWSGYRAHCLKTSLV

SEQ ID NO: 4998 - protein, 51 aa, Homo sapiens
APGPSAACWHELLDKKVLNQEEMERVRCENATTMDKARALIDSIIRKGPQA

SEQ ID NO: 4999 - protein, 89 aa, Homo sapiens
  SITE (81): Xaa equals any of the naturally occurring L-amino acids
DPRVRSEQPLRNLLLFTSEELTERCFIIENTNTITAVEETNQTDGEHKKYSSQTSQDSGNYSNEDESTGKQIQCKSSCMQXNRVTRKKF

SEQ ID NO: 5000 - protein, 119 aa, Homo sapiens
  SITE (114): Xaa equals any of the naturally occurring L-amino acids
  SITE (115): Xaa equals any of the naturally occurring L-amino acids
DPRVRPNATKSSYNPGDVVYFVCRPGYKPVVPSLPMFSVCQDNNMWTPLQEACTAKQCQHPREPINGQIVAVNGSFSYGSQIHYSCNEGYRLVGKRILYCELSTNDEKKWTGVXXPPPV

SEQ ID NO: 5001 - protein, 153 aa, Homo sapiens
  SITE (1): Xaa equals any of the naturally occurring L-amino acids
  SITE (2): Xaa equals any of the naturally occurring L-amino acids
  SITE (4): Xaa equals any of the naturally occurring L-amino acids
  SITE (9): Xaa equals any of the naturally occurring L-amino acids
  SITE (132): Xaa equals any of the naturally occurring L-amino acids
  SITE (149): Xaa equals any of the naturally occurring L-amino acids
  SITE (150): Xaa equals any of the naturally occurring L-amino acids
XXRXHACRXRSGIPGSTHASAHASAHGEGVQSLDQGTEEQLSQDPGAGTQAFQEQALPVLQTGPGLPSVNTRDQEMAAGFLTTGPQGLGTFKDMALAFPEEEWRHVTPAQIDCFGEYVDPETVGSQLQALGXRKRRLKPSIQTSRGRLXXWTS

SEQ ID NO: 5002 - protein, 124 aa, Homo sapiens
GSTHASGSPPLPTPALRWTKDFVPLGNGPTLSLSSLTFDSAGTYVCEASMPTVPLLSRTQSFKLLVQGPPQLSAEETQPQTEGGWREGDEVRLVCSARGYPEPKLSWSQLGGSPAEPASLGRAG

SEQ ID NO: 5003 - protein, 48 aa, Homo sapiens
FSSVKISLFKGYRISWKILLFKCIGVVKGNSDVNKCVLFQKKKKKKGG

SEQ ID NO: 5004 - protein, 56 aa, Homo sapiens
  SITE (53): Xaa equals any of the naturally occurring L-amino acids
TREKPYKCEASDKSCDASDKSCSQSSDITPHKRIHTRAKSYKCSNCERVSSRXVHL

SEQ ID NO: 5005 - protein, 131 aa, Homo sapiens
  SITE (81): Xaa equals any of the naturally occurring L-amino acids
  SITE (115): Xaa equals any of the naturally occurring L-amino acids
  SITE (125): Xaa equals any of the naturally occurring L-amino acids
  SITE (129): Xaa equals any of the naturally occurring L-amino acids
DPRVRNNLGAAVLRIPVLYGEVEKLEESAVTVMFDKVQFSNKSANMDHWQQRFPTHVKDVATVCRQLAEKRMLDPSIKGTXHWSGNEQMTKYEMACAIADAFNLPSSHLRPITDXPVLGAQRPRXAQLXCT

SEQ ID NO: 5006 - protein, 132 aa, Homo sapiens
  SITE (93): Xaa equals any of the naturally occurring L-amino acids
  SITE (99): Xaa equals any of the naturally occurring L-amino acids
  SITE (114): Xaa equals any of the naturally occurring L-amino acids
  SITE (116): Xaa equals any of the naturally occurring L-amino acids
RPTRPGRKNRGGSGEASAVATGTPVPNLGIMWELEETPAKHLDKFIENRLLPDTNFRRQIKDPVHIISTFLKEECFQGAPHPVRVTKVIKGGXSGKGTXLRGRSDADLVVFLSXLXSFQEQLDQKSRVHLGN

SEQ ID NO: 5007 - protein, 241 aa, Homo sapiens
  SITE (8): Xaa equals any of the naturally occurring L-amino acids
  SITE (124): Xaa equals any of the naturally occurring L-amino acids
  SITE (234): Xaa equals any of the naturally occurring L-amino acids
  SITE (237): Xaa equals any of the naturally occurring L-amino acids
SSWPGTPXCGNIVTFAQFLFIAVEGFLFEADLGRKRPAIPIRYYAVMVTMFFTVSVVNNYALNLNIAMPLHMIFRSGSLIANMILGIIILKKRYSIFKYTSIALVSVGIFICTFMSAKQVTSQXSSSENDGFQAFLRWLLGIGALTFALLMSARMGIFQETLYKQFGKHSKEALFYNHALPLPGFIFLASDIYDHAVLFNKSELYQVPVIGVTVPIMWFYLLMNVITQDQCIRXSTXSPRN

SEQ ID NO: 5008 - protein, 175 aa, Homo sapiens
PALIRLTIGKAGTPAGTGPEFPGRPTRPAVLWLWSSHNKVNNRLAGAASEDPHFPKVQWPPRELCAACHNELRGTAVWDLNNTLRFLKTHFSPSNVVLDTHSSRPGPRVAAQRMAARNVTLSPAKAAMVVGLGTESPGTAVPDIVVERLGASQPQDVLIGFGATTASQSRGPPST

SEQ ID NO: 5009 - protein, 47 aa, Homo sapiens
FLLCMMYLLHHAGHCSRYRSYALFGPQLQVTNSPIRIHAHRDQHDTT

SEQ ID NO: 5010 - protein, 73 aa, Homo sapiens
IKYSCLEGMISPQKIGKHLTHFLHIPNFYLFHVIVMGSSYRAASSVFPSCVRYWQQSQRCNVGYMKFISKWRP

SEQ ID NO: 5011 - protein, 67 aa, Homo sapiens
  SITE (40): Xaa equals any of the naturally occurring L-amino acids
FPLSNQTINELNIIGSCRMVRLSQDPTLFDFLSRCSTTLXSILFLLHILFLLVSGAMKSIKKKKKVD

SEQ ID NO: 5012 - protein, 55 aa, Homo sapiens
  SITE (55): Xaa equals any of the naturally occurring L-amino acids
ITKIIVINYRNNLAIITYLYTVEKDTVCERSHSQCVSVVSYLFTFKISVFLSFLX

SEQ ID NO: 5013 - protein, 91 aa, Homo sapiens
  SITE (86): Xaa equals any of the naturally occurring L-amino acids
RRGLKMNEDVEWKKSQKNTYSRFIYIKISIKQIKPNNILCGRAIHKRLKQNCKERSDNRIQDSGPFLGEERVVIRKGHIGGVVIFXFLTWV

SEQ ID NO: 5014 - protein, 50 aa, Homo sapiens
  SITE (41): Xaa equals any of the naturally occurring L-amino acids
  SITE (47): Xaa equals any of the naturally occurring L-amino acids
VHQFLIQREAEYSNSRSLCVLTGNTIFERTWHLKCPIKSSXERGSLXMCN

SEQ ID NO: 5015 - protein, 44 aa, Homo sapiens
  SITE (7): Xaa equals any of the naturally occurring L-amino acids
  SITE (30): Xaa equals any of the naturally occurring L-amino acids
  SITE (42): Xaa equals any of the naturally occurring L-amino acids
VLSYVSXVMVLTYIFIQMLQSQTEILKKIXTKMYLCTLGLKXAH

SEQ ID NO: 5016 - protein, 79 aa, Homo sapiens
  SITE (15): Xaa equals any of the naturally occurring L-amino acids
NNRCLDEFYKQGNSXEEGCVAKYTLRLQTYGFILSISLIFTGPKLRLKLVSQLWVWQCTLVRRSPALKSGLCLNHSSAF

SEQ ID NO: 5017 - protein, 164 aa, Homo sapiens
  SITE (114): Xaa equals any of the naturally occurring L-amino acids
FWLQGCLVFNLRLLPPEERWPGRGRVPVQLAPVSRCSCRRRSLIHQDSPLSAHRFAGLPASGFTVRAVGATRAGLGRQGRQPGSPGQPHTCTRPARRRGPPAGRHGGRRPLPPXCPPWPKPCWSVEAVGSSDPGIPSVPDPSPGPSPTQHTHSFIHACIPKADT

SEQ ID NO: 5018 - protein, 56 aa, Homo sapiens
TGFGHFIKLQACFMLPSKPKNWFKSQNGQIKIISGLFHFKQIYIHAMMMVCVSLVL

SEQ ID NO: 5019 - protein, 90 aa, Homo sapiens
GSGDMSSRGTKESPQIPPGLRRSVTCMVAPWKAQALRKPALNIPFTMHRNGVFSFLEGLTASLCAKVPSHPMVILLPIVILIPGQPCLKK

SEQ ID NO: 5020 - protein, 187 aa, Homo sapiens
HGDPFTRKPLFIIVDSSNSVAYKNFTNLFGQPLVCLLSPTAYPKALQDQSQRGSLFTLFLNNPLMAFLFVSGLSSMRRGLWEKCQEYLRKINRDIAQLLTHSRSIDQAFLQFFGDEFLRLLLTRFIFCSATMRMHKIFRETRNYPESYPQLPRDETVENPHLQKHILELASILDVRNVFFENTIDDY

SEQ ID NO: 5021 - protein, 57 aa, Homo sapiens
  SITE (10): Xaa equals any of the naturally occurring L-amino acids
  SITE (23): Xaa equals any of the naturally occurring L-amino acids
  SITE (34): Xaa equals any of the naturally occurring L-amino acids
  SITE (38): Xaa equals any of the naturally occurring L-amino acids
TRVLLFGISXFRALHLTRWQFPXYNFSRANTLEXLFMXLFFLRACKQYASKFFSSWL

SEQ ID NO: 5022 - protein, 55 aa, Homo sapiens
  SITE (15): Xaa equals any of the naturally occurring L-amino acids
  SITE (42): Xaa equals any of the naturally occurring L-amino acids
LYILETDSSKLLDYXASFKHHWALYFSLSVLFIMEYNRLYLXQKLGLRWKPTCDF

SEQ ID NO: 5023 - protein, 75 aa, Homo sapiens
  SITE (24): Xaa equals any of the naturally occurring L-amino acids
  SITE (64): Xaa equals any of the naturally occurring L-amino acids
  SITE (69): Xaa equals any of the naturally occurring L-amino acids
  SITE (71): Xaa equals any of the naturally occurring L-amino acids
KGKKSWRKNKTYTETIEDQLQTSXILCQKCFKNLHMNTEELWSIGMINNRRINLIKLLLGVDGXKLKGXYXGLPH

SEQ ID NO: 5024 - protein, 45 aa, Homo sapiens
RMSQMRVLTPFNIVRIGNPTHHSCFYLLSQNGHCVFPCCICGYWP

SEQ ID NO: 5025 - protein, 86 aa, Homo sapiens
  SITE (59): Xaa equals any of the naturally occurring L-amino acids
VLKYRLLMLFQWLNDVKVSIFVLLLSPHAHNVSAEIVALTFAFEAGRRNLEVLTSCRCXFLSKRQASPEFPPVNLCLHLGWGVKGS

SEQ ID NO: 5026 - protein, 47 aa, Homo sapiens
  SITE (9): Xaa equals any of the naturally occurring L-amino acids
  SITE (11): Xaa equals any of the naturally occurring L-amino acids
  SITE (35): Xaa equals any of the naturally occurring L-amino acids
  SITE (40): Xaa equals any of the naturally occurring L-amino acids
  SITE (42): Xaa equals any of the naturally occurring L-amino acids
ARQFDKMEXDXLLVTKKHFLKFIPWNTGLTIGREXIIIKXTXGDQEG

SEQ ID NO: 5027 - protein, 50 aa, Homo sapiens
QSHFLLMYLQVKEYVKTIEYCATLMCIYKIALFYNKVICVDSVMKEIFSP

SEQ ID NO: 5028 - protein, 177 aa, Homo sapiens
REQKLELHRGGGRSRTSGSPGLQEFGTSWMAPEVIKSSLFSKGSDIWSYGVLLWELLTGEVPYRGIDGLAVAYGVAVNKLTLPIPSTCPEPFAKLMKECWQQDPHIRPSFALILEQLTAIEGAVMTEMPQESFHSMQDDWKLEIQQMFDELRTKEKDHKTNRGDWRLCRGLGCHLSE

SEQ ID NO: 5029 - protein, 55 aa, Homo sapiens
PSLWVCASVIHTQHTSWLSAAAAMCPLNGEGQKELWLCAWGGGLPNGMDDAMFPV

SEQ ID NO: 5030 - protein, 192 aa, Homo sapiens
  SITE (17): Xaa equals any of the naturally occurring L-amino acids
  SITE (111): Xaa equals any of the naturally occurring L-amino acids
GLKARYQTMSILPMELXKEFAEYVTNHYRMLCAVLEPALNVKGKEEVASALVHILQSTGKAKDFLSDMAMSEVDRFMEREHLIFRENTLATKAIEEYMRLIGQKYLKDAIXEFIRALYESEENCEVDPIKCTASSLAEHQANLRMCCELALCKVVNSHCLPSCSCGPSFPVSLTPVSTPSPPTTPLSMFPGS

SEQ ID NO: 5031 - protein, 59 aa, Homo sapiens
LDQIIRKLVDALGRQSTLGLIKSLSSIKRLGEVLWSLSNAYERQIKTNCETWKLDEFQY

SEQ ID NO: 5032 - protein, 74 aa, Homo sapiens
  SITE (60): Xaa equals any of the naturally occurring L-amino acids
LCDNGYRCLMSLCLSFCVYATCGTTGEVEGIQDHRIGNWKPGLSFSTMSIRLHLIFKISXKILSKNKICKERSI

SEQ ID NO: 5033 - protein, 95 aa, Homo sapiens
  SITE (10): Xaa equals any of the naturally occurring L-amino acids
CWKGASLLIXNLRWTSHGCRWLLTYKGDCDQLLRTVWLYFLQRPDLVVCQSSPPLILRGYEPRPPNGCLKSQIVPNPIYAMFFSYTCILAIKFNL

SEQ ID NO: 5034 - protein, 76 aa, Homo sapiens
  SITE (8): Xaa equals any of the naturally occurring L-amino acids
  SITE (23): Xaa equals any of the naturally occurring L-amino acids
KGHLFAVXELKKKKGRATPCSTXTRNMLVRQVKFFTTLSMSRNDQKALRVLFGGLQIKQVRSSQIQNPRIMRMDCT

SEQ ID NO: 5035 - protein, 37 aa, Homo sapiens
  SITE (20): Xaa equals any of the naturally occurring L-amino acids
SVGLSFFISFAHYYHTISLXVKNNFEEAMPDKSGIGE

SEQ ID NO: 5036 - protein, 45 aa, Homo sapiens
  SITE (17): Xaa equals any of the naturally occurring L-amino acids
  SITE (18): Xaa equals any of the naturally occurring L-amino acids
  SITE (33): Xaa equals any of the naturally occurring L-amino acids
FCSSLLESLGAGILNAXXLNTQFVNKFPVSLLXASLHILSIFVKG

SEQ ID NO: 5037 - protein, 59 aa, Homo sapiens
  SITE (11): Xaa equals any of the naturally occurring L-amino acids
  SITE (46): Xaa equals any of the naturally occurring L-amino acids
LSKQNRAFSYXFHSKLPEPQLCLIFSGARGSHIAFTVCLQRATELXLMHFMLQPPVAKL

SEQ ID NO: 5038 - protein, 175 aa, Homo sapiens
  SITE (101): Xaa equals any of the naturally occurring L-amino acids
  SITE (154): Xaa equals any of the naturally occurring L-amino acids
  SITE (161): Xaa equals any of the naturally occurring L-amino acids
IVLLLEGSLVWAPREDPVLLQGIRVSIAQWPALTFTPLVDKLGLGSVVPVEYLLDRELRFLSDANGLHLFQMGTDSQNQILLEHAALRETVNALISDQKLXEIFSRGPYSVQGHRVKIYQPEGEEGWLYGVVSHQDSITRLMEVSVTESGEIKXVDPRLIXVMLMDNSTPQSEVQ

SEQ ID NO: 5039 - protein, 107 aa, Homo sapiens
  SITE (24): Xaa equals any of the naturally occurring L-amino acids
  SITE (58): Xaa equals any of the naturally occurring L-amino acids
  SITE (93): Xaa equals any of the naturally occurring L-amino acids
  SITE (99): Xaa equals any of the naturally occurring L-amino acids
  SITE (102): Xaa equals any of the naturally occurring L-amino acids
IICKEVAWTGHRWWLMPIILPRCXDYRREPPRQAEKFFYEVKFVCDEMHRSEVYSLIXFNKCIYSGNLSQDLEHFHHSRKFPPVPSSGLHPTXNRCLKXILXKHFCL

SEQ ID NO: 5040 - protein, 51 aa, Homo sapiens
  SITE (19): Xaa equals any of the naturally occurring L-amino acids
TRDPPKVSRVIFSIPLLQXSIGYGAKLDLMLSVVNNLNSCHLFKACAECFI

SEQ ID NO: 5041 - protein, 51 aa, Homo sapiens
SLCCSRVDCIFLSQSICVASRQSSKNFNLGRSGVLFEFSVFFYASEGEGWR

SEQ ID NO: 5042 - protein, 50 aa, Homo sapiens
  SITE (27): Xaa equals any of the naturally occurring L-amino acids
LLLFPVLSFPPANLAKCFGAVETAFVXTLLDPSLPSCPSSHQDLMIGWAW

SEQ ID NO: 5043 - protein, 66 aa, Homo sapiens
DYRRARPDIIYINQLLRYNFESQTWEMLKSPLDIIGIPKFITTSLQGTWERPLVISYHNSRLNLCR

SEQ ID NO: 5044 - protein, 46 aa, Homo sapiens
TRVFSWKTLPSLPEFVSILSIVGTSPFLWAASISPSTQQIREGEEK

SEQ ID NO: 5045 - protein, 67 aa, Homo sapiens
  SITE (15): Xaa equals any of the naturally occurring L-amino acids
HFCYFACKLVYCVHXVASHGTISNTCSLSVFHTVTISTRNSRCPKLKVKILKYVGSSHACAGSKPCC

SEQ ID NO: 5046 - protein, 67 aa, Homo sapiens
QACLLSMHAAGSLHKYSELPLFPVEYVYVASQINVNHYSPSPPWKPTFRVSAGSYASQSVRMATCRL

SEQ ID NO: 5047 - protein, 47 aa, Homo sapiens
  SITE (21): Xaa equals any of the naturally occurring L-amino acids
VTFCTGDRDSVLMWHENKPGXPSLFFSSSSFTTYWRCYFGKAFENVK

SEQ ID NO: 5048 - protein, 56 aa, Homo sapiens
  SITE (32): Xaa equals any of the naturally occurring L-amino acids
RLGWTVVSKTKLFWYLLLGQSPACHECVCAGXDVTGSSAGHPHLGPSQVCVSGGGG

SEQ ID NO: 5049 - protein, 69 aa, Homo sapiens
  SITE (18): Xaa equals any of the naturally occurring L-amino acids
IGRRLEILSFNPCVVQMXDVRSGKFSGLRDAHGVHRVARCSGRVDGLLPQSSFHPNISCAFVYVCQGSL

SEQ ID NO: 5050 - protein, 46 aa, Homo sapiens
SVKILPSFILLYTCVVCQDPKNMYLKEGLTRGFSGALSDHILFVSK

SEQ ID NO: 5051 - protein, 109 aa, Homo sapiens
LCMRESVSSLASDFSFSGSFNLLIYLLLPAPGPHFFFLLEKRVLLCCPIWSRTPDLKLSSCLGLGITGMNHCLAHILFTVVFDSWQSKSLCNPLPIPVIIFQKHLLIVF

SEQ ID NO: 5052 - protein, 52 aa, Homo sapiens
  SITE (17): Xaa equals any of the naturally occurring L-amino acids
  SITE (23): Xaa equals any of the naturally occurring L-amino acids
  SITE (32): Xaa equals any of the naturally occurring L-amino acids
VELGHQLEKVRGGAKEXETCGIXARFQAGTGXMAEASNIENRVRGAFLSGEG

SEQ ID NO: 5053 - protein, 84 aa, Homo sapiens
  SITE (60): Xaa equals any of the naturally occurring L-amino acids
GLAFQARFAWFQDSCFVARALLEARVLLNSRSIVLCLQSGQILNRNERISNNVSLCKSMXLLHFSFLICKRGTKINTCAMLGRF

SEQ ID NO: 5054 - protein, 59 aa, Homo sapiens
YDNLSLRKIRALQSPIRSFLFRFPLNCYLLRKIILKIIVIVHNIIKDTFAFLIKCYFQG

SEQ ID NO: 5055 - protein, 84 aa, Homo sapiens
  SITE (65): Xaa equals any of the naturally occurring L-amino acids
  SITE (72): Xaa equals any of the naturally occurring L-amino acids
  SITE (84): Xaa equals any of the naturally occurring L-amino acids
MLTHFHNAYQMCIYINLCLCLSAFLIFRHSNSICYWPGFVLGPTDKSSKQKIKSLPRGAHMLRWXVVLSGRXQRKYEVLNPWYX

SEQ ID NO: 5056 - protein, 56 aa, Homo sapiens
WNYLTFPNKLHKDVRIATVYIKIFFWFAILGWPDEKKFFNFSLFPALCSYHSYFKS

SEQ ID NO: 5057 - protein, 86 aa, Homo sapiens
  SITE (24): Xaa equals any of the naturally occurring L-amino acids
GSRGCSRYGDPEAGRGSVDEGSYXKGGEVERSARLGHSRPVGYWKEFEFCFCVFETGSCCRPGQSAVARSWLTATSTSQIQAILMS

SEQ ID NO: 5058 - protein, 53 aa, Homo sapiens
SIQGLPQMEIYPLNLMRLMLLSLDCTVVLVMPYLYNGKSNSIYRSYEFVQSQL

SEQ ID NO: 5059 - protein, 64 aa, Homo sapiens
  SITE (5): Xaa equals any of the naturally occurring L-amino acids
IQASXSKANNSHLQFPSSNIKINFFFKRRSLTVLLRLECCGILAHSSLDLPGSSESFCLSLLSG

SEQ ID NO: 5060 - protein, 64 aa, Homo sapiens
  SITE (16): Xaa equals any of the naturally occurring L-amino acids
LRRPTHTHPPPGTASXLGFQGQGQKTGSKDKRPEASRRDLQPDTVGSAAQRALGACVPPAQRFV

SEQ ID NO: 5061 - protein, 47 aa, Homo sapiens
  SITE (2): Xaa equals any of the naturally occurring L-amino acids
  SITE (32): Xaa equals any of the naturally occurring L-amino acids
KXKSQNTLGILSLNVNHSSPQKVVSAFSKLLXKYFKLGGFSFGKLLM

SEQ ID NO: 5062 - protein, 61 aa, Homo sapiens
  SITE (22): Xaa equals any of the naturally occurring L-amino acids
HLNNTGLNCADRSMQPGTWDSXHRIERADFSYTHIPQDGQADLSMLGLGYMWWVLEPIPRI

SEQ ID NO: 5063 - protein, 79 aa, Homo sapiens
  SITE (53): Xaa equals any of the naturally occurring L-amino acids
  SITE (75): Xaa equals any of the naturally occurring L-amino acids
  SITE (79): Xaa equals any of the naturally occurring L-amino acids
LSTGCSPTPMPSDRAHANTAGCGMGFVTQPFVCVSDSIEKSERAVLKVRKIVXLLGSTGSCHCLGWLEALEKSNXNFEX

SEQ ID NO: 5064 - protein, 69 aa, Homo sapiens
KRKIIIPSREHSSPFSIVVGINHCPRLLVEGLSEVQAVSSQELHRLLGYPVCREECLSMFLTCPKSASL

SEQ ID NO: 5065 - protein, 80 aa, Homo sapiens
  SITE (1): Xaa equals any of the naturally occurring L-amino acids
  SITE (17): Xaa equals any of the naturally occurring L-amino acids
  SITE (19): Xaa equals any of the naturally occurring L-amino acids
  SITE (61): Xaa equals any of the naturally occurring L-amino acids
  SITE (69): Xaa equals any of the naturally occurring L-amino acids
XFRALRKGNFPYLSLGXEXEQNNEKSSLPQYQTAVFSVLVCVVSCSTEDTNFSSTLLQGIXHNDILSQXKGTKSLEMKFP

SEQ ID NO: 5066 - protein, 68 aa, Homo sapiens
ELHRGGGRSRTSGSPGLQEFGTSTKTHTRMFIAALFIIAKIWKQHKYPSTGEQINKRNNINTHQLVSR

SEQ ID NO: 5067 - protein, 34 aa, Homo sapiens
PPPPRAPPQGPGITQAVSPTAPGPPAIEIPQRGI

SEQ ID NO: 5068 - protein, 56 aa, Homo sapiens
KLKGKKSKHVVEVTIYDSLVLCLLHCFLVICKAIVSDMSQFLCPSLLHFLFFSYLF

SEQ ID NO: 5069 - protein, 44 aa, Homo sapiens
GCFSVLGMLFSVLGMLFSTRDAFQNITSLTFTFSSVCLGSKGHE

SEQ ID NO: 5070 - protein, 56 aa, Homo sapiens
  SITE (6): Xaa equals any of the naturally occurring L-amino acids
  SITE (50): Xaa equals any of the naturally occurring L-amino acids
  SITE (51): Xaa equals any of the naturally occurring L-amino acids
FGTARXAILKANLRKSPVAKDVDLEFLAKMTNGFSGADLTEICQRACKLXXRESIL

SEQ ID NO: 5071 - protein, 44 aa, Homo sapiens
SSMCKHFGACPLSFREPHSSFTQGSICSERGGRFTRVSRQSIEV

SEQ ID NO: 5072 - protein, 45 aa, Homo sapiens
  SITE (18): Xaa equals any of the naturally occurring L-amino acids
  SITE (39): Xaa equals any of the naturally occurring L-amino acids
FLSYYPFPWLPPPTLHPXPQCFKIKEINFACRNPWETWXLQTSGQ

SEQ ID NO: 5073 - protein, 39 aa, Homo sapiens
  SITE (14): Xaa equals any of the naturally occurring L-amino acids
  SITE (15): Xaa equals any of the naturally occurring L-amino acids
GTADLGTQLAMCFXXPSPPLTFLLCSVLTLSRLGSLPVH

SEQ ID NO: 5074 - protein, 27 aa, Homo sapiens
DIQGRFSRTLKMKHGRVITGRIVSCMV

SEQ ID NO: 5075 - protein, 76 aa, Homo sapiens
  SITE (36): Xaa equals any of the naturally occurring L-amino acids
AVSITKERTLTPIPLIVDFNRLLQLKKISSHPVCGXIPQSRRARPQNRSSHCVPSALTLSFREGEKESCMTYFYLK

SEQ ID NO: 5076 - protein, 59 aa, Homo sapiens
  SITE (37): Xaa equals any of the naturally occurring L-amino acids
  SITE (41): Xaa equals any of the naturally occurring L-amino acids
PESQPTQGSHSPCTLRRQDGCCFLLPSQGRRIPSESXSNLXLFLIVSSVTLGKLTLGLF

SEQ ID NO: 5077 - protein, 55 aa, Homo sapiens
  SITE (5): Xaa equals any of the naturally occurring L-amino acids
  SITE (7): Xaa equals any of the naturally occurring L-amino acids
  SITE (53): Xaa equals any of the naturally occurring L-amino acids
IQSIXIXVREGGQGGEREGNKGLQVVGKGLQTMPRVSMLWKSPGACFPGKALXRE

SEQ ID NO: 5078 - protein, 99 aa, Homo sapiens
  SITE (21): Xaa equals any of the naturally occurring L-amino acids
RKGEHVLSFHIVFLNAHEYKXEKTKPKKSKIHDIPKQQKRQEAFGNQKSGPFLKGNSLLVWRPCWLLENLDKEQFYFFASTVQPLFSEYHCVQGPVSRF

SEQ ID NO: 5079 - protein, 42 aa, Homo sapiens
IRFLWLAVFIQCLAELVLYKRYPADIIIIIVDVVIIAQVKGI

SEQ ID NO: 5080 - protein, 45 aa, Homo sapiens
  SITE (30): Xaa equals any of the naturally occurring L-amino acids
YFLIRIIAKIVVMNYTDSQDCNSQTTQTVXSHEGICNMAPWLTFW

SEQ ID NO: 5081 - protein, 53 aa, Homo sapiens
NVTFFSLNIEKELSIFLIYTDKNIWFKIAFFLSFYFIKLLYKRGKHTKISAFF

SEQ ID NO: 5082 - protein, 50 aa, Homo sapiens
SSFHKPQMLNSAELYRNASSMDAGTFASFVHLVQCLVHSKHLIRNCQTDD

SEQ ID NO: 5083 - protein, 16 aa, Homo sapiens
  SITE (13): Xaa equals any of the naturally occurring L-amino acids
LYNKPAHVLLNWXIKS

SEQ ID NO: 5084 - protein, 29 aa, Homo sapiens
  SITE (15): Xaa equals any of the naturally occurring L-amino acids
GNLIHEWFCPVGVQXWTGVSGNVNILVGS

SEQ ID NO: 5085 - protein, 82 aa, Homo sapiens
  SITE (38): Xaa equals any of the naturally occurring L-amino acids
ELIRCSPNILKNCQSIFLNGKEAWVARNLVLPHLACYXLFSGHPYCTTPGGTYSHRILCERVPPGGIKRENILGIGKVEKFG

SEQ ID NO: 5086 - protein, 88 aa, Homo sapiens
  SITE (42): Xaa equals any of the naturally occurring L-amino acids
DHLILILLIGTLLIQELIAEAEFLATSPVEVQANFALQMAAXAEQAALHSLLINMLFSSLSESRALYSLPPFPNKQAKHALPLFPLIA

SEQ ID NO: 5087 - protein, 63 aa, Homo sapiens
VRGEGWHRAGWGHRSPWGRCSPLNEVGLYQIPRVKHREEDPACKPCSRTAPSSCPVCACIRFV

SEQ ID NO: 5088 - protein, 64 aa, Homo sapiens
TFLPSKINYMSEFFSLSSESSESKPSSLHSPVRRCISFSLVTIKLDTQSAFCICGFNQPWIQNI

SEQ ID NO: 5089 - protein, 69 aa, Homo sapiens
ESVYFMPASVLDTMAITQFSRNSQFGERERNTKYVTSCHSSLKKKKEKKVRPGAVAYACNPSTLGGRGG

SEQ ID NO: 5090 - protein, 93 aa, Homo sapiens
APLILELSFQIHLAAWRFSEPKKRCKNYLGQLGEQGKEEIRNKEVPKAGTYFGETPRPALSLETQHSTEQNRHSSCPRADSQVGEMNVQQSCT

SEQ ID NO: 5091 - protein, 161 aa, Homo sapiens
  SITE (107): Xaa equals any of the naturally occurring L-amino acids
  SITE (136): Xaa equals any of the naturally occurring L-amino acids
  SITE (139): Xaa equals any of the naturally occurring L-amino acids
  SITE (143): Xaa equals any of the naturally occurring L-amino acids
  SITE (148): Xaa equals any of the naturally occurring L-amino acids
  SITE (156): Xaa equals any of the naturally occurring L-amino acids
ARPARCIRASISESPPHAGADGCEDAGTRDAGPGRSRRRRRQPDLTPSGPPLEPAPRVPLCFFAFLSSCRSSLSPQFMSSCAHLPDLCDLALPWPEAASLRAFYWAXLFPEPQRLLPKLPRKGPGAEVRPGRRQAXPLXPSLXGRCAXLRVSRPNXRAIHG

SEQ ID NO: 5092 - protein, 99 aa, Homo sapiens
  SITE (88): Xaa equals any of the naturally occurring L-amino acids
MSLLKLILLRVPCRATACQKGLTTQTFPLSPQSPKGQLAACSNKMSFLFRAEEVSLSFISKNDSLSFSQKCTDKPTEINLGRKRNGEXTLEYTSKVETK

SEQ ID NO: 5093 - protein, 85 aa, Homo sapiens
  SITE (5): Xaa equals any of the naturally occurring L-amino acids
  SITE (53): Xaa equals any of the naturally occurring L-amino acids
  SITE (54): Xaa equals any of the naturally occurring L-amino acids
  SITE (68): Xaa equals any of the naturally occurring L-amino acids
  SITE (79): Xaa equals any of the naturally occurring L-amino acids
LPSGXQNSTCKNQLPRQKMIRCHFWVTRKGHRISLNFGTDPHILGPEVCPESXXWLCLAVEPSSLAVXRHGQGKGEFCXYPSHLR

SEQ ID NO: 5094 - protein, 54 aa, Homo sapiens
KTVPLQWSFPKTVEQSSKSVCPILTIFKKHKGDMRKTDAEMKILTDILLISQVV

SEQ ID NO: 5095 - protein, 66 aa, Homo sapiens
  SITE (10): Xaa equals any of the naturally occurring L-amino acids
FRRGVLFLYXPVRTSQDAAGRINEKASGRVQWLTPVIPDLWEAEAGGSRGQEIETILANTVKPRLY

SEQ ID NO: 5096 - protein, 76 aa, Homo sapiens
  SITE (15): Xaa equals any of the naturally occurring L-amino acids
  SITE (17): Xaa equals any of the naturally occurring L-amino acids
TPMLASQSARITGMXHXTQRRATSLMRLPDSLSLSKSGSHNCTCPLRHLPELVIKNYFCLIMCFLSALLSDSKGPT

SEQ ID NO: 5097 - protein, 37 aa, Homo sapiens
  SITE (36): Xaa equals any of the naturally occurring L-amino acids
GKLVRLQVRHSSSIVSPKFNSLAVVLQRRDWENPNXP

SEQ ID NO: 5098 - protein, 115 aa, Homo sapiens
  SITE (3): Xaa equals any of the naturally occurring L-amino acids
  SITE (9): Xaa equals any of the naturally occurring L-amino acids
  SITE (109): Xaa equals any of the naturally occurring L-amino acids
  SITE (112): Xaa equals any of the naturally occurring L-amino acids
EIXGKRPLXTTRERVDPLHSLKQTLAEHYKKKQAFYAFNPPKTYDRDLSKLFSADPRHRRQPPAAVFIRRHRAQIRQLVARWTGENQLTLDAVLDDMISRAASSTCAPXVPXRSS

SEQ ID NO: 5099 - protein, 105 aa, Homo sapiens
  SITE (24): Xaa equals any of the naturally occurring L-amino acids
  SITE (91): Xaa equals any of the naturally occurring L-amino acids
ASVGRTLHGHPMIRQERRWLIDGXVKSRTITSSSLASPRGLDTSRPWYGRTPRRWAWGRRPQVTGPPLWWPDTSQRGMLSMRASSKKTSCXRRSNLLNVMGRWQT

SEQ ID NO: 5100 - protein, 34 aa, Homo sapiens
  SITE (21): Xaa equals any of the naturally occurring L-amino acids
CARLNFPSAEITGVSHHVRPXFSYACIITIKFNL

SEQ ID NO: 5101 - protein, 34 aa, Homo sapiens
  SITE (28): Xaa equals any of the naturally occurring L-amino acids
FCLSRYLDGSGRHTTHQVTFLSEPPAPXTVSVQR

SEQ ID NO: 5102 - protein, 67 aa, Homo sapiens
ETYSRLYHASWQLEPKSLDYLLNAVFLDCKLKIISPQRLWNPGDRLLTQPTSDRKPAMPLCSLTSDL

SEQ ID NO: 5103 - protein, 76 aa, Homo sapiens
HSKNKFPLSFGIKRELKYSGFSYKLELPGAELLQLCILNSSLDILKAIYLKIGLRHRNMRQKENMCLNSLREFGIV

SEQ ID NO: 5104 - protein, 145 aa, Homo sapiens
EPMMSPDERRKKTRCLRRPKGRGCQEPWRANSSQPPWCKVPRGEEFWSSAYLERCLNSEPGIVSNSRRSGNRLFRCPGALQTNKQQKVNGGCEGRELEAGSGKRGSCGRQGGPGGDANIRESPGHSSVWRTHCSKCSSLQMVRRW

SEQ ID NO: 5105 - protein, 81 aa, Homo sapiens
  SITE (64): Xaa equals any of the naturally occurring L-amino acids
  SITE (70): Xaa equals any of the naturally occurring L-amino acids
HTYIHTYPHIYTHTPPSKLLNMKTLSYMIKMSILLVILMLMEMTILAAINVVSNVCQTILKIAXYTCLPXIIYNLNKMSHS

SEQ ID NO: 5106 - protein, 91 aa, Homo sapiens
  SITE (51): Xaa equals any of the naturally occurring L-amino acids
  SITE (52): Xaa equals any of the naturally occurring L-amino acids
FHALRCSAAVPELTTDPFAVLLLTRAFRHWSFVLVARKHGQPGTPVAIATXXPPRTSAAFPAQQQPLQVLSDGSTVQLPRLSSLGFEDSMC

SEQ ID NO: 5107 - protein, 68 aa, Homo sapiens
QSHGEQTTCGRREDRGAEADGVIITGTGFLWPLWLKFTTSIQFTQVRDLKSQMEHFLQQEILFFQKVT

SEQ ID NO: 5108 - protein, 51 aa, Homo sapiens
KYCQNTATPCGQRIVTDHFEMHALDPPTRMASRYKRASRLCSMFNSISAIQ

SEQ ID NO: 5109 - protein, 86 aa, Homo sapiens
  SITE (7): Xaa equals any of the naturally occurring L-amino acids
  SITE (9): Xaa equals any of the naturally occurring L-amino acids
  SITE (23): Xaa equals any of the naturally occurring L-amino acids
IGSFINXRXFFSLSSVLPMKVDXTIEAQVANWYHSDHIAVGKGVQCGVLYEHLNFSRCHKPVICHKEFPFQDSSFLRGRHCGHLWS

SEQ ID NO: 5110 - protein, 72 aa, Homo sapiens
AQDIWTSRDLKTHCCITDYGSEALREGKIGVGVIIHPWFSCPDVFIWYSFASLLLKDIFLLNFLLTCQMEGK

SEQ ID NO: 5111 - protein, 100 aa, Homo sapiens
  SITE (70): Xaa equals any of the naturally occurring L-amino acids
  SITE (99): Xaa equals any of the naturally occurring L-amino acids
TGRVFVNTTWRAGTSKEVTFAVDLCALFSEPARTHEEQHNLPVIGAESVNLAAGFGHSGSQTGCGSSKGXEKELQNVDFYLCPGNHPDASCRDTYQFFXP

SEQ ID NO: 5112 - protein, 69 aa, Homo sapiens
FDGPHGQPGGGIRFEGPLLQQGVGMRFEGPHGQSVAGLRFEGQHNQLGGNLGLRVHMVSQGLVSGLKAL

SEQ ID NO: 5113 - protein, 58 aa, Homo sapiens
  SITE (38): Xaa equals any of the naturally occurring L-amino acids
  SITE (50): Xaa equals any of the naturally occurring L-amino acids
IGGEEAKRASLNWLDTFISVFLSDVINKYFVFQRMTNXSSSPSLLNDSAXPYSAHGKT

SEQ ID NO: 5114 - protein, 83 aa, Homo sapiens
  SITE (51): Xaa equals any of the naturally occurring L-amino acids
  SITE (60): Xaa equals any of the naturally occurring L-amino acids
  SITE (66): Xaa equals any of the naturally occurring L-amino acids
GKGIHKDVLLMGNALRGRLHMGWRKYLRAFSSVEDDQSMTFLLPQRLAFLXAQMSLVFKXCFLNTXNSFNDHAGLYRLWNQTL

SEQ ID NO: 5115 - protein, 99 aa, Homo sapiens
  SITE (60): Xaa equals any of the naturally occurring L-amino acids
LGSIKWCSDSDTFPSGHKAPDESQCRTPSSQYSRVTLLRRTPRLLASGTRQRRNPAPVSXWTWLDMVFANPQSHPALTASKRPRPTRTTTTAPLSAGSS

SEQ ID NO: 5116 - protein, 167 aa, Homo sapiens
  SITE (100): Xaa equals any of the naturally occurring L-amino acids
  SITE (133): Xaa equals any of the naturally occurring L-amino acids
  SITE (160): Xaa equals any of the naturally occurring L-amino acids
ILKAALAETDGEFSLHEQTVLLLFLDHCFNSLEVDLIRSQVQQLISLPMWMGLQLARLELELKKTPKLRKFWNLIKKNDEKMDPEAREQAYQERRFLSQXIQKFISVLKSVPLSEPVTMDKVHYCERFIELMXDLEALLPTRRWFNTILDDSHLLGHCYXSNPVRRE

SEQ ID NO: 5117 - protein, 63 aa, Homo sapiens
  SITE (9): Xaa equals any of the naturally occurring L-amino acids
IKSVVPTLXEIQRGPARKSGSFNHQRRSIFFPHKTIVLQYLTICVANSLLGWRVLISNRKLVD

SEQ ID NO: 5118 - protein, 92 aa, Homo sapiens
KDHLSPGVQDQPRQHSGETPSLQKKKPKKTKTNKQKNQAWWHAPVVPATWEAEVGGSLELGSLRLQLTMILSLHCSLGDRVRHCLKKKKKGR

SEQ ID NO: 5119 - protein, 113 aa, Homo sapiens
  SITE (18): Xaa equals any of the naturally occurring L-amino acids
  SITE (19): Xaa equals any of the naturally occurring L-amino acids
  SITE (78): Xaa equals any of the naturally occurring L-amino acids
  SITE (109): Xaa equals any of the naturally occurring L-amino acids
LPPAWPELSHRERPSSSXXGCSTGKAGEHLLLVGQAHQEVTRTVHPPCWHTQAGVHPCLSGGPVSVCILVLLGGARGXKGWDAGTCCCWQSRGHSGLIWALPKLRAAAXGPQS

SEQ ID NO: 5120 - protein, 65 aa, Homo sapiens
  SITE (63): Xaa equals any of the naturally occurring L-amino acids
TRPCPQGSLHMWIDIFPQDVPAPPPVDIKPRQPISYELRVVIWNTEMWFWMTRIHSPERCRVXSM

SEQ ID NO: 5121 - protein, 139 aa, Homo sapiens
  SITE (29): Xaa equals any of the naturally occurring L-amino acids
  SITE (89): Xaa equals any of the naturally occurring L-amino acids
  SITE (96): Xaa equals any of the naturally occurring L-amino acids
  SITE (99): Xaa equals any of the naturally occurring L-amino acids
  SITE (124): Xaa equals any of the naturally occurring L-amino acids
  SITE (137): Xaa equals any of the naturally occurring L-amino acids
SKQQLGQQSAQPRQLCSWRSRSSWSKPEXGLFQTLQVLTFILPCLMIPSQMLLENFSAAIPGHRCWTHMLDNGSAVSTNMTPKALLTIXIPPGPNXGPXQCRRFRQPQWQLLEPNAKGNSWSEXTTEPCVEGWVMNXGL

SEQ ID NO: 5122 - protein, 119 aa, Homo sapiens
SPRFPALLTAGYGRDWLCPVGFSGIWRRALRGGVCPPPHQLNAAVTSRAHGSCSWEGRRGKTERGKSKELDTQPAGPGHPCTHGGSALIRHVTRAHLQRPRNVSDSYLCAVNSNEDKGE

SEQ ID NO: 5123 - protein, 50 aa, Homo sapiens
VENSLLLPKHEGCLRSQQELKNTIWGTEGLLFWRVFFFKMNSTAWWLGCF

SEQ ID NO: 5124 - protein, 101 aa, Homo sapiens
  SITE (6): Xaa equals any of the naturally occurring L-amino acids
  SITE (93): Xaa equals any of the naturally occurring L-amino acids
LELTFXQQVYPTAVHVLETYHPGAVIRILACSANPYSPNPPAEVRWEILWSERPTKVNASQARQFKPCIKQINFPTNLIRLEVNSSLLEYYTXLDALCYMV

SEQ ID NO: 5125 - protein, 66 aa, Homo sapiens
PGLPLMVTKWLQQLQVFYPLTQNNSNNKTQYSDKKERDFWRVKKTFLETSNFSPCLIGQIVSHAHF

SEQ ID NO: 5126 - protein, 69 aa, Homo sapiens
RKLFSSLESKEGDGGKSQRALFSSSCTLQRATSLEALKVSIRFSSKRHLFIYTFICLFIYKIKSFSHEH

SEQ ID NO: 5127 - protein, 111 aa, Homo sapiens
  SITE (28): Xaa equals any of the naturally occurring L-amino acids
  SITE (95): Xaa equals any of the naturally occurring L-amino acids
  SITE (101): Xaa equals any of the naturally occurring L-amino acids
RPLARNTHLSGNAAQRSQPRFPALTQNXVALVRTPLDKCVPTCQDLPGAGPQKPALLTCGGRPHRSLLPCSIPQPPAHPPSQPFLDPGSGAFPSXATNCVXLFWLLLNPRK

SEQ ID NO: 5128 - protein, 70 aa, Homo sapiens
  SITE (34): Xaa equals any of the naturally occurring L-amino acids
  SITE (57): Xaa equals any of the naturally occurring L-amino acids
  SITE (61): Xaa equals any of the naturally occurring L-amino acids
  SITE (69): Xaa equals any of the naturally occurring L-amino acids
CPLQSSPFLTTRANNNPEIYGNPFLVFLYILYPXQYSLGYCLFCELYINGNYTACIXYGWXIYPILYTXN

SEQ ID NO: 5129 - protein, 77 aa, Homo sapiens
TWLWPLESSRPSEMVQEWGRRQRKPCRKPAKTSPTLRTQQCRKRLRFLENGGAGNKGEGWDPGTGQENQLDASSSPF

SEQ ID NO: 5130 - protein, 137 aa, Homo sapiens
LPKAEENKKEPLCRQKQHRKVLDKGKPEDVMPSVKGAQERLPTVPLSGMYNKSGGKVRLTFKLEQDQLWIGTKERTEKLPMGSIKNVVSEPIEGHEDYHMMAFQLGPTEASYYWVYWVPTQYVDAIKDTVLGKWQYF

SEQ ID NO: 5131 - protein, 115 aa, Homo sapiens
  SITE (87): Xaa equals any of the naturally occurring L-amino acids
KAQFIKTERKKLLNYKAWLVKNLQPRIYCPFAGYFVESHPSDKYIKETNTKNDPNELNNLIKKNSDVITWTPRPGATLDLGRMLKDXTDSKGIIEPPEGTKFTRIPGILNLIWKS

SEQ ID NO: 5132 - protein, 107 aa, Homo sapiens
AALCPKPTSRSPNLGPLGLFSLSVPNLLLAGNKPPGLLPRKGLYMANDLKLLRHHLQIPIHFPKDFLSVMLEKGSLSAMRFLTAVNLEHPEIWRKRPGSCGCASGQG

SEQ ID NO: 5133 - protein, 91 aa, Homo sapiens
  SITE (61): Xaa equals any of the naturally occurring L-amino acids
KNIILFLGLHKGSPKDHERNGCRLCKSDKYCEPHDYEYCCPCEWHRTEHDRQLNEVENNIXKKACCCEGFPFHEVISSNSTVLILETFLKV

SEQ ID NO: 5134 - protein, 54 aa, Homo sapiens
PQVIHASAFQSVGITVPVILMQAKFDHHCSRHPINIGWLVDFNSFLMEINHEGS

SEQ ID NO: 5135 - protein, 96 aa, Homo sapiens
  SITE (76): Xaa equals any of the naturally occurring L-amino acids
EIVRLLIEHGADIRAQDSLGNTVLHILILQPNKTFACQMYNLLLSYDRHGDHLQPLDLVPNHQGLTPFKLAGVEGXTVMFQHLMQKRNTPSGRMDH

SEQ ID NO: 5136 - protein, 60 aa, Homo sapiens
ATVPSHSFTFFCEFFHSFVSSCLVQDFSFDLISSPLLQLCLPVSFSMVILNLIATISGVF

SEQ ID NO: 5137 - protein, 41 aa, Homo sapiens
  SITE (4): Xaa equals any of the naturally occurring L-amino acids
PNKXPRNLCSNIRIYYKAMLSSNKRSYFAKKKKKKKKKKKK

SEQ ID NO: 5138 - protein, 58 aa, Homo sapiens
  SITE (6): Xaa equals any of the naturally occurring L-amino acids
  SITE (31): Xaa equals any of the naturally occurring L-amino acids
  SITE (34): Xaa equals any of the naturally occurring L-amino acids
KPTVAXPLWERKGNSLLFSAGPLCGCGLPRXPTXPYAWGLLTCEPPLNSFPAFLKEGL

SEQ ID NO: 5139 - protein, 98 aa, Homo sapiens
RWTSNSPLGLGQFPPQTAASPDEQKVFALWESGDMSDQHRQVLLEIFSKNYRVRRNMIQSRLTQECGEDLSKQEVDKVLKDCCVSYGGMWYLKGTVQS

SEQ ID NO: 5140 - protein, 104 aa, Homo sapiens
  SITE (61): Xaa equals any of the naturally occurring L-amino acids
  SITE (63): Xaa equals any of the naturally occurring L-amino acids
QESLMGGWAGFNHWFRDLSAPCRHPTQHPGVLLFSTYMHPLVVPAAPWSIQGEQGHSPSSXAXASASKAPSSPTYHTPTWPKGEKKKKKRQLQVSLIGAVVNAP

SEQ ID NO: 5141 - protein, 55 aa, Homo sapiens
HFRPQPACTQALIKTACCSTSPRVVCWHALGIRTDTRTLQFSLCKRMSLFLRKAS

SEQ ID NO: 5142 - protein, 93 aa, Homo sapiens
  SITE (79): Xaa equals any of the naturally occurring L-amino acids
  SITE (80): Xaa equals any of the naturally occurring L-amino acids
RKIKQKTTYRKYALSDFNPKFVLLYQAFSWGLEAVGPRAGVGCAGDSSAPAIRVLEEYFMRGYTPIEGKPPATNMQREXXTTTKNRPPRYQEK

SEQ ID NO: 5143 - protein, 57 aa, Homo sapiens
  SITE (57): Xaa equals any of the naturally occurring L-amino acids
RDAVKVEYLDFHEVCNSVFHKICLTILIQIGLKMIILRWWENHLKSYKQGVMINGNX

SEQ ID NO: 5144 - protein, 80 aa, Homo sapiens
ARGSGSFWGHICASPSLLSILSLVCDLLLLPISFHFLLLSQLQLTMHIFSSEYANKPVTAISAMHMQTTTMDNYSAIRHD

SEQ ID NO: 5145 - protein, 108 aa, Homo sapiens
QHFCVSFLWGGGNRKGIKNPISVNKSYQHVSKFRLCHTCGWKAVATQNNSLKSKTCSSEKSDKANPCPQDPAGMPLGGRRPEFGCRNLENLEVLFHSNFFLQVVYTLP

SEQ ID NO: 5146 - protein, 95 aa, Homo sapiens
RLWGPRRRATRCLQLQVWPLLPASSQLQRPWKGSTIYNVHFLPSNLAGEQGPAKEVTDSSNTNHTFLPHPHHLHTQLPLWGLQGESAHSGASKVM

SEQ ID NO: 5147 - protein, 57 aa, Homo sapiens
NPYFLLWIKSSPELHTSVVLEWIFLFRYQPIQLHSFIESVKKSIKLTSKMKSQKKKK

SEQ ID NO: 5148 - protein, 95 aa, Homo sapiens
SKLRFIVTIETIYSWAQVLRSEYNFKETVSALKSLCFKKGVYVFTGYTRRSGNQRLSSSFPCLLNRDVFASSYLFGNSCSKFRFSHSVLLWWCLI

SEQ ID NO: 5149 - protein, 134 aa, Homo sapiens
  SITE (109): Xaa equals any of the naturally occurring L-amino acids
  SITE (125): Xaa equals any of the naturally occurring L-amino acids
  SITE (133): Xaa equals any of the naturally occurring L-amino acids
SQVQALVCLECFKHIRTLDRKGEPVLLEPELTRGCGHRMGRLAGGQAPYLWEQGFAQPPWDALGLLTAQDPSREAAWIGGSGLTAGLGLEPSPCPAQAPAEPGALAEAXSGEWSCQEASHFFTAXVVPGHPEXV

SEQ ID NO: 5150 - protein, 73 aa, Homo sapiens
  SITE (17): Xaa equals any of the naturally occurring L-amino acids
  SITE (32): Xaa equals any of the naturally occurring L-amino acids
  SITE (52): Xaa equals any of the naturally occurring L-amino acids
VPDLRELNSRGREKNTXLLNYVTCYQEIKWFXHKEKWENLSRLSVQGRPSEXHLSLSELTCYVTFSKLLSTRA

SEQ ID NO: 5151 - protein, 51 aa, Homo sapiens
RLWHFSISMQISLKQNCLHISSLPSQKAEFLSNFTEASVALWQCPLTMIIN

SEQ ID NO: 5152 - protein, 84 aa, Homo sapiens
TGFTRLLVVFATTNNALMINTFTYMVVCLSELFSPIYSPSVYGSVHFCHTPGNPVILFLNILLMDLCSCLNVFNFQQNEPHSLF

SEQ ID NO: 5153 - protein, 105 aa, Homo sapiens
  SITE (1): Xaa equals any of the naturally occurring L-amino acids
  SITE (36): Xaa equals any of the naturally occurring L-amino acids
  SITE (67): Xaa equals any of the naturally occurring L-amino acids
XCQLVSLRDRWPLPWGLLLAPRVHILLQQHESKGRXFFLNLLFLVPAASARRLRGGEVLPPPLLEAXSPFGPGAAASPRRSARLSRRRRLLASSGAATGSDSDAW

SEQ ID NO: 5154 - protein, 78 aa, Homo sapiens
KGPVSKEPRSGMNRNSALRVNVRPLRPCPQEGGLPLQSCVPPLGLCRVPSRASNPSTASHRVMSHAGLQTARHDSSLK

SEQ ID NO: 5155 - protein, 116 aa, Homo sapiens
  SITE (10): Xaa equals any of the naturally occurring L-amino acids
  SITE (112): Xaa equals any of the naturally occurring L-amino acids
KTFFSPENIXGDGITRRNEDYRKILVSRQNDKKPEHSELREHVTELQISWPWRFNKEAIRDTLLGLIVFRTYGTLCHHTAVNSLGFCPACGSQPPGRKLAPLKGPHLWISPXILPK

SEQ ID NO: 5156 - protein, 125 aa, Homo sapiens
  SITE (90): Xaa equals any of the naturally occurring L-amino acids
  SITE (92): Xaa equals any of the naturally occurring L-amino acids
RANSQHPDLPPRRASQVSNSDHKSSKSPESDWSSWEAEGSWEQGWQEQAPRSHLLTVHGWPASITGVAQSPATRATPSLPCLHVPAPRYXAXVWREGRDGGPQPEVGPTAAHTSLYSRGQTLGVR

SEQ ID NO: 5157 - protein, 54 aa, Homo sapiens
  SITE (40): Xaa equals any of the naturally occurring L-amino acids
FQLLGRLRQHCLNPGGGGCNELRSCHCTPAWATRVKLRPXPLPKKKKKKPGQRT

SEQ ID NO: 5158 - protein, 138 aa, Homo sapiens
  SITE (11): Xaa equals any of the naturally occurring L-amino acids
  SITE (69): Xaa equals any of the naturally occurring L-amino acids
  SITE (130): Xaa equals any of the naturally occurring L-amino acids
EHPFLVNLWYXFQDEEDMFMVVDLLLGGDLRYHLQQNVHFTEGTVKLYICELALALEYLQRYHIIHRDXKPDNILLDEHGHVHITDFNIATVVKGAERASSMAGTKPYMAPEVFQVYMDRGPGYSYPVDXRSLGITAY

SEQ ID NO: 5159 - protein, 66 aa, Homo sapiens
  SITE (27): Xaa equals any of the naturally occurring L-amino acids
  SITE (28): Xaa equals any of the naturally occurring L-amino acids
  SITE (29): Xaa equals any of the naturally occurring L-amino acids
  SITE (30): Xaa equals any of the naturally occurring L-amino acids
  SITE (33): Xaa equals any of the naturally occurring L-amino acids
YHSIIYCWDGSKSTAFTFLISIKMIFXXXXDWXLIIVTHTQNSTPQGLGNCVFFCIQDKSVIKRNG

SEQ ID NO: 5160 - protein, 103 aa, Homo sapiens
RCSPGAGERDAFAHSHGPWNWWKPFPLNPESLGYPLIHPRDPWRGVFLPFFPKSFSGELFLPGLLLKQNLPSSLPVSGCLFPVFMATSADSPKFTPRGGGSPE

SEQ ID NO: 5161 - protein, 66 aa, Homo sapiens
  SITE (2): Xaa equals any of the naturally occurring L-amino acids
RXEDTQVCKILEPRESMEMDVQLVFTVISGIRNCGFRELKTTNNSTWLLISSVMSEAYLLVREEIR

SEQ ID NO: 5162 - protein, 82 aa, Homo sapiens
  SITE (13): Xaa equals any of the naturally occurring L-amino acids
  SITE (35): Xaa equals any of the naturally occurring L-amino acids
EPADGLAQGRVPXVSEPIPVCIPVVGRGLRENSKXWAHVSQSPVSFFPSQFPSFSLSFLTEFLTLPFFLPACPPSVPPVSLS

SEQ ID NO: 5163 - protein, 55 aa, Homo sapiens
  SITE (17): Xaa equals any of the naturally occurring L-amino acids
  SITE (24): Xaa equals any of the naturally occurring L-amino acids
NSQPYWSRTQQVLNKCXLLHYDCXNSMSRQQARVSRPNLVHEGEFQGQNDLTVVL

SEQ ID NO: 5164 - protein, 45 aa, Homo sapiens
  SITE (14): Xaa equals any of the naturally occurring L-amino acids
  SITE (42): Xaa equals any of the naturally occurring L-amino acids
IWKVPLIRRAHGRXHRNGLFPPVNQRAGVSRTPQYVCESLTXPFR

SEQ ID NO: 5165 - protein, 57 aa, Homo sapiens
  SITE (47): Xaa equals any of the naturally occurring L-amino acids
  SITE (50): Xaa equals any of the naturally occurring L-amino acids
IRASDVSSSRTVSNTVFKALVWASGSLTLGFPPFALPPAGGNPRECXQPXWALSFPL

SEQ ID NO: 5166 - protein, 52 aa, Homo sapiens
  SITE (50): Xaa equals any of the naturally occurring L-amino acids
  SITE (52): Xaa equals any of the naturally occurring L-amino acids
CKSTNLLSPVCDPVRLAIWAFGKLISSTLVHKITNLPHTDNSLLYLGGFXFX

SEQ ID NO: 5167 - protein, 37 aa, Homo sapiens
LCCFIGCLCILGVTVGEAVPRPGNQPSAHTGKNCLTK

SEQ ID NO: 5168 - protein, 117 aa, Homo sapiens
  SITE (103): Xaa equals any of the naturally occurring L-amino acids
  SITE (104): Xaa equals any of the naturally occurring L-amino acids
TCPALPLLLPCDRRQSAPPSEFLYLHLNNGDDYPLSGYCIRDVKRVMWHDWRTWGNWKALLSQLLSQTPQTQIGSVLHVIHAVFCEDVVHTIPSLLRDIQLQXXTARRQDSQGRCDS

SEQ ID NO: 5169 - protein, 77 aa, Homo sapiens
  SITE (69): Xaa equals any of the naturally occurring L-amino acids
NVHLCLLTGPRAGRYHHADVCGRRGGARDVEKNVISPRSTLGSLTTKTMFEVPELRAEGTANSSSPTRXRPVCQVTV

SEQ ID NO: 5170 - protein, 108 aa, Homo sapiens
  SITE (82): Xaa equals any of the naturally occurring L-amino acids
QPIFLFYKDELIDHTMPHIMPQNDNMFAYNEGGRGRGALHSLDKPKIEQPFKLVEKVVQNVFQFRRNTAIEGSECYSLKRRXGKHGQAVRVGRHRPYSSAPPALHLTL

SEQ ID NO: 5171 - protein, 104 aa, Homo sapiens
LNPEVASMPSCITCWSRFNFINFKHKLYEFLVHNCSFWGSTQMNSIASVRDTHFPGPDLIGISVATDSICSSSSTSDGKDRWQGNPFGGKKKVILCWTYRLLET

SEQ ID NO: 5172 - protein, 59 aa, Homo sapiens
  SITE (33): Xaa equals any of the naturally occurring L-amino acids
RLSLKPSDSAWPIHTVPSRPGSSPMPGPNSVVXSLPDLPTRGPTHPLKQPQEAAVTSHF

SEQ ID NO: 5173 - protein, 58 aa, Homo sapiens
ASITSKTVHKVQTKTVFLAKFSQTTSSKLPKSPSIIHGTKNWGKNREDMIISSVYVFC

SEQ ID NO: 5174 - protein, 61 aa, Homo sapiens
LVDSKTCHLKMSTVTLPLITLTYARPKTPCSDPSCLNELSLCVDNKPAEEVVPQKKKKKKD

SEQ ID NO: 5175 - protein, 95 aa, Homo sapiens
RQGGKFHTSRISLSRETWATLCSVKPPSSALKFTFWITCWGSLSRITPPSTISSSTKKAPSMFSSNQRFSTFFLNMWFRDSNRQVRTDMSISSFS

SEQ ID NO: 5176 - protein, 81 aa, Homo sapiens
  SITE (1): Xaa equals any of the naturally occurring L-amino acids
XPRGPLGGAGVGTQRDRGSLLHGLYSVYTRAGAEGGCVSSAISPVASHLRPRRLANVLFERSVELFKRVFKKKKKGRPLAI

SEQ ID NO: 5177 - protein, 73 aa, Homo sapiens
  SITE (20): Xaa equals any of the naturally occurring L-amino acids
  SITE (26): Xaa equals any of the naturally occurring L-amino acids
GTGHIQTKVQSEGGQQLGTXDIYVGXLFGYLLSSRTLLYSHPLKTTASQAQWLMPLIPPLWEAKWEDHLRPGV

SEQ ID NO: 5178 - protein, 38 aa, Homo sapiens
  SITE (10): Xaa equals any of the naturally occurring L-amino acids
MIRLSSMLAXVNLKELTGTRTSGGACGEQLGKNKFILY

SEQ ID NO: 5179 - protein, 92 aa, Homo sapiens
  SITE (85): Xaa equals any of the naturally occurring L-amino acids
  SITE (87): Xaa equals any of the naturally occurring L-amino acids
RTRGFGHTLVNPLLYRLDENFQPIAQDHLPLHKAFFSPFRIVNEGGIDPLLRGLFGVAGENACALAVLEHGAHGAAVLQAHTWVXDXRPSNP

SEQ ID NO: 5180 - protein, 98 aa, Homo sapiens
  SITE (71): Xaa equals any of the naturally occurring L-amino acids
  SITE (75): Xaa equals any of the naturally occurring L-amino acids
  SITE (88): Xaa equals any of the naturally occurring L-amino acids
SYSKTQPMTPNRGPLSPPNDLRPSHVISLPLHNAPHTRPTNQHTNHIPMMARCNTRKHIPRPPHTTCPKRXSIRXNPIYYLRNFFLRXIFLEPFTTPA

SEQ ID NO: 5181 - protein, 55 aa, Homo sapiens
EKLVKYPNFFPPDLYNQLDKPFNFEGFRKLISEKFNATIKEITPPTTQASNHVIP

SEQ ID NO: 5182 - protein, 117 aa, Homo sapiens
  SITE (70): Xaa equals any of the naturally occurring L-amino acids
  SITE (89): Xaa equals any of the naturally occurring L-amino acids
  SITE (114): Xaa equals any of the naturally occurring L-amino acids
ILDPPPLPSARWDAHVLERNRSEEPGPLGPSWLSGPQVMYSGLATNSGILGTPGTGWDCCPHSCNQQIFXAPCLCQTADRRDTVVTKTXLLLGKSPERVQGETATSPVRRRGTXDRF

SEQ ID NO: 5183 - protein, 102 aa, Homo sapiens
  SITE (18): Xaa equals any of the naturally occurring L-amino acids
  SITE (72): Xaa equals any of the naturally occurring L-amino acids
LFHRREGFTMITRRSARXQHTHTHTHFSSLQYLRRQHLYVDHMNNVLGFCPNTIPRKQSPFSDTNNLVFESXSSFHHYHYFIRYPEEWLLFMQVCAPSGFCN

SEQ ID NO: 5184 - protein, 37 aa, Homo sapiens
KRAFSMYNLMRNKVIKQILIYPMLRLRNVHCQYLSKL

SEQ ID NO: 5185 - protein, 99 aa, Homo sapiens
  SITE (5): Xaa equals any of the naturally occurring L-amino acids
  SITE (30): Xaa equals any of the naturally occurring L-amino acids
  SITE (78): Xaa equals any of the naturally occurring L-amino acids
SHLVXPHARVLDSRVASLEGGRVVVGREPXVTSIEVRSPLSDSILGEQALAVTDDKVSVLELRVQPVMGISLTLSRGXAHPGGGSQLTLLGAQSSPFFF

SEQ ID NO: 5186 - protein, 66 aa, Homo sapiens
  SITE (14): Xaa equals any of the naturally occurring L-amino acids
VVKGVASGLRETIXERALPAMMQWVRTQKPGESGINIVTADFVELGDFISTVIKLNYVFDEGEANT

SEQ ID NO: 5187 - protein, 158 aa, Homo sapiens
  SITE (22): Xaa equals any of the naturally occurring L-amino acids
WRGRHPPANSGRFLVSTRAVAXGLLVAGFRSLPAERSCRRHVWLLGGGEAGEGSQHPFGAMNIVRTPSVAQIGISVELLDSMAQQTPVGNAAVSSVDSFTQFTQKMLDNFYNFASSFAVSQAQMTPSPSEMFIPANVVLKWYENFQRRLAQNPLFWKT

SEQ ID NO: 5188 - protein, 60 aa, Homo sapiens
HITTMKAQRERLQIPGLTLDLTPRSLSPTPSSPGSPCSPLLAFHFWSPVCPNAGRTSPLG

SEQ ID NO: 5189 - protein, 78 aa, Homo sapiens
  SITE (67): Xaa equals any of the naturally occurring L-amino acids
SSKSLDNTQFPSVATSSSHGGCSEKHLEGEWVSGHSGSGPMLLLKILPVSPLRSSSVSPSKEPTTWXRPTSICPPVAR

SEQ ID NO: 5190 - protein, 68 aa, Homo sapiens
PPPRATGAVRRNGGRGSSLRPAEQSTVKATGPALRRLHTSSWRADSSRASLTRVHRQGLMHDSTPCCW

SEQ ID NO: 5191 - protein, 80 aa, Homo sapiens
  SITE (1): Xaa equals any of the naturally occurring L-amino acids
XIQSAEGGSGTHLGLGPISGAFTSPWDLHNQVQNLCLMSRLGLLQIGSHTSSSPHTPPLPFHFLNIPTSMPLLLWAPSCN

SEQ ID NO: 5192 - protein, 55 aa, Homo sapiens
  SITE (8): Xaa equals any of the naturally occurring L-amino acids
  SITE (45): Xaa equals any of the naturally occurring L-amino acids
VPMSAGSXIRVGFRRLLFLLVWGPIMLPSCGPGTLGLMPEALRIXPCCVLGVLAF

SEQ ID NO: 5193 - protein, 57 aa, Homo sapiens
PLTYFDCFAHGRYSHFFVLKLMQSSKLSTPLLISKTSVNTWQEMQGIFLMTHALFSY

SEQ ID NO: 5194 - protein, 110 aa, Homo sapiens
  SITE (1): Xaa equals any of the naturally occurring L-amino acids
  SITE (56): Xaa equals any of the naturally occurring L-amino acids
XQQGHSIKYSFPMWRPQPRIPLFVQMHADITGMPVVLSQEVESVLVGAAVLGACAXGDFASVQEAMAKMSKVGKVVFPRLQDKKYYDKKYQVFLKLVEHQKEYLAIMNDD

SEQ ID NO: 5195 - protein, 89 aa, Homo sapiens
  SITE (9): Xaa equals any of the naturally occurring L-amino acids
  SITE (28): Xaa equals any of the naturally occurring L-amino acids
  SITE (30): Xaa equals any of the naturally occurring L-amino acids
  SITE (88): Xaa equals any of the naturally occurring L-amino acids
HLVPVSLSXRQGPASKRRAWCPEGDGGXHXLSCGFPLTAQVGAQRRALFSSSFEWEFTLIFQGFPAVFRLPIPLNCFTQLGFQPQRVXH

SEQ ID NO: 5196 - protein, 85 aa, Homo sapiens
RWWAAIRGRCAQMPASPGCRGQQEKVGTSVHLPHPSPPWAKAQCSPRRLMTLHPPGPYSHPPPTGFGSSHHTLVFYAVLVQVQLS

SEQ ID NO: 5197 - protein, 89 aa, Homo sapiens
HRAFSPTLRGPSIQKGCTWRKEVRSQPELGEELQRCENRLIHRLKKRKEEGTKEEFLWKQNIWKQNIWLLTERVLIHAYINKPFRTMKK

SEQ ID NO: 5198 - protein, 58 aa, Homo sapiens
CRQLWVGIRRPRFYRLCPLLYLFIFAPYFKTLGKSLNLTQLLKKKKKKRKKKKGINME

SEQ ID NO: 5199 - protein, 63 aa, Homo sapiens
  SITE (61): Xaa equals any of the naturally occurring L-amino acids
HHWRDPRPTSSQACAFLVTLTPRENKNACNSYTNRASGFHMHCLPSLHTPLLHFNWQRTSXRH

SEQ ID NO: 5200 - protein, 99 aa, Homo sapiens
TPRNPDHRPPPGAPGRTAWMLGTEPGASGLGAAWVLARGSSWGRACGETQHPCGGGFFLQAGPWPPDASLPTNPFVLRGASTPPHPLSENNKDKFLLKK

SEQ ID NO: 5201 - protein, 60 aa, Homo sapiens
  SITE (57): Xaa equals any of the naturally occurring L-amino acids
LFPGELSFPLSTSLPFLKYLPTRLRFLALVGAGASAFGGNNKHPLPPPTPTGDSPDXWRK

SEQ ID NO: 5202 - protein, 35 aa, Homo sapiens
TTLGSECSTEAAKELAQPTPRLLKGPFPTPAHRLG

SEQ ID NO: 5203 - protein, 101 aa, Homo sapiens
  SITE (3): Xaa equals any of the naturally occurring L-amino acids
  SITE (5): Xaa equals any of the naturally occurring L-amino acids
PNXQXRGPPELRLPGSGCYTEDYSVSVQYTLTEEPPPGCYPGARDLSQRIPIIPEDVDCDLGLPSDCQGTHSLGSWGGTRGPDTPRPHRGLGATREEERAL

SEQ ID NO: 5204 - protein, 86 aa, Homo sapiens
  SITE (43): Xaa equals any of the naturally occurring L-amino acids
KLSSSVSPEKEIKAISCCREHFKKGQHSCDLCLPSIKYSFPSXLCLQLNTKTWRRLPPPSGRRKEAAKQIKGTCGLWPFCARAAWK

SEQ ID NO: 5205 - protein, 52 aa, Homo sapiens
  SITE (41): Xaa equals any of the naturally occurring L-amino acids
QLVKCCLKEKLETWCPGFSLRASYIGLPCLALTKDFRLPGXESRCSTLNCIC

SEQ ID NO: 5206 - protein, 76 aa, Homo sapiens
FGLFPLSLYKYLCALILKRETPEPCFSVVGPVLTALPSSPVTPMNIAAPASCALQFAFPQGPPKSPASEAIGENAQ

SEQ ID NO: 5207 - protein, 91 aa, Homo sapiens
  SITE (34): Xaa equals any of the naturally occurring L-amino acids
  SITE (36): Xaa equals any of the naturally occurring L-amino acids
  SITE (66): Xaa equals any of the naturally occurring L-amino acids
  SITE (67): Xaa equals any of the naturally occurring L-amino acids
  SITE (77): Xaa equals any of the naturally occurring L-amino acids
  SITE (83): Xaa equals any of the naturally occurring L-amino acids
DGGGLLRGEEAETVQFAPLWLGWRWWRLLLLPLXRXEPVPSWGAGTRRRRYALNGLGGLTGEVAAXXYPLSPPGCGXGGGGIXLSPPSSCG

SEQ ID NO: 5208 - protein, 69 aa, Homo sapiens
  SITE (41): Xaa equals any of the naturally occurring L-amino acids
GHFPKWGQRAGRPGWGLSSPALVSDSLKEGAVPVSAMGPLXCRWCLGGLGFCPGTSGCWEPLFPLCWGP

SEQ ID NO: 5209 - protein, 56 aa, Homo sapiens
KKKNCFPTPRSNVKLRIQAALITVNGCDGICCVLSHMVAYLLSLPCTLSLLSLLLS

SEQ ID NO: 5210 - protein, 65 aa, Homo sapiens
HPNIQPSCSEAKSWHSRNRACAGPLCMGRCDKLVSPPVHHTFSPTGFSPVRHCRAVGRISDNGGR

SEQ ID NO: 5211 - protein, 54 aa, Homo sapiens
  SITE (29): Xaa equals any of the naturally occurring L-amino acids
  SITE (31): Xaa equals any of the naturally occurring L-amino acids
  SITE (52): Xaa equals any of the naturally occurring L-amino acids
NIHHNPHSKPNLSKELNLGKIPFFKAKKXSXNIFLNFKACTACHSSHWKDPXKS

SEQ ID NO: 5212 - protein, 109 aa, Homo sapiens
  SITE (97): Xaa equals any of the naturally occurring L-amino acids
VAYNSSGSCEIEKIVGSEIDSTGKFAFPGHREIHVLDTDYEGYAILRVSLMWRGRNFRVLKYFTRSLEDKDRLGFWKFRELTADTGLYLAARPGEPXGLGVEAGLGPVG

SEQ ID NO: 5213 - protein, 59 aa, Homo sapiens
  SITE (58): Xaa equals any of the naturally occurring L-amino acids
LPKITHFFQPSEDSPVVSEACTGERLGSAAATSAFTASCGFTAENLPTPTWPHGDNRXV

SEQ ID NO: 5214 - protein, 55 aa, Homo sapiens
TNIKVLCSSVMSQAHHKASVIFPTMFLCAGDLGDRKSLPVEEPLAALIRNQYYYI

SEQ ID NO: 5215 - protein, 228 aa, Homo sapiens
  SITE (4): Xaa equals any of the naturally occurring L-amino acids
  SITE (73): Xaa equals any of the naturally occurring L-amino acids
  SITE (74): Xaa equals any of the naturally occurring L-amino acids
  SITE (153): Xaa equals any of the naturally occurring L-amino acids
  SITE (213): Xaa equals any of the naturally occurring L-amino acids
  SITE (217): Xaa equals any of the naturally occurring L-amino acids
  SITE (226): Xaa equals any of the naturally occurring L-amino acids
FSKXTAAAMLCPSRCNLCFQEHHFIQCPLFPCRSRRIGTKYGLFSFAPYLAPVTPGVGLVPTGNSAHHACYCXXKSTGHCPGSTATQKLLRTDKLEVCREFQRGNCARGETDCRFAHPADSTMIDTSDNTVTVCMDYIKGRCMREKCKYFHPXAHLQAKIKAAQHQANQAAVAARQPAAAATVMAFPPGALHPLPKRQALKKAMVQRGFTPAXCTTXRFYQRTISXHA

SEQ ID NO: 5216 - protein, 77 aa, Homo sapiens
  SITE (4): Xaa equals any of the naturally occurring L-amino acids
  SITE (41): Xaa equals any of the naturally occurring L-amino acids
GSRXRGQERDSEANKPSFLLAFWECHLCCSVVPQRARGYAXQGLPGCLLCLHCFSQGLASYGMPLRSPFPGLQEPCP

SEQ ID NO: 5217 - protein, 66 aa, Homo sapiens
PLGETEDMGVCPEQDTALSPVGRSGGSPLRAKGGRGAGRSLSYGGLTKEVNLLSITEARFLVRKRS

SEQ ID NO: 5218 - protein, 62 aa, Homo sapiens
GLPGGRDTFSPAVLWESGERRHRAGAVLIPGSVWECAGASWPADIAHRSQPVQFRTSGPRVK

SEQ ID NO: 5219 - protein, 110 aa, Homo sapiens
QNVMNCLENHEFSVGGELRLGGGATSRTKAVSAQLENAVGDGVSSPKTPSTPAVGSTHWGLHPDGLPELKWVLCPCWINMWRCWWVGQVSYTTLYVLQMIWGYHCYFNKF

SEQ ID NO: 5220 - protein, 141 aa, Homo sapiens
  SITE (112): Xaa equals any of the naturally occurring L-amino acids
RNMAFWGWRAAAALRLWGRVVERVEAGGGVGPFQACGCRLVLGGRDDVSAGLRGSHGARGEPLDPARPLQRPPRPEVPRAFRSSRGSSSQFLLFEVFWARTSTSCVFVVDTXPTLSHLAVFPLRHVWEFTCVPTPGPPSLC

SEQ ID NO: 5221 - protein, 77 aa, Homo sapiens
GRCKMCFVKQMLESSMLVKSHHHSLISSTQGHKHCGRPQGPLPRKTRDPCSLVYLLTLPPLLSYDPAKSPSARNTQE

SEQ ID NO: 5222 - protein, 65 aa, Homo sapiens
  SITE (1): Xaa equals any of the naturally occurring L-amino acids
XTDELPLLTGVAGSGAGHQQRTPGDAPSGLGPAVCSAWGSRPLGWGDRGLLGVGLLSHHLGEPKL

SEQ ID NO: 5223 - protein, 61 aa, Homo sapiens
  SITE (58): Xaa equals any of the naturally occurring L-amino acids
  SITE (60): Xaa equals any of the naturally occurring L-amino acids
ALTFELKITNKIRGVRGRKKSEALRQVDLPSNSDSALYSCVPLGSCLTSLISSFILKXKXC

SEQ ID NO: 5224 - protein, 40 aa, Homo sapiens
RVGSCPGFGVARKGNHECTGNVGSREKTGHSSASHGVRAY

SEQ ID NO: 5225 - protein, 104 aa, Homo sapiens
  SITE (87): Xaa equals any of the naturally occurring L-amino acids
VINLNIAILAITTNKLIFSVKILDRVLAIECLCSTKTVLSVLNLKSNLMQIAGGQNLFPSKEDLWFDFIFWDVCRYLEWKHKSSHKXLKPGTMSPESFLEERRS

SEQ ID NO: 5226 - protein, 67 aa, Homo sapiens
PRPQRFTLMFCSKSFIVLALPFSSLAHFEFILLYVLRLRLNEFDIIFFACLFLFVPHHGMKRVFFLH

SEQ ID NO: 5227 - protein, 61 aa, Homo sapiens
GWYPRSLFSLCFFLPFVVELSCITLGQRVLLKMLIYSEGGPSLYCFLCEVSNIWKKVVNHK

SEQ ID NO: 5228 - protein, 34 aa, Homo sapiens
  SITE (14): Xaa equals any of the naturally occurring L-amino acids
  SITE (23): Xaa equals any of the naturally occurring L-amino acids
  SITE (25): Xaa equals any of the naturally occurring L-amino acids
  SITE (34): Xaa equals any of the naturally occurring L-amino acids
LDFLPVLEPHLILXQWKTGLYLXLXNFCGIIFIX

SEQ ID NO: 5229 - protein, 81 aa, Homo sapiens
  SITE (51): Xaa equals any of the naturally occurring L-amino acids
FWTGKQESKASRAISSYTLLTSLPGLTCPENIDRQQIRQSYLASYLENNKXYGSLGHRPVLLKHSGAKDMGMEYQRPGSQC

SEQ ID NO: 5230 - protein, 45 aa, Homo sapiens
  SITE (29): Xaa equals any of the naturally occurring L-amino acids
NNSMELRRRVPKHGIWAVIFPTLSREEHXPAFHHHLDKFLVIGHI

SEQ ID NO: 5231 - protein, 70 aa, Homo sapiens
  SITE (1): Xaa equals any of the naturally occurring L-amino acids
  SITE (2): Xaa equals any of the naturally occurring L-amino acids
  SITE (10): Xaa equals any of the naturally occurring L-amino acids
  SITE (13): Xaa equals any of the naturally occurring L-amino acids
  SITE (35): Xaa equals any of the naturally occurring L-amino acids
  SITE (68): Xaa equals any of the naturally occurring L-amino acids
XXEPSLGTRXQAXLRPQAQRASLVLQRALPGNTAXGRQPGVRAWGSVDLSAHSKSCRQDHPQGVTEGXSL

SEQ ID NO: 5232 - protein, 65 aa, Homo sapiens
IELFLFACLFSSIQCLSNCFLLDEETQPRKYMSILVYGTILAAVIFNTSIKYKNLFITVILFFPK

SEQ ID NO: 5233 - protein, 101 aa, Homo sapiens
  SITE (4): Xaa equals any of the naturally occurring L-amino acids
  SITE (21): Xaa equals any of the naturally occurring L-amino acids
  SITE (96): Xaa equals any of the naturally occurring L-amino acids
NSMXICKYKKSKRTYETVIKXINSSGRLQQLSTLNRSTSLKGKEKMYIIDINLITVIQVPFSKKRIFYFQIALPTPRQEEEKKISAVVNRAPSFLXLLYTS

SEQ ID NO: 5234 - protein, 47 aa, Homo sapiens
  SITE (15): Xaa equals any of the naturally occurring L-amino acids
  SITE (20): Xaa equals any of the naturally occurring L-amino acids
PVPNSRVDPRVRRRXPLHLXLDSQIFKILLNSKLRTVFIMTILVSFH

SEQ ID NO: 5235 - protein, 157 aa, Homo sapiens
  SITE (141): Xaa equals any of the naturally occurring L-amino acids
  SITE (150): Xaa equals any of the naturally occurring L-amino acids
GTAETFHSVHFCPQPVPKAPESPSLDSALASPLDPQALACTPASPPDSQPPASPQDSEALDFETPSSSLAPQTPDSALASETLASPQSLPPASPLLEDREEGDLGKASELAETPKEEKAEGAAMLELVGSILRGCVPGVGXTANGLAGAXGKSASAF

SEQ ID NO: 5236 - protein, 43 aa, Homo sapiens
GESFPASLVTAFEAEQVSHWVSDSKLVKTGNRMESLDTDIGDR

SEQ ID NO: 5237 - protein, 54 aa, Homo sapiens
  SITE (10): Xaa equals any of the naturally occurring L-amino acids
MNKQIVEHLXMKYYSAIKKEWSIDRHNKEEFKMHCAKRNKPASKGYIQIIKLHS

SEQ ID NO: 5238 - protein, 91 aa, Homo sapiens
TKYCPLTGFLLHPEKDTFSCSSSFIGDKPPPRDFTNELVKEVPKNIFLLSLFFLHQNPLLQNFFRIFFSPRSEECVNILNKISGHLQPLCK

SEQ ID NO: 5239 - protein, 53 aa, Homo sapiens
QYVHNVNTAKRSVRPNIFSIHFLLLLLSIATKASFIQLCNSSNIVANVNVYFQ

SEQ ID NO: 5240 - protein, 86 aa, Homo sapiens
MLRTDQVHQTAPHPCSMFWIGELWGWRCRTFKKLLKISCCEYFRYIKKHWLTISQCSAILTCLSRQNLLKSLPSCIPSVFKFGGKT

SEQ ID NO: 5241 - protein, 280 aa, Homo sapiens
ADAWADAWADAWVSPVSRQSIRNSQKHSPTSEPTPPGDALPPVSSPHTHRGYQPTPAMAKYVKILYDFTARNANELSVLKDEVLEVLEDGRQWWKLRSRSGQAGYVPCNILGEARPEDAGAPFEQAGQKYWGPASPTHKLPPSFPGNKDELMQHMDEVNDELIRKISNIRAQPQRHFRVERSQPVSQPLTYESGPDEVRAWLEAKAFSPRIVENLGILTGPQLFSLNKEELKKVCGEEGVRVYSQLTMQKAFLEKQQSGSELEELMNKFHSMNQRRGEDS

SEQ ID NO: 5242 - protein, 115 aa, Homo sapiens
GPAFGCHGRAPRPCTARRRGKAGLSAVRGLSSAMGIGVSLLLQFSLTPGGYRSVGRSRRCSRGSIPRNIPKRSWKKPHPQLCSLQGSSVSVCPASQSCCAARMWHRKQQTQERAA

SEQ ID NO: 5243 - protein, 247 aa, Homo sapiens
  SITE (81): Xaa equals any of the naturally occurring L-amino acids
  SITE (176): Xaa equals any of the naturally occurring L-amino acids
RRGPWPELQRDKAAAAAVLGAVRKRPSVVPMAGQDPALSTSHPFYDVARHGILQVAGDDRFGRRVVTFSCCRMPPSHELDXQRLLEYLKYTLDQYVENDYTIVYFHYGLNSRNKPSLGWLQSAYKEFDRKYKKNLKALYVVHPTSFIKVLWNILKPLISHKFGKKVIYFNYLSELXEHLKYDQLVIPPEVLRYDEKLQSLHEGRTPPPTKTPPPRPPLPTQQFGVSLQYLKDKNQGELIPPVARGSQ

SEQ ID NO: 5244 - protein, 68 aa, Homo sapiens
  SITE (14): Xaa equals any of the naturally occurring L-amino acids
  SITE (42): Xaa equals any of the naturally occurring L-amino acids
KLQEQPRPGRRGSXGLRAGSEPRKHGLARSPGEQHSQASRRXLAGHPENVTAGEVTPSRATGPLTPHP

SEQ ID NO: 5245 - protein, 116 aa, Homo sapiens
  SITE (1): Xaa equals any of the naturally occurring L-amino acids
XSRVDPRRPNFDKYLVKIKPILNISLSDVPGDPWSYHTVFKNKCFALLETKTYDMQNSYNEKQDGIMKSNMKLKLAVIVVCKLHKPVYGDFFLLLFPPSIKHPPGETSLPSSSLEW

SEQ ID NO: 5246 - protein, 104 aa, Homo sapiens
LQGLGPTLGQKGTPARDRGVGWGVRWDSPGQSGNRGVAGSRWRSCWHSSRVSTFFHSSLFSDVNVSTFFSRHSTYSFFLRRLSWAEILFLIFSGLSSRPSPRLW

SEQ ID NO: 5247 - protein, 72 aa, Homo sapiens
APERGNPGPAAASWRRVPSSSRVGLDSRRGVARTSSANESRELHPPPLPSKVGGQARAAQAKDSTEGVTQSP

SEQ ID NO: 5248 - protein, 82 aa, Homo sapiens
STHASAVAELKAGECEQGGLHMGSVGPSSCGKDGMGGERAEHMGWLLQASFFGVRACGERLAAVLARARGALMGKRLPTGEF

SEQ ID NO: 5249 - protein, 180 aa, Homo sapiens
ACFFAWGPWPPLAFSALAPCLPFSLLLVSLSLFLSLPGLWVSDPHPALMALCLELLKQCSSCLVAYKKTPPPVPPRTTSKPFISVTVQSSTESAQDTYLDSQDHKSEVTSQSGLSNSSDSLDSSTRPPSVTRGGVAPAPEAPEPPPKHAALKSEQGTLTSSESHPEAAPKRKLSSIGNTS

SEQ ID NO: 5250 - protein, 84 aa, Homo sapiens
GESSSWGLGGWWCLYTVFSYSTELLHLKLHCSACFPDLGCYRVFCKPAYSQQMFLKVFSRLWRKFFGVGMGTGGWGERSWTTSC

SEQ ID NO: 5251 - protein, 84 aa, Homo sapiens
  SITE (17): Xaa equals any of the naturally occurring L-amino acids
SFLPAAVSVAPLCKLRXHQLPVQQLHSLLSLDVQRGSHPNSASLVGSEEEKMGSSVQEKNFAIQLGMQSTCSRCIRCSASPAGW

SEQ ID NO: 5252 - protein, 83 aa, Homo sapiens
  SITE (52): Xaa equals any of the naturally occurring L-amino acids
CDTVAESYPHPVSFLTVSMLRFSAALERFTTFRSDSAADSCLPGGPCHSLQXLGKGLRESKTGIPQTKQKLLPRSFAPPSSAG

SEQ ID NO: 5253 - protein, 61 aa, Homo sapiens
  SITE (3): Xaa equals any of the naturally occurring L-amino acids
IAXGRSRGSKLTYACMRRHSSSIVSPKFNSLAVVLQRRDWENPGVTQLKSPCSTSPFRQLA

SEQ ID NO: 5254 - protein, 77 aa, Homo sapiens
  SITE (77): Xaa equals any of the naturally occurring L-amino acids
IASGRSRGSKLTYACMRRHSSSIVSPKFNSLAVVLQRRDWENPGVTQLNRLAAHPPFASWRNSEEARTDRPSQQLRX

SEQ ID NO: 5255 - protein, 59 aa, Homo sapiens
  SITE (26): Xaa equals any of the naturally occurring L-amino acids
GGQKPPVEQKGKSSLDLDFQYEYRPXKRGLTILLTFWVLSRRCQKSYHRDNWLVAAKRS

SEQ ID NO: 5256 - protein, 47 aa, Homo sapiens
IASGRSRGSKLTYACMRRHSSSIVSPKFNSLAVVLQRRDWENPGVTQ

SEQ ID NO: 5257 - protein, 49 aa, Homo sapiens
KKKKKKKKKKKKKGGRSRGSKLTYACMRRHSSSIVSPKFNSLAVVLQRR

SEQ ID NO: 5258 - protein, 25 aa, Homo sapiens
  SITE (19): Xaa equals any of the naturally occurring L-amino acids
GRRHLCVYVRVVCACVHVXVCAREL

SEQ ID NO: 5259 - protein, 70 aa, Homo sapiens
NHLFFKNCWNTVISIHLCIAYGCFCSTRKLGSCYKDWSTEPKNTIWPLSGTLLTSKLVKVAAQLLKCSLG

SEQ ID NO: 5260 - protein, 67 aa, Homo sapiens
MIHPSQDFLTSGETHTSSKPSQSNENCLYNLNYLLFIFFPQFPKILFIYRTCVYNLVYILKFNVITC

SEQ ID NO: 5261 - protein, 109 aa, Homo sapiens
GLRFLDSEIQTSSSQTSPEEAMGTPRIQHLLILLVLGASLLTSGLELYCQKGLSMTVEADPANMFNWTTEEVETCDKGALCQETILIIKAGTETAILATKGCIPDRRRP

SEQ ID NO: 5262 - protein, 57 aa, Homo sapiens
  SITE (21): Xaa equals any of the naturally occurring L-amino acids
KTTTNAQVCGPEFEQRSNKLXSPPVSWAHFLSKKECLIWVLTPINRIFLISYRFIWL

SEQ ID NO: 5263 - protein, 79 aa, Homo sapiens
  SITE (63): Xaa equals any of the naturally occurring L-amino acids
PLPDLAMAQNTENHDPVGSILIQIHEDLYQLKEKLTKFSPEEKGETLDIQSLETAIKRTEVGXRPLSLYLGNHLHLQQK

SEQ ID NO: 5264 - protein, 52 aa, Homo sapiens
RQYFPASLVAGLTILLCFWDITRAACATSKNVLEGGCRHYFLSSSWNSAVIV

SEQ ID NO: 5265 - protein, 80 aa, Homo sapiens
  SITE (12): Xaa equals any of the naturally occurring L-amino acids
  SITE (58): Xaa equals any of the naturally occurring L-amino acids
VTDDERCIDASXREFSNFLKNLEEQREIMALSVTETLIKPLEKFRKEQLGAVKEEKKXFDKKKKKKKKKKKKKKKKKKKK

SEQ ID NO: 5266 - protein, 52 aa, Homo sapiens
  SITE (21): Xaa equals any of the naturally occurring L-amino acids
VAGIAGACHHARLNFLCIFSXDGVSPCWPGWSRTPDLVIHPLRPPRVLGLQA

SEQ ID NO: 5267 - protein, 35 aa, Homo sapiens
AREFKTSLVNIARPRLYKTLARHVDVHLWPSYLGG

SEQ ID NO: 5268 - protein, 39 aa, Homo sapiens
  SITE (39): Xaa equals any of the naturally occurring L-amino acids
PNIGMCIINLAGWRGQSTHYTYMFTVDLVWTLCRYFYVX

SEQ ID NO: 5269 - protein, 67 aa, Homo sapiens
HSRGHHFLIATVGDKCHNSCPNKLPCEVILSSTCPKTMYLLKSLTNCYETVQLSEEKLFHLRMCSCI

SEQ ID NO: 5270 - protein, 42 aa, Homo sapiens
TNADTLLLTEVHSLHQNQFVYVVQFCGFAKYTVMYPSLQYHA

SEQ ID NO: 5271 - protein, 70 aa, Homo sapiens
  SITE (26): Xaa equals any of the naturally occurring L-amino acids
  SITE (44): Xaa equals any of the naturally occurring L-amino acids
MEVVSTPHPKKKKKKKKKKKKKGGRXRGSKLTYACMRRHSSSIXSPKFNSLAVVLQRRDWENPGVTQLNR

SEQ ID NO: 5272 - protein, 51 aa, Homo sapiens
KCCSRVQWLMPVIPTLWDAGVGGSLESREFEISLGNIGRPRSQKKKKKKKG

SEQ ID NO: 5273 - protein, 55 aa, Homo sapiens
SQLLGRLRWESGVNPGGGACSEPRSCHCTSAWATERDSVSKKKKVGKYGRGDSKI

SEQ ID NO: 5274 - protein, 30 aa, Homo sapiens
  SITE (1): Xaa equals any of the naturally occurring L-amino acids
XLRLQVPVRNSRFDPRVRVIHAIKSKRLMN

SEQ ID NO: 5275 - protein, 133 aa, Homo sapiens
  SITE (121): Xaa equals any of the naturally occurring L-amino acids
  SITE (132): Xaa equals any of the naturally occurring L-amino acids
SLTGKLPRLQVPGPEFPGRPTRPIFPILQHLDINGSSDSSTLPKLEEFCTSLTQSEQSADGSQSEPNNSQTQPKQIQLSTAAPCSTTAVDDSAEKPSGSVESSPEILKNEDFSSSRAITLXKDKRQESVDQXL

SEQ ID NO: 5276 - protein, 43 aa, Homo sapiens
  SITE (3): Xaa equals any of the naturally occurring L-amino acids
  SITE (29): Xaa equals any of the naturally occurring L-amino acids
ARXLTPVIPALWEAEVCGSRGQEFKTKPXQDGETPSLLKIQGG

SEQ ID NO: 5277 - protein, 78 aa, Homo sapiens
TREAVAAVSQNLHHCTPAWATERDSISKKKKKKKKATKRNPFSQETKNEHFGLSLLNDYSFPDTDFGFESQTGIGSTA

SEQ ID NO: 5278 - protein, 149 aa, Homo sapiens
  SITE (126): Xaa equals any of the naturally occurring L-amino acids
  SITE (129): Xaa equals any of the naturally occurring L-amino acids
AKEGNLRRNQPCLHLDLGGPVSRTVKKMNWCCLNPPVVVFCHGGPRRQYTTQRNILSTFSLFHFIVFSPSFLSFSLLLSFSSLLFPLVFNFNFNFWPSYTSICLSRKLNSRQLIIHLISSAKQMPXMVXFVIRLLWDQNVSYSSGKNET

SEQ ID NO: 5279 - protein, 26 aa, Homo sapiens
PTRPIYQNTSDYNKLASVLDEFQMKK

SEQ ID NO: 5280 - protein, 84 aa, Homo sapiens
  SITE (8): Xaa equals any of the naturally occurring L-amino acids
  SITE (9): Xaa equals any of the naturally occurring L-amino acids
  SITE (55): Xaa equals any of the naturally occurring L-amino acids
PLLLPTHXXHSRGRNGSHQVPGPAFSCLIRLGLASDPNGSAPRPMEFFKLVPARXPAAGHEAVGCAQTASQPPLTRSLSHSVHC

SEQ ID NO: 5281 - protein, 123 aa, Homo sapiens
  SITE (94): Xaa equals any of the naturally occurring L-amino acids
  SITE (103): Xaa equals any of the naturally occurring L-amino acids
  SITE (110): Xaa equals any of the naturally occurring L-amino acids
GHICFKSVQYNKDLPQGVVTIPDREPPNCNRLYPFLSFLFLRASSQIIARRNLGKSPLLLHTSQRCPKSSLMLFRRLRKQFCSSWAQRSSHFGXLSSNLPGQXGDSHGTXVIRLIIRDAKSNP

SEQ ID NO: 5282 - protein, 81 aa, Homo sapiens
  SITE (5): Xaa equals any of the naturally occurring L-amino acids
  SITE (65): Xaa equals any of the naturally occurring L-amino acids
  SITE (69): Xaa equals any of the naturally occurring L-amino acids
SSHCXNKTPTQNSVLTYGRDWGSVPKMQQEEDLGSPAFCRAGTLASLDGKPAPWANSQQNAAAAXWCSXFPPLPVSSFPFR

SEQ ID NO: 5283 - protein, 82 aa, Homo sapiens
IKAGGQKITEVLAWWFHWAGAVGTFVGIVVRSRHHAVGQKQSSSLRSFQHLPFFIFSLQHNVLQLFISKGSSFPHPVTNWGR

SEQ ID NO: 5284 - protein, 88 aa, Homo sapiens
  SITE (1): Xaa equals any of the naturally occurring L-amino acids
  SITE (82): Xaa equals any of the naturally occurring L-amino acids
XLLSVFFVLFCFVFSQSLAVSPRLECSGMVSAHRKLHLPGFTPSPASASRVAETTSARHHAWANVVFVFLVDMGFHRVSLDXLDLPTS

SEQ ID NO: 5285 - protein, 67 aa, Homo sapiens
  SITE (5): Xaa equals any of the naturally occurring L-amino acids
  SITE (7): Xaa equals any of the naturally occurring L-amino acids
  SITE (18): Xaa equals any of the naturally occurring L-amino acids
GRTYXGXLVRLQVPGPEXRVDPRVRSPPPPPKVTFAYVTLTHIIVRGPWVPKVVLSPDWSVTRVSSQ

SEQ ID NO: 5286 - protein, 41 aa, Homo sapiens
LQIRFVAIEANWIPAQLCGLDSHHIKSSTRHSFLCSEHTTF

SEQ ID NO: 5287 - protein, 85 aa, Homo sapiens
PDPRRSSRVTRHRGQQELGRWLDAAAAGTQRLGGLLGQGEKQRCNIFKISQSIRLHPGPWNRRQTELMFYTSGIGLSFFPLMPSI

SEQ ID NO: 5288 - protein, 84 aa, Homo sapiens
GQHQAEVEEGVAVGDAVLLVVKGPALTGCHLLLLLCGVYIGGHSSVCIRLFTCRWSEERRLMKRVHRRKMMRPTMLGASHHWVS

SEQ ID NO: 5289 - protein, 51 aa, Homo sapiens
  SITE (23): Xaa equals any of the naturally occurring L-amino acids
  SITE (38): Xaa equals any of the naturally occurring L-amino acids
ASPTVGANGASALLHREMGENYXSPPGTHMPSTDWIFXPYPLVLPCCMKSC

SEQ ID NO: 5290 - protein, 55 aa, Homo sapiens
  SITE (24): Xaa equals any of the naturally occurring L-amino acids
  SITE (54): Xaa equals any of the naturally occurring L-amino acids
QIGYSINLGAISQITFTSEDFLNXCNRGDFPFITVHFHSPLPGSSLKPPGICFXG

SEQ ID NO: 5291 - protein, 51 aa, Homo sapiens
LVAEGQKFAMTFGCIQGWRGRFGESSFKEKMQNLITRSWGASQGLGKGLHK

SEQ ID NO: 5292 - protein, 99 aa, Homo sapiens
  SITE (27): Xaa equals any of the naturally occurring L-amino acids
  SITE (96): Xaa equals any of the naturally occurring L-amino acids
PLTTPNILASHSPEYLGLEPGDLAPSXAGKVINAQCGLWILPTHSPPTCQIICWQIPGLIAFPLSVFQCIPLNNKGFKRKHNPGTIVILEKLPVRXGFM

SEQ ID NO: 5293 - protein, 69 aa, Homo sapiens
  SITE (2): Xaa equals any of the naturally occurring L-amino acids
IXKTLGTQPTQLSHFKSEGSIAPDYLPKIIQERRQESQIPVFFLVLNIAPFDKFWISFLLYFSTLADLF

SEQ ID NO: 5294 - protein, 47 aa, Homo sapiens
  SITE (10): Xaa equals any of the naturally occurring L-amino acids
LIVPTEPPCXRWWRAGGPGETQAEEEKCETRAGWRWVRDFPGSCPSA

SEQ ID NO: 5295 - protein, 98 aa, Homo sapiens
  SITE (2): Xaa equals any of the naturally occurring L-amino acids
  SITE (82): Xaa equals any of the naturally occurring L-amino acids
EXPLVELGSPNWQAVYSFAVQLRPRIQRAASLLRGMGSERRVFYLDSMRSRLQTGPQEKMKPISCNSWRNGGYMCRWKTDAXTSFCLLFPVQTSESPL

SEQ ID NO: 5296 - protein, 50 aa, Homo sapiens
  SITE (8): Xaa equals any of the naturally occurring L-amino acids
KLLINELXSARWKVMKAWCHQVALGPICNIPLQKAYTWKCKTCGKAIYSG

SEQ ID NO: 5297 - protein, 50 aa, Homo sapiens
  SITE (49): Xaa equals any of the naturally occurring L-amino acids
FGRAGIQTASSWVRTSCNMHMGRCIAGCIDNWPRAWQHSSRLSWRLNSXN

SEQ ID NO: 5298 - protein, 106 aa, Homo sapiens
  SITE (38): Xaa equals any of the naturally occurring L-amino acids
  SITE (93): Xaa equals any of the naturally occurring L-amino acids
  SITE (97): Xaa equals any of the naturally occurring L-amino acids
REQPSPLGLREEKTEKERGNSEEVPQGGETSEGWLWLXGNMLPVPCWRINLLEVPPRQATGAESCHGGECCWDPCRTKGDRRKRPFSSSSLVXPFQXPILGSSWQG

SEQ ID NO: 5299 - protein, 53 aa, Homo sapiens
  SITE (31): Xaa equals any of the naturally occurring L-amino acids
RQVGSLELREFETRLGNIVRTSSLKLKKIKXTRKKPKNMPSGISLWLKWAAEG

SEQ ID NO: 5300 - protein, 40 aa, Homo sapiens
  SITE (2): Xaa equals any of the naturally occurring L-amino acids
FXQGCGHPPNPFMVLAPSLARSIKKHFIAKRFCRTGKTQV

SEQ ID NO: 5301 - protein, 37 aa, Homo sapiens
  SITE (27): Xaa equals any of the naturally occurring L-amino acids
REHLASCDPSTLASQSIGITGESTGWXKYLYLPDMIC

SEQ ID NO: 5302 - protein, 50 aa, Homo sapiens
TILVLFLRPFLYVHEFKNKILIILTFIFLFPIIWDKYFKLSHNIQNGIAA

SEQ ID NO: 5303 - protein, 48 aa, Homo sapiens
NLGGQSKTLSQKKCIHIYIYLPQYIFSYTCLVFTKETKNKNQNIRHTK

SEQ ID NO: 5304 - protein, 23 aa, Homo sapiens
TDLCSKRVVGKPRVFLGSQDLSH

SEQ ID NO: 5305 - protein, 66 aa, Homo sapiens
  SITE (40): Xaa equals any of the naturally occurring L-amino acids
  SITE (42): Xaa equals any of the naturally occurring L-amino acids
IRQRLCGAEEKAKLPCICLVPAKPQVHPSPEQDARRALPXRXHVESSEVRGCGLHLRDHLPGRSRR

SEQ ID NO: 5306 - protein, 181 aa, Homo sapiens
REQKLELHRGGGRSRTSGSPGLQEFGTSSETPLTLAAQLDDSVEVIKALKNGGAHLDFRAKDGMTALHKAARARNQVALKTLLELGASPDYKDSYGLTPLYHTAIVGGDPYCCELLLHEHATVCCKDENGWHEIHQACRYGHVQHLEHLLFYGADMSAQNASGNTALHICALYNQVSAERI

SEQ ID NO: 5307 - protein, 85 aa, Homo sapiens
  SITE (37): Xaa equals any of the naturally occurring L-amino acids
  SITE (41): Xaa equals any of the naturally occurring L-amino acids
  SITE (43): Xaa equals any of the naturally occurring L-amino acids
  SITE (50): Xaa equals any of the naturally occurring L-amino acids
LGAQSLLGTLVGKGTSHKRDVASQGSIYTFLASSGPXASQXLXSDTEWGXGFLTHFCNSSLRLKFCQSKISSELKVTRTLKKKKK

SEQ ID NO: 5308 - protein, 149 aa, Homo sapiens
  SITE (91): Xaa equals any of the naturally occurring L-amino acids
  SITE (146): Xaa equals any of the naturally occurring L-amino acids
  SITE (148): Xaa equals any of the naturally occurring L-amino acids
RGRAGAHRGLGDPPAPAGDGHQRGPGARAPRGDAGDPGRAAAGQRHLHVRGQQRGRQRHLLRHADRAPRAGRNRTPGEAHNETLAALRAPXDLTTILVSTAMGCITFLGLVLFCFVLLFVWSRGRGQHKNNFSWSTPSARWMGPDXAXG

SEQ ID NO: 5309 - protein, 190 aa, Homo sapiens
  SITE (18): Xaa equals any of the naturally occurring L-amino acids
EARGLFSPWTSCGPRGAXRVSAGLQMAPGPNRGSTQGCLGGRDGVSGQHWQLPGLVPHSAWHEPHGGLVPVPGSGVVSRVCRLGLGLWELFHCACFQHVSGWGYAWSRGVWGIGSGGMWVSTHREAHRDEPLGIPCWRLVEGCAHLPCFPTSVPPQSPPGAWGGGQRRAQEPAGQSSACVCWVLHSLCLQ

SEQ ID NO: 5310 - protein, 100 aa, Homo sapiens
VRTRMSLVPLLASFPAGAVLHQWTERRLVNHKQYLEAKRLLKEFQARYRQLVSGSLRTVFGTTPLPMACPALSESQPKFGHFLEFMDEFCQEPTASDSQG

SEQ ID NO: 5311 - protein, 160 aa, Homo sapiens
  SITE (9): Xaa equals any of the naturally occurring L-amino acids
VEPPPAHAXPSTPANRRSGADPTRAPQKPQLQNPAPGKARPASERRRPHMFIRPVLTPACGEGPPRPDPGCHGVQGQTGAWQRLRLAALADDLNHTGLHGHRVWAAQGSRGHHFVQQQVHEFFVGHKTPQVELQKVAVQFELLEPQTPKSSTRNKIQEGF

SEQ ID NO: 5312 - protein, 90 aa, Homo sapiens
LQSVFHSLGSGGPELWPLRGFLWTRAAECVQASPQECPAPDSLANPWSGQRELGGSGSGLTSISRASPACSCGKNAQLRMNTPHQEPPCS

SEQ ID NO: 5313 - protein, 68 aa, Homo sapiens
PAYRGCALECFCLFDVWGLTAIYLNIKSPPQGEHGWYITCMFVRYAYVRTPSVNIRSSSSNLLTNPFN

SEQ ID NO: 5314 - protein, 109 aa, Homo sapiens
VGKKVDGDKQPLLKRTAMQNGITPGSWTMLCFLFVCLFVFVFFFLRRSLALSPRLECSGAISAHCKLRLPGSRHSPASASRAAGTYRCPPPFFFFFFFCIFSRDMISPC

SEQ ID NO: 5315 - protein, 73 aa, Homo sapiens
  SITE (1): Xaa equals any of the naturally occurring L-amino acids
  SITE (46): Xaa equals any of the naturally occurring L-amino acids
  SITE (52): Xaa equals any of the naturally occurring L-amino acids
XIAALGPDVLGFLRACNRKLNGMSVWCGLCLMSFLTFRCRLFQLLXFHFPEXLCFCLPCEQAFGRTCLMQKRK

SEQ ID NO: 5316 - protein, 69 aa, Homo sapiens
DEKSDKVVIHVAGVQKAGGGQRWGEPWVLRGDPEEGCSHTCASFHPLCEQGCGHLPHLKRTNLRISRWL

SEQ ID NO: 5317 - protein, 124 aa, Homo sapiens
  SITE (8): Xaa equals any of the naturally occurring L-amino acids
  SITE (93): Xaa equals any of the naturally occurring L-amino acids
  SITE (103): Xaa equals any of the naturally occurring L-amino acids
  SITE (105): Xaa equals any of the naturally occurring L-amino acids
FLEAVWCXTQQGPFVGQQEGGVGGLSRRGTMRAFHEPSQALLHHGRPGPPSRPWGCSGCRQRLGRPDSGVRSRDWGRRARTGKRGSDQSRPCXLPGAQVGTSXLXLCTNLNPPPERMCVRSQKR

SEQ ID NO: 5318 - protein, 118 aa, Homo sapiens
  SITE (99): Xaa equals any of the naturally occurring L-amino acids
  SITE (114): Xaa equals any of the naturally occurring L-amino acids
  SITE (115): Xaa equals any of the naturally occurring L-amino acids
  SITE (117): Xaa equals any of the naturally occurring L-amino acids
LTISGRLAQAMGGELSATSTPEVGKLFLFTLAVTCCHAPVPKTVNQAVRLDGLRLLLIEDNPLTQRITIEMLKTSGAQIVAVGNAAQALETLQNSEPFXAALVDFDLPDIDGIXXAXQ

SEQ ID NO: 5319 - protein, 92 aa, Homo sapiens
  SITE (56): Xaa equals any of the naturally occurring L-amino acids
IRHEATGSPALSGPSAALGSLTMRCCLWATATALTFPFGPSRTAGALTGVRSSPSXPGLLLLASWVRGLWREHHGQLGGGGLKRGPQLGTWC

SEQ ID NO: 5320 - protein, 19 aa, Homo sapiens
TRSYLIRKARQAKARRIAP

SEQ ID NO: 5321 - protein, 52 aa, Homo sapiens
  SITE (4): Xaa equals any of the naturally occurring L-amino acids
IRHXNKTAANLVVETGQDGVQIRSLSKETTRYNHPKPNLLYQKFVQGIRGCG

SEQ ID NO: 5322 - protein, 46 aa, Homo sapiens
PRETPSLLKYKKKLAGRGGHTPVVPAYFRRLRQENCLKLAGVVEVA

SEQ ID NO: 5323 - protein, 50 aa, Homo sapiens
  SITE (31): Xaa equals any of the naturally occurring L-amino acids
SSNTVRRCPETAGLPSLALVGVELSEASPGXSRRKVEEGSSGAVGWVRVP

SEQ ID NO: 5324 - protein, 23 aa, Homo sapiens
  SITE (3): Xaa equals any of the naturally occurring L-amino acids
LMXILCKCRMVEMTTKDLECDIN

SEQ ID NO: 5325 - protein, 114 aa, Homo sapiens
  SITE (29): Xaa equals any of the naturally occurring L-amino acids
  SITE (47): Xaa equals any of the naturally occurring L-amino acids
  SITE (62): Xaa equals any of the naturally occurring L-amino acids
  SITE (92): Xaa equals any of the naturally occurring L-amino acids
  SITE (109): Xaa equals any of the naturally occurring L-amino acids
LQAPRCASPASPSRLRWRPRGHPPGPPTXGPQPRGELIPRRPDPAAXSEEGLRMESSVDDGXTATTADAASGEAPEAGPSPSHSPTMCQTGXPGPRPPAPQMAPLTPLXPFGAK

SEQ ID NO: 5326 - protein, 134 aa, Homo sapiens
  SITE (38): Xaa equals any of the naturally occurring L-amino acids
  SITE (50): Xaa equals any of the naturally occurring L-amino acids
RPPPRPGRRALVLARARESAELPLPAGWEEARDYDGRXFYIDHNTRQTSXIDPRDRITKPLTFADCVGDELPLGWETVYDKQIGVYYMDHINKLTQIEDPRGTVEARQERMLKEYLIVAQEALNAKKEIYQIKQ

SEQ ID NO: 5327 - protein, 74 aa, Homo sapiens
NLISLATGDTRSILVYIDSGSMAHQASTSRRVGTEGHATCPEYSRMLILLDDTAPIGIENWEWEENLKVVHTCL

SEQ ID NO: 5328 - protein, 107 aa, Homo sapiens
NRDIKKKIFLYSCTIFCVLSCVITKEPKSYKIENTVKVSCLLLKKEKHFKINLMLPEYPVLIKSTVVYSNILGPSHFTHRSLTDSARATFSTESPIRGKCPIHVYHF

SEQ ID NO: 5329 - protein, 53 aa, Homo sapiens
TLPWKTVNIILECEQPETTQEKGKKNSEDAKSWVASPFSFLIKGTIYKKKKKK

SEQ ID NO: 5330 - protein, 45 aa, Homo sapiens
  SITE (43): Xaa equals any of the naturally occurring L-amino acids
NFHVRHLDYDTQGRSCLNVNSTEGRVAHSDILSVRLIHQMGAXSG

SEQ ID NO: 5331 - protein, 124 aa, Homo sapiens
CEARGGSGHGGRAERAGVCGGPAELLPKGSKEEQRDYVFYLAVGNYRLKEYEKALKYVRGLLQTEPQNNQAKELERLIDKAMKKDGLVGMASWEAWPGCGGTGRTHRTCCVQVQILKETRDPRR

SEQ ID NO: 5332 - protein, 77 aa, Homo sapiens
  SITE (51): Xaa equals any of the naturally occurring L-amino acids
  SITE (57): Xaa equals any of the naturally occurring L-amino acids
MYFSIPTPYSGSLASEAEEFGLRSRCGDSWEGFGFALEKDRSGSCKEGERXRGCKPXDTVQKASEGYRDGSSGHRTK

SEQ ID NO: 5333 - protein, 36 aa, Homo sapiens
  SITE (10): Xaa equals any of the naturally occurring L-amino acids
  SITE (36): Xaa equals any of the naturally occurring L-amino acids
KYQSAGCFCXKNSLDCGVEDHSPHSTVTGMKTLDIX

SEQ ID NO: 5334 - protein, 36 aa, Homo sapiens
  SITE (3): Xaa equals any of the naturally occurring L-amino acids
  SITE (4): Xaa equals any of the naturally occurring L-amino acids
  SITE (8): Xaa equals any of the naturally occurring L-amino acids
  SITE (9): Xaa equals any of the naturally occurring L-amino acids
LWXXYARXXPKDHHPYNGEIDLPILFKAYLTNVWIF

SEQ ID NO: 5335 - protein, 101 aa, Homo sapiens
GRGKLFLCPSRCFISFLVCFLGRLCVIWFYFSLLFRFQNIFLSVLDSLLPFYRMSLFRLSVHHAIGYSCCSVIFITCGYFPNDVLFTFIFKLIFHQPVSTI

SEQ ID NO: 5336 - protein, 76 aa, Homo sapiens
RRGVGIQAVVFPFGASVFSSAEWERWGWEGKDGRGRRQDGTRPHPRGPSSYIGPPIHPLTLPATMLHWTLSHFLLQ

SEQ ID NO: 5337 - protein, 93 aa, Homo sapiens
SGLFFFFFFFETESHSVTQAGIQWHYLSSLQPPPPRFKQFSCLSLLSSWDYRHTPPHAANFCIFSRDGVSPCWSGWSRTPDLVICPPQPPKVL

SEQ ID NO: 5338 - protein, 274 aa, Homo sapiens
  SITE (2): Xaa equals any of the naturally occurring L-amino acids
  SITE (3): Xaa equals any of the naturally occurring L-amino acids
  SITE (7): Xaa equals any of the naturally occurring L-amino acids
  SITE (216): Xaa equals any of the naturally occurring L-amino acids
FXXGPLXHARAAASVMDICRIRLRILCVIAVDRYSKFHSAMYLFLGNLAASDLLAGVAFVANTLLSGSVTLRLTPVQWFAREGSAFITLSASVFSLLAIAIERHVAIAKVKLYGSDKSCRMLLLIGASWLISLVLGGLPILGWNCLGHLEACSTVLPLYAKHYVLCVVTIFSIILLAIVALFVRIYCVVRSSHADMAAPQTLALLKTVTIVLGVFXLCWLPFLNSKPNSSTLAAVTSGSELGTKLGVIMVIAVSCVKLLSAHNSTQHTSRKHKV

SEQ ID NO: 5339 - protein, 176 aa, Homo sapiens; identical to SEQ ID NO: 2867

SEQ ID NO: 5340 - protein, 134 aa, Homo sapiens
  SITE (107): Xaa equals any of the naturally occurring L-amino acids
GKNSSSEHVHNFSKNTAHASPPKCWQATVHADSPPQRKIRGGEMETPEQCQCIKPQVKGLPRQLDLSSHPLGSLQVHFASFCSCSKTFTPAIKLALDYHATLRLPGXIPSSPPGGKDGVCCRPIGFAAGNSSTI

SEQ ID NO: 5341 - protein, 68 aa, Homo sapiens
IEKTHKDLRFFLFCFFVLLLLFFLRQSLTLTQAGVQWHNLRSPQPPLPGFKRFSCLPLPSSSDYMCVV

SEQ ID NO: 5342 - protein, 108 aa, Homo sapiens
GSTHASGNDEATAPPTSTGGYTKHRLLTGLPGPTSASSATGQDCLEPDTEEPNLSAPKRPLDGTRAQPPGRGSCYRTAFSRTAAPRKRLGDKIVFNVNLSSVFVSTLR

SEQ ID NO: 5343 - protein, 113 aa, Homo sapiens
  SITE (41): Xaa equals any of the naturally occurring L-amino acids
  SITE (46): Xaa equals any of the naturally occurring L-amino acids
  SITE (99): Xaa equals any of the naturally occurring L-amino acids
  SITE (101): Xaa equals any of the naturally occurring L-amino acids
  SITE (106): Xaa equals any of the naturally occurring L-amino acids
DSSVESGNSESFWLPPRLYHLESHHAEASSTLSAWLASGLXQDARXRRIHHHPAGCSECHPPGKQHRVPLPSWAPPTSSPSGMQNVLGARLLGRAGNNXAXFGTFXPQGIFKT

SEQ ID NO: 5344 - protein, 107 aa, Homo sapiens
  SITE (11): Xaa equals any of the naturally occurring L-amino acids
HQFLWFLEFTXEPIFVLFKPSGFFLLLPQFLQDNYFGSEIIVFSAKDSSSLPFSCDRDDFPVNNHSHERPRNQHPNPSQAASPSFPTAKQIIAQVSNEESRIALDLL

SEQ ID NO: 5345 - protein, 80 aa, Homo sapiens
  SITE (38): Xaa equals any of the naturally occurring L-amino acids
RLSEGRNAPPFPVVKWHFNEQSLHESLFGEEFRLADRXLALVIPPEEDVQIQACKVIVSLQYPPGLRGRPSSCQPRCFFF

SEQ ID NO: 5346 - protein, 93 aa, Homo sapiens
  SITE (31): Xaa equals any of the naturally occurring L-amino acids
  SITE (74): Xaa equals any of the naturally occurring L-amino acids
  SITE (81): Xaa equals any of the naturally occurring L-amino acids
  SITE (89): Xaa equals any of the naturally occurring L-amino acids
IINYLLHPEPVRFSTPNQTLGWVREKRGCLXPPHSAQLSSLSDPPELRAEGLGAGAAWVPMPLSVPRSPPFHGXRGGSSIXNLPRFGGXVGRV

SEQ ID NO: 5347 - protein, 63 aa, Homo sapiens
  SITE (8): Xaa equals any of the naturally occurring L-amino acids
  SITE (40): Xaa equals any of the naturally occurring L-amino acids
KDKKISWXWWWAPIISATQEVTQKNGVNPGGRGCSEPRSXRCTPAWATERDSVSKKKKKKKKL

SEQ ID NO: 5348 - protein, 64 aa, Homo sapiens
  SITE (33): Xaa equals any of the naturally occurring L-amino acids
VISPLHFSAYELKHFAFPPAVFESTVLKWRNMXLFCFVLFFNKVSTSNHIGHVLLKLIGLQDGF

SEQ ID NO: 5349 - protein, 149 aa, Homo sapiens
LCIFSLGPFYKFCRCPPREVTVCPGATSGFCRGLFIHPLATSVSLLGPSGTTPSRPRKAAGLSRCTPPSVLLCSENKKKKKKKNSRGGPYPIRPIVSRITIHWPSFYNVVTGKTLALPNLIALQHIPLSPAGVIAKRPAPIALPNSCAA

SEQ ID NO: 5350 - protein, 80 aa, Homo sapiens
DSCQDILPSELMEHSCAPVTSGSLDLAEGRSPKVARSLHVQSQVTRGHPHWPRLSLSWKRPTQSRLWVESGWCIVLPHRR

SEQ ID NO: 5351 - protein, 110 aa, Homo sapiens
RGSPPRVASALELVDPPGCRNSARAPLHLSSSGSHEKSSQYAVGRTCKESRRTDRNFTREKGKTDWSGKYTYRMPGKAWAEGAGLRLKCFSNMLLDFLFLSAVCFLPSKA

SEQ ID NO: 5352 - protein, 93 aa, Homo sapiens
IRHERDTAFPSRAAHGCCERLHNVRVMTMVSEDPHLLAAVGLWDLVQVASPHDVMQDTLSSFYSKMVVVICPGFRDRQTWDGIPALPPTCWIP

SEQ ID NO: 5353 - protein, 89 aa, Homo sapiens; identical to SEQ ID NO: 4675

SEQ ID NO: 5354 - protein, 83 aa, Homo sapiens
IEHVIMFITILFIPYSCFLPIELSFFLIISMKKVRVLTPSHICGYFSQIVIFLPHRKTFHFKIMNLSSGFILLWTGTLTTLPN

SEQ ID NO: 5355 - protein, 65 aa, Homo sapiens
  SITE (65): Xaa equals any of the naturally occurring L-amino acids
ENEKTELGVVRLACSHYWVLERLRQGDHLSPGVLGQHRQYSETVSLKKKKKKKKLEGGPVPNRLX

SEQ ID NO: 5356 - protein, 55 aa, Homo sapiens
  SITE (15): Xaa equals any of the naturally occurring L-amino acids
  SITE (20): Xaa equals any of the naturally occurring L-amino acids
  SITE (29): Xaa equals any of the naturally occurring L-amino acids
  SITE (31): Xaa equals any of the naturally occurring L-amino acids
  SITE (40): Xaa equals any of the naturally occurring L-amino acids
  SITE (46): Xaa equals any of the naturally occurring L-amino acids
KSQRMFINCGGYLAXLCPLXLSVVIAGFXLXLYNPLKYSXKYCCCXYENLIECFL

SEQ ID NO: 5357 - protein, 59 aa, Homo sapiens
QKQALEKNFSFAYGASSEDELICPSSSCCCYLASFNSCEAKSLLSLKSEHAKFEYLMYL

SEQ ID NO: 5358 - protein, 57 aa, Homo sapiens
FKNPDLGVIVLLPKRKCYSFIDCTSFFKAYFYLRKLTLVCSHILNSQLSNYFFIPIN

SEQ ID NO: 5359 - protein, 121 aa, Homo sapiens
IRHEGTCSEHVCEGMESFMQLHLLCPCSSFTPSSILGSFFLLLGILDTAIVDRGRNVVSASRDGTARLWDCGRSACLGVLADCGSSINGVAVGAADNSINLGSPEQMPSKLIMICSIVLFS

SEQ ID NO: 5360 - protein, 19 aa, Homo sapiens
GAVCIILGRETKCYIKRYV

SEQ ID NO: 5361 - protein, 96 aa, Homo sapiens
DRVSCSVSQAGVQWHDLSSLQPPPPRFKVIPASASHEAGTTGTHHHAQLIFSLFTNMRVLPRLVLNSWPQAILPWPPKALGLQASLQLKWKLPEKA

SEQ ID NO: 5362 - protein, 96 aa, Homo sapiens
VKLQHKSKGPLGKDTVGFFHSAIGHERHRRRRQSVTQLTGFRPFLRKQSGSQTLKKSIFICLFPHLSLCQLCNSLLLLSCFYQYIAKFLFHFDFFF

SEQ ID NO: 5363 - protein, 80 aa, Homo sapiens
  SITE (38): Xaa equals any of the naturally occurring L-amino acids
  SITE (63): Xaa equals any of the naturally occurring L-amino acids
SNVSLFCPPYWFLSHARQDITFFDANKTGQLVSRLTTXVQEFKSSFKLVISQVSGPVAPTTSXHTLSHVDSPGQPCPPQP

SEQ ID NO: 5364 - protein, 89 aa, Homo sapiens
SQLFWLVAMGKLRMLVRQWTEEFTFLCFPAQLYLSNLYSISKRWSWNGAPWSFPVSCSRPGHRREYPQLSFYSFLPVPYSNRGGALTGF

SEQ ID NO: 5365 - protein, 216 aa, Homo sapiens
  SITE (13): Xaa equals any of the naturally occurring L-amino acids
  SITE (124): Xaa equals any of the naturally occurring L-amino acids
  SITE (158): Xaa equals any of the naturally occurring L-amino acids
  SITE (177): Xaa equals any of the naturally occurring L-amino acids
  SITE (186): Xaa equals any of the naturally occurring L-amino acids
  SITE (193): Xaa equals any of the naturally occurring L-amino acids
  SITE (209): Xaa equals any of the naturally occurring L-amino acids
VCVISPQTVALGXPAQANVIVEAQALHQHGSVVPGVRLGEPRAEAPFHPLPPGKGLSRYFPQTLISPLDSLFIPFSRLSQPHHTPDTFLPPLQLLDRRQGHPAYPLSQSGCLGADILAHLLLLXLLFFPPLPSISSKPEMGLEVCRKTSRCYHSTNPXEKMSLVRPLLYLDLNSSCXKSQLGLGLXAMGQNSXCWSRQWDWKKFTFLCXPGQTVLE

SEQ ID NO: 5366 - protein, 82 aa, Homo sapiens
  SITE (27): Xaa equals any of the naturally occurring L-amino acids
  SITE (52): Xaa equals any of the naturally occurring L-amino acids
  SITE (53): Xaa equals any of the naturally occurring L-amino acids
  SITE (73): Xaa equals any of the naturally occurring L-amino acids
EESPQLEGFQHAGRCPRSSRQKGRYLXRTTENPEVSKCQEENEKDHQVWAGXXEYMKIQFKVLENQGKILMGXGKPEWLFEP

SEQ ID NO: 5367 - protein, 162 aa, Homo sapiens
  SITE (104): Xaa equals any of the naturally occurring L-amino acids
  SITE (110): Xaa equals any of the naturally occurring L-amino acids
  SITE (138): Xaa equals any of the naturally occurring L-amino acids
SSSHMPLAHLLEHIYSLSDYPTPISISTILFLALHLLSNILPSSFLLLMFKYFLKFSCLFCQCETRVVISKSLLGCSYFFDLCYSLSKYFPASLLSVVLFTSLXASNVFXLKSKAHWYHIQSSIMYSANLTYYHAHVXFCCFQSSVLIYLSRKLHSHPLPLE

SEQ ID NO: 5368 - protein, 46 aa, Homo sapiens
  SITE (13): Xaa equals any of the naturally occurring L-amino acids
  SITE (18): Xaa equals any of the naturally occurring L-amino acids
TGSSNVVAVTQEXTQRKXTASNFYNFISDLTNQHSRLTAPTTRPTK

SEQ ID NO: 5369 - protein, 60 aa, Homo sapiens
LLFVLDPVRVTLQCRWKESRTAERSSGPIFQDYCLLKTLESSENRFPSERGGRNKKKKKK

SEQ ID NO: 5370 - protein, 114 aa, Homo sapiens
  SITE (55): Xaa equals any of the naturally occurring L-amino acids
  SITE (61): Xaa equals any of the naturally occurring L-amino acids
  SITE (95): Xaa equals any of the naturally occurring L-amino acids
ATAPSPNSTSFHDKNSTKLSLERTYLNIIKATYDRPTASIILQYSPVFSSNDFFXFFLRAXVSLCCLSWSAVAILAHCNLCFLGSSEHIWVIFVXLLDKVSPCIPGWSQTPGLK

SEQ ID NO: 5371 - protein, 56 aa, Homo sapiens
ARVSFHDPGWSAVTQSQLTAASTSWVQAILLLSLLSSWGYRCVPPHPANFCICIYI

SEQ ID NO: 5372 - protein, 59 aa, Homo sapiens
PRVRGRVGGSGERTPESPEQPHRRRRPSYHHTPGGAVAATAGPSHHHRNHEQRGRDPAA

SEQ ID NO: 5373 - protein, 62 aa, Homo sapiens
  SITE (57): Xaa equals any of the naturally occurring L-amino acids
FLWSWWGWESMVCFDWVFKVLKCHQFIIKGGNVDLKGSLPFVLLGIVCYFTLLQLTXWWFPS

SEQ ID NO: 5374 - protein, 279 aa, Homo sapiens
  SITE (276): Xaa equals any of the naturally occurring L-amino acids
DPRVRTHVSLHGTELCDESYPALLTDIPVGDLNPGEQLEKMLYVRCGTVGSRMFLVYVSYLINTTIEDKEIVCKCHKDETVTIETVFPFDVAVKFVSTKFEHLERVYADIPFLLMTDLLSASPWALTIVSSELQLAPSMTAVDQLESQVDKVVLQTGESASECFCLRCPSAGNVEGGVATGHYIISWKRTSAMGNVPVISTVITLPHVIVENIPLHVNADLPSFGRVRESLPVKYHLQNKTNLVQDVEISVEPSDAFMFSGLKQIRLRILPGTETXNVI

SEQ ID NO: 5375 - protein, 158 aa, Homo sapiens
DPRVRKAFTSDNNECNEPEKSFSLDSTIDTDQRVLRIQNIDDTDKYDMGVNQNSAAGKQEQINLIQDVQSSEYKESLMDLSHLSKCDSIPATEKSYKCDACEKVFHQSSALSRHQRIHTREKPYKCKECEKSFSQSSSLSRHKRIHTREKPYKCEASD

SEQ ID NO: 5376 - protein, 149 aa, Homo sapiens
  SITE (60): Xaa equals any of the naturally occurring L-amino acids
  SITE (130): Xaa equals any of the naturally occurring L-amino acids
  SITE (144): Xaa equals any of the naturally occurring L-amino acids
YSDCGLTFVKHQGIHLREKPYTCNECGKDFRLNSHLIQHQRIHTGEKPHECNECGKAFGXTSCLIQHHKIHGREKSYECNEYDESFNHGSDLVLQQEVLTREKAFDCDVWEKNLGQRAHLVQHQRIHTKXKPYECDERGETFSXIQASF

SEQ ID NO: 5377 - protein, 103 aa, Homo sapiens
  SITE (52): Xaa equals any of the naturally occurring L-amino acids
  SITE (53): Xaa equals any of the naturally occurring L-amino acids
  SITE (54): Xaa equals any of the naturally occurring L-amino acids
KMTAGSGFPKSPIIHTFVHGSVHDLFLILCNTCEIFRTLSNSSFCPKPRHYXXXPNRLLLPAIGVPEQYHGTMRNPALMNSLYNPGAQAWFLRVTPWPPGKSE

SEQ ID NO: 5378 - protein, 66 aa, Homo sapiens
DPRVRLNSAEMKWMSEDDTYSESPSVLILSYPPLPSSFHPSPLCPLSPFPSFHLPHSCPCKFAMSP

SEQ ID NO: 5379 - protein, 116 aa, Homo sapiens
  SITE (114): Xaa equals any of the naturally occurring L-amino acids
KCPEAECFRLRCELGPLHQQESQSLQLHFRVWAKTFLQREHQPFSLQCEAVYKALKMPYRILPRQLPQKERQVATAVQWTKAEGSYGVPLWIIILAILFGLLLLGLIIYILYKXGL

SEQ ID NO: 5380 - protein, 163 aa, Homo sapiens
KVRLQVPVRNSRVDPRVRVNEILLTSNRLENVQHKMFKGLESLKTLMLRSNRITCVGNDSFIGLSSVRLLSLYDNQITTVAPGAFDTLHSLSTLNLLANPFNCNCYLAWLGEWLRKKRIVTGNPRCQKPYFLKEIPIQDVAIQDFTCDDGNDDNSCSPFLAAY

SEQ ID NO: 5381 - protein, 45 aa, Homo sapiens
  SITE (21): Xaa equals any of the naturally occurring L-amino acids
  SITE (28): Xaa equals any of the naturally occurring L-amino acids
ILKDLYVMLKSLVFVPRALGXHCIGDCXDHICISYRRPLSLLHRG

SEQ ID NO: 5382 - protein, 125 aa, Homo sapiens
  SITE (119): Xaa equals any of the naturally occurring L-amino acids
HIDTWLALRKCVHNTIPFTKPVILCFACFLESPVYLLQVLMPRQHPGPSDFLGWEPRNSISPYPANVEHPWTRCRLSEAQAQRAACLQGLCRNTAQDGSRGQGLGQCGPLSSLQELQAXPSPGRN

SEQ ID NO: 5383 - protein, 63 aa, Homo sapiens
ADTPTCVANLIHFQRRMVPSVSFHDLLFMLMPLGKLYLPIQSALRGEGKGCGNTSLSYYQGIF

SEQ ID NO: 5384 - protein, 62 aa, Homo sapiens
  SITE (19): Xaa equals any of the naturally occurring L-amino acids
RFFLMVKPCICPLCSASSXVLEQDKLGKGIVFGCWPAPEPYFPVLTFCKQTVVPAQALGLGL

SEQ ID NO: 5385 - DNA, 9339 bp, Homo sapiens
tttttccatggtttggactggatatcggtggaactctggtcaagctggtatattttgaacccaaagacatcactgctgaagaagaagaggaagaagtggaaagtcttaaaagcattcggaagtacctgacctccaatgtggcttatgggtctacaggcattcgggacgtgcacctcgagctgaaggacctgactctgtgtggacgcaaaggcaatctgcactttatacgctttcccactcatgacatgcctgcttttattcaaatgggcagagataaaaacttctcgagtctccacactgtcttttgtgccactggaggtggagcgtacaaatttgagcaggattttctcacagtatgcattttttagcttatatacaatttatggtaatttgattgttaaaaataatgccagtagcaagtggtgaaataatttccatctctaatggaacttgaattttcttgagtcaaatgaagattaaaggtacgctagtgataggagttggccatctagaggtggttgtctagttcagatgtatggacgacaatcagaaccactaaaagggtagcattttattgctcctttagtatgaaaaattagggcatctgctatacgttgaggaagaaactacctaaaaggaacatcattagatcatgaacaatgagattgaaatataattaaaatcatttcatgtcataaaattgttttcagtcttgtctaccacataatttctcttgtctccctcagttgtttgctggcatgttcactaactgaaaaaaataaggaactctggtcaaaagtggtgttttcaggctcagggctggtctgagatgggtgactgcagagccctcctctcccagaatgctttctgatgtgttctgtgctgcacacttaactggagtctcgccaccatgtctggcccctggggaatgctgccaggcgctctatcttgctttcattgagtgaacactggagaacattgtgagcaagaccttgaggctaggtcctttcagggtggatggtgggggtaggccggagaactgacaaatgaataagccaagatcctgaccgtcagggtgcaatacagattgaaaatgtcttcagtgactgactgtttttctgttgctaaatgagagaatattagtctgaaagagattctgcctttttgttttgttttgttttcttgagatggagttttgttcttgttcccaggctggaatgcaatggctcaacacaacctccacctctcgggttcaagcgattctcctgcttcagcctcccaagtagctgggattacaggcatgtgccaccacgcccggctaattttgtatttttagtagagacagggtttctccatgttggtcaggctggtctcgaactcctgatctcaggtgatctgcctgcttcagcctcccaaagtgctgggattacaggggtgagtcaccttgcccggcccagattctgcctgttattctgcatgtcttttagtagagatggggtttcaccatgttgtccaggctggtctggaacacctgacctcaagtgatctgcctgcctcggcctcccaaagtgttggaattacaggtgtgagccaccgttcctggcctcaactttttgactaacatgccttggagttcttcccacttcagaacataaagatcctcttcatttttgttttgttttgagacggagtctcgccctgtcacctaggttggagtgcagtggtgccatctcagctcactgcaacctctgcctcctgggttcaagagattctcctgcctcagcctcccgagtagctgggtttacaggcgtgcaccaccatacccagctaatttttttttttatctttagtagagactgggtttcaccatgttggccaggctgatcttgaactcctgaccttgtgatccacctgtctcagcctcccaaagtgctgggattataggcgtgagccaccgtgcccggccgatcctcttcatttttagttgctatacagtgctccataatacgaataataatttagtcattcctttattatttaaatggaattaattgattatgaaacagttcaaattttgactgctaaaattcccctccctcccaagaggctgtagctagtttagatagtgaaaaaaatcttaccttctaactggatactttcagccttttggcttcagtttgttaaataatgtgtggcctcttttgatactgctccaaagccttgagatggtcctctgtcacagtccttgtggctcccaccctgtgtcacaaggtggtttctgatagtgctgtggcctgagcttggtatcagccccattgtccctgtaagcagagatctgaatttctgtttgaaggttgataaatgctgtggttttttttttttgttttttttgttttttttttggtcacacttattcagctgctgcagtagtttctatgtagagtgtatttgggtctgtagtagcaggagtctgtctcagcactgtgtccctaggtttgctcctaaatctgttctgtaaagcatgcacaaataatacacatctgtgagtgcactttcatggttgtttcacgtagtggggatgccttattgaatggaatttttgtttctgttggcttattaaaaagtctgagtacattcttatttcattacagataggtgatcttcagctttgcaaactggatgaactagattgcttgatcaaaggaattttatacattgactcagtcggattcaatggacggtcacagtgctattactttgaaaaccctgctgattctgaaaagtgtcagaagttaccatttgatttgaaaaatccgtatcctctgcttctggtgaacattggctcaggggttagcatcttagcagtatattccaaagataattacaaacgggtcacaggtactaggtaagttgtatataaaactcactgtttattcttagtatcctaacgggctgagttttcaggtattacatgtaactacaccttcaagaacctgttaggtgaaagtgtttctggattatgcaaacaaatgtttctctttgaaaattctgattttatgacctagttttctttaatctctactgttcaagatttattatcctaggtgtttcttaaaagatcacatcagcagactcattgtagcctttgccctcagatagtttatggtgtgcatacacaaagtagctaaagttattaggcagcatctgtaaggagaaggcacgggaaaggacctagctctgaaacctgtgtaaatttcatgcttccacacacatgtgtgtgtagaataatgatgtattctatgtatgtgatttagaagttgatatgtactgatcagtagaaaaattattgagggaaggtagtatgaaaagagaggattagccgggcgtggtggctcatgcctgtaatcccagcactttgggaggctggggcgggtggatcatgaggtcaggagttcaagaccagcctggccaacatggtgaaaccccatctctactaaaaatacaaaaattagccgggcgcagtggcaggcgcctgtgaatcccagctactcgggaggctgaggtgggagaattgcttgaattcagagggtggaggttgcagtaagccgagattatgccactgcactccagcctgggtgacagagtgagactccgtctcaaaaaaaaaagaaaagagagtattagggccaggcacggcagcttatgcctgtaatcccagcactttgggaggccgaggcgggtggatcaccagaggtcgggagttcgagaccagcctggccaacatggagaaaccccatctctactaaaaatacaaaattagccgggcgtggtggcacatgcctgtaatcccatatacttgggaggctgaggcagaaaaatcacttgaaccaggaggcaaaggttgcggtgagccgagatcgtgccattgtactctagcctgggcaaaaagagctaaactccatctcaaaaaaaaaaaatgaggattagatggaagaagagaatgtttcggcttaagggtcagaggtcacttcaggaaaaacaggcatctagggattgggataaacaatttttttaaaaaaacagttgtgatttaaatagaggagtaatttttttgtgacaaaacacgttgcaggaggagtatgtttgggggtgtactgataagccagggtgacaaggtgcttggatgagaatgactcagggaatgtacttggagaagggaaagggaggaggtgttagcatggccccaggcgtgtcaggctaatttgcacctgaggctcttcatacttggcagacagccagactgcactggggacatgggccctgtgttttgtactttgcatgttggctcacatgcatatgtaccttaaaggtgtatatcaggcaccttatcttttcacagacttgtttcctaccagtggcatttgcatgattgggttggatatgtgaatatggttttggggttcataaatgttaacttcttgttcttatttttaaaaatgttataatactgtgttaattgtttttaatcatagtcttggaggaggaactttttttggtctctgctgtcttcttactggctgtaccacttttgaagaagctcttgaaatggcatctcgtggagatagcaccaaagtggataaactagtacgagatatttatggaggggactatgagaggtttggactgccaggctgggctgtggcttcaaggtaagggggcatgtgtgttctaagaaatacaggcgggccgggcgcggtggctcatgcctttaatcccaaaactttgagaggccgagatgggcagatcatgaggtcaggagtttgagaccagcctggccaacatagtgtaaccctgtctctactaaaaatacaaaaattagctaggcatggtggtgcgcgcctgtagacccaggtacttgggaggctgaggcaggagaatcacttgaaccctggaggtggagggtgcggtgagctccagcctaggtaacggagtgagactctgtctcaaaaaaaaaaaaaaaaaaaaaaaagacataaaataataatattgggcatattttttaaaaaagctctattgagatataatttacgtactataaagtcagctgtttgaagcgtacaatttagtggtttctagtatatttacaggattgtgcaaccatcactgtaatcccaattttaggacatttttatcatcctagaaagaaaccttgtgttcattagctacgactctccattccccccacagcccctgccaaacagtaatttattttcaatgtaggtttgcctcttctgaacatttcatataagtggtatcatacagtatatgatcttttgtgattacttcttcatatagcatatgttttcaaacattcacattacagtgtgaatcagtactttattcctttttattgccaaataatatttcttttttctgagacggcgttttactctttttgcccaggctggagtgcaatggcgtgatctcggctcaccacaacccccacctcccaggttcaagcaattctcctgcctcagcctcctgagtagctgggattacaggcatgcgccaccaagcctggctaattttgtattttttagtagggaaaggatttctccatgttggccgggcaggtctcgaactcaggtgatctgccgcctcagcctcccaaagtgctaggattacaggtgtgagccaccgcgcccggctgccacataatatttcattacgtggataatactacattttatccatttattggttgatgaacatttgggttgtttccattttttggttataatgttgaacatttatatgtaagtctttgtatgtatgcacacacacacacacatatatatatatatattttttttttttttttgagacggagtcttggtctgtcgcccaggctggagtgcagtggcgtgatctcggctcactgcaagctctagctcctgggttcatgccattcttctgcttcagccttccaagtagctgggactacaggtgcctgccaccacgcccggctattttttttgtatttttagcagagatggggtttcactatgttggccaggatggtctcgatctgctgacctcatgatccgcccgccttggcctcccaaagtgctgggattacaggcgtgagccactgcgcctggcctgcacatatatttctaattctattgggtatatacctgagagtagaattgctgagtcatatggtcacttaatgtttaatcttttgaggaactgctacactgttttccaaagtggcagtcccattttacaatcttagcagtttatgagcgtttatatttcttgtcaacatttgttattatctgtcttcttggttttagttgtcttaataggagtgaagtgatatcttgtagcgtttttattttttaagaggcagggtctcgccctgttgcccacatgagagtgcagtgttgcgatcataactggctgcagcctgtgtctcctgggctcaggtgtttctcctgcctcagtctcctgagtcactaggactacagctgtgcactgccttgcctaattttttttttgtagagatagggtcttgctatgttgcctaggctgtcctggcctcaagtgatcctcccaccttggcttcccaacatgttgggattacaggtgtgagccatcactcctggctgaacattttttttgtgtgtgtggcagggtctctctctgttgcccaggctggagtgcagtgacaccatcttatctcactgaaacctctacctcctgggttttagtgattcttctgcttcacctcgcaagtagctgggattacaggcacacctgtaaattatgccaacatgcctggctaatttctgtaattttagtagagatggggtttggccatgttggccaggctggtctcgagctcctgacctcaagtgatccacccaccttggcctcccaaagtgctgggattacaggtgtgagccactgtgcccagcccgaacatcttttcatgtgtttactggccatctgtctgtagtctttggataaatgtctgctgaagtctattgctaagtttttagttggattgtctttttattattgagttctggatacaagtcccttattagatacataattcgcaaatgttttgtcccattttgttagttgtcttttcacttccttgatggtgtcctttgcagcatggaaattttaaattttgatgaagttaatcttatctatcttctgtcacttgtgcttttggtgttatgtgtaagaaatctaagatcatgaagaattgcctaatttaagatcatgaagaattgtttattttcttttaagagttttatagttttagctcatatatatatatgtgtgtgtgtgtatttttttctttttttcttttttgagatggagtcttgctctgtcaccaggctggagtgcagtggtgcgatctcggctcactgcaacctccacctcccgggttcaagcgattctcctgcctcagcctcctgagtagctgggactacagtgcgtgccgccacacccagctaatttttgtatttttagtagagacagggtttcaccatattgtccaggatggtctcgatctcttgacctcgtgatccgcccaccttggcctcccaaagtgctgggattacaggcgtgagccaccacgcccgccagttttagctcttatatttagctcttatatttgatccattttgagtaagtttttgtgtatggtgtgaggtagagctccaagttcatttctttttgcgtgtggatatccagttgtcctagtaccatttgttgaaaagatgattctttccctgttaaattctcttggcccctttgtcaaaaattagttgaccatagatgtttgggtttactcctggactcttaagttatgttccattgatatatatgtctgtttttataccagtaccatactgccttgatactgtagcgttgtattaagttctgaagtaagaaagtgtgagtcatccaacttgttcttttttcgagattattttggctattctgggtaccttgagaatatgaattgtagggttaacttggcaaggtctgtaaataagacaactgggattttaatagagattacattgaatcttttggccatcctaatacaaagtcttctgatccaaaaagatggaatgtcttcccattgatttagatctttgctttctttcagcagtgttttgtagattttattgtacaggtgttaatacttttgttagatatatccgtaagtgttttattctctaatgctattataaatgaaatcattgtctccattttgagatcgtttagaagtacaattgtttttcgtatattggggcacatggcttttactaatagaaaaatcatatgtatacatgcttgtttactaagttttaggcacttggtcaatgctgttgattttctgtttgtaacatttgctcgttggtcatcacttccttttctgattggaaaattattgtagcagttctgctgagcatgtactttgaagtactttatcttctagggaaacctgaaattcttaagcagctcactctgggactcagctgtctgtgctttactctgctctgatagagcagtttaccagatgtgcatgtggccatctgagtggaacagctgtgcagttgagatgaattgctgttagaggtgttgtcctggaactgtctggttgcaggagcaatggtgccttccagtgcatctgatgagattctaactgaatatgtgaatatctggtatccaagctagatttcagtagaaaccgcagggaaagctgtctgctcatttagaatgttggagggctctgtttgaagtttgcatttctctttgaacagatgctccattgcaaaataaaaggtttgaagatttcaacaatgttgccctaaaagctaattttatttcaataaagtaacattcaagttctgttgggctttgttgctgttggtttagcaatgggattttttttcccccatcacagctttggaaacatgatgagcaaggagaagcgagaggctgtcagtaaagaggacctggccagagcgactttgatcaccatcaccaacaacattggctcaatagcaagaatgtgtgcccttaatgaagtaaggggacatggatttctttaattgctctaaggaaaatactgaacttaagtgggccccatcacgtctgttttctcagaacagtgcctaaatgtagtcatttggggtggggtttgttttagcacgaagttaaaactcttcaaatacagattaatcttcttttttttttttttaaactgaagataaacattgctacttgtctagaggtaaaatg

SEQ ID NO: 5386 - DNA, 90 bp, Homo sapiens
ccttgggaaaagaggatctaggatccagttggtgcagcttatggcttgtccctgtgtgtatagttgttaaattattcttttatttttatt

SEQ ID NO: 5387 - DNA, 739 bp, Homo sapiens
tttttagtagagaccaggtttctccatgttggtcacactggtctcgaactcccaacctcaggtgatcctcccaccttggcctcccaaagtgctgggattacaggtgtaagccaccgtgcccagcctacacccttaaaagttattgaggaccccaaataacttgctcattgtggattgtatctatccatatttattggattagaaattaagactgagaaaaagttataaaacacaagaatacagatgcacacgttccattagccatcaaggtgatctttctcccatgccagtagtctctggaaaattcctgagaggatgaaaataaaaaaatcacccatacaaaaaaaaaaagtgtcaatattattatgaaaatagttttgaccgtgaggaccccctgaaagggtctcagggaccctcgggggccctggatcttgctttgagaacagctgatctgggctaatgagcccttttccagcccctctgtgtgagacctcccagaaaccactaagggccttggaagagcttggcaaagaaagaggtgacaggatgattgaggagagccaccctagggaaagccttcagaggaggctttgggacagccccggtcggtggaggaagtcccagagaggcagtcggaagggctagggaccagctgaggcctgtgacctgaaaatcctttcaaaagaggacgcctggaagcctggggaaggcacagtgggtggggtagaagactggggct

SEQ ID NO: 5388 - DNA, 845 bp, Homo sapiens
  SITE (756): n equals a,t,g, or c
agtggggatttgtagatcttcatttcccaaacttgcctgctgagaagaatcgtcccacccatggcaggttcctgcactgcgccttcagggccctgccctgagatctggactgggcgggcctgaggtgggccaggaaatctgagccggaggcccactggggaggccgcgagtgaatcttgtctctgtggatcctttgtaaggattgccatgctaaaccacttgccctctcatccgtgaccggagagaattgggtcactcttccagacataccacagactcctgcttctagacagcacttggctggagccaggctggccttcagggttggtcagtctccacaggggactctggcctcccgtgggctgccacagggccaaccccagtgaaagaaatgaaatgactgaatatgttcatgtcattagaaaaaggatgcagcagggggtggggaggagttggttaatggaatcaaatttgcagcaagataggagtctagtgtttggcggcactgtagggtgactatcgctaacaataatttactgtgtattttcaagtagctagaagagagaattttgaatgttcctgtcaacctaaataacaaagacaggctcgctaaagatatttaatcaaaagtagggcattgcaacaggaatatgtgtgctgtagtaaactgtgtgcatattccaggaggtaaagaaaaacaaaggtgactgggcgcggtggctcacgcctgtaatcccagcacttttgggagccgangcgggtggatcacgaggtcaggagatcgagaccatcctggctaacacggtgaaaccctgtctgtactaaaaaaaaatatatatatatat

SEQ ID NO: 5389 - DNA, 7451 bp, Homo sapiens
caggagttgacagagctgcagtcccagatctccgacacatctgtggtgctgtccatggacaacagtcgctccctggacctggacggcatcatcgctgaggtcaaggcgcagtatgaggagatggccaaatgcagccgggctgaggctgaagcctggtaccagaccaaggtgtgaggccaccaggggcgtacttcctcctgccagggtccttggtggcagcttcccttactcctcaacttgtctcaagccttcagggcctgggtcccactgttctggcaggcaccagtggtttaagtctgtggtgctcagccctggagaaaatcccaagatgggaggacagggcagaggaaatagatatggattaatcattataatagctaaaatatggcaagtacttacacagtactaggctcatgtaattatgactcatgtaatccacagaacagccctattagataggcatcattattacccccatttgttttatttaatttaatttattttatttccattttttgagatggagtcttgctctgtcacccaggctgaagtgcagtggtgcgatcttggctcactgcaacctttgcctccctggttcatgtgatcctcgtgcctcagcctcctgagtagctgggactacaggtgtgcaccaccatgcctggctaattttttttgtattttgagtagagacgaggtttcaccatgctggccaggctggtctcaaactcctgacctcaggtgatccacctgcctcggcctcccaaagtgctgggattataggcgtgagacaccgcacccagcctattacccccatttaaagatgaggaaattgaggcacagagaggttaagtaatttgcctaactgcatacagctagtagatggaagagcagggactaaatcctgaatgtgagggccctagacctgggaggcttaatcatcacatctacttcatggtggcaggacagttgatggtgcaggggctgagggagcaggagtgggtgctggggtgaaccagtgttcctgaagaagggatcccgaggcaaggattgagaggtctgcccctgcagagatagagagtcattcatggtgcctgggtgagaacacaagtatgccaacaagaagacctgggttcaggccctcgttccatcactgattggctgtgtgatccctgggtggtgctttctcttctccaagactcactctcctcacctgtgaaatgggtgttctgggtgttgaatgggtgcgaatctcaaactctcagtgattctccagcagaagggcatggtgggagtggaagagccctggggtccatggggatgggactgcggagccttgtctgtcctccctgcctggcttggaggagaatgaatcccttcctcacactgctgtctggtctcctggcatcgggcaaaggttgatgggagtcagactgtccttccctgaaaatataagttgggaggggccttgggtggggagagggatgagttacctgtactcactgcccatctctctgccataactctctgtatggcccctccagtttgagaccctccaggcccaggctgggaagcatggggacgacctccggaatacccggaatgagatttcagagatgaaccgggccatccagaggctgcaggctgagatcgacaacatcaagaaccaggtgggacaagtcctcctggcttcccctgctacttggggcatgcaggggtggccagctgaggccaaactcaggatgtggagcaggaggttcccatctcccggccaaagctggtgccactgtctcagacccccttgtgagatctccagcacagaatgttcttggccaggtcctggcatgggctgatgggagaaaggtcctggatgtgcacagagcctgtggagggagactcaggctggctggccagaagaaagccaccactggttccacattgatactgagcactctgcttgcacctggttctggctgcagggcgctgtccctgggagctcatcattcattgcagggacagaggacagcagaagaccttataatgactcacatggccctttcccacccactccaacctcactttccacgattcccctcactctgctctggccatgctaacctgcttcctgcatcttgcatttgccaagaatggtcatgcttcagggcctttgcacttggcgttgcctccccctggaatgtggttctcccagctctgtccatggttgttgttttctcctccctggggtttaggaaaagaccccttctcagagacggcactctcaaacaccagcccctctatcggcagcctgtctgaagttctttgaagcccctgtcactctctgaaatgttctgtcttattcattaagtgattgatggtccctacctccactggaatataacagatgcctggagagcagggaccctgtctgtctggttcactgctcctctcttccagcacctggcacatggcaggggcacgggtctcagatgagagactgcctgggaggatgagctttgctggaagctggggttggaggtgttgatgggggaagggcccccagccctggctgagtagtgtgtggccagggcagctcagcctgtgcaggtgtctgcagtggagagagggggagggcacacatgtggaagcttcggaaagctgatttccagatgagctgtgggtggtgggggggtgtgagggtgatttacccacaaatgtcctccccttggagccctgtgggcctgtttacaggagggcggaggctgccttggggcacagaggcagggccgtgagtcaccccatgaagtgggccagcttccaggccaggaggggaagcacagaataacaaatggtggtttcccaaaccctgcagcctctactacatccggttctcctctcacacaacagggcggatccaggcctatagccaggtgtctaccaccactgaggggcgtcatggggagctacaaggggtctccagaggcagcggggatggcgttggctctgggggcaccagtgtgacagggcagggcaccgagctgtggccgaggggcagagtgtcagagggcctcctggggaatgctgtctctggcagagaggcagactgcctccactgagggaagaggatctgaggatagagaatggccggtaagaagggagagaagtccttgcccaggggacagggatggtggttttctgagctaaacaagatgaggcctgggactattcaggctcctggcagtgggggctgagcctaaagcagagggcactctaaggccagggagaaagtggcagctgctccaggcaggcacaggtctggaaccagagcatccctgaccaaacccggggactgtgagtcatgcatctcatggcatctgggggcatctaggaggtctctctctgctcctagtccctcttattctgcgcctgctctctactggttcctattttataggtggtttctggtctttgtcagctgctctgacatctgtagactcgtattatagatcccatgctcttcgagctcctgcagctgggttctggtgctgggggactgggggtttgaaaatcataatagcattcattaaaaatgatcacaatagcatttattaagcacttgctgtgtgctagacattgtgccacggacatcttgtatattatctcatttcatcctcaaaatctcctgatgttctcttagaaaagaggggactttggcttagcagggttgattcatccatggtcacatagctagtaagtggcagagccagaactggaacataggcgttggatatccaaacctatgtgtttaacccttaggattctctggtacttgggggagtaggtggtgccaatgaagccaccttaagcaagttgcccgggtgctcactgcaggatgggcaggcaggaaggcagactggtgagccccagcttacagctgcactgctgcccacagcgtgccaagttggaggccgccattgccgaggctgaggagcgtggggagctggcgctcaaggatgctcgtgccaagcaggaggagctggaagccgccctgcagcgggccaagcaggatatggcacggcagctgcgtgagtaccaggaactcatgagcgtgaagctggccctggacatcgagatcgccacctaccgcaagctgctggagggcgaggagagccggtgaggacaaggaacctggaaaggggatgcttctagggctccgtggggtttggggcttgacattcatccatttacaagcatttcctgtatgcccctcctctgcagggcactgggtgtggggatgcagggaacacagagctgatgcttgcctctttgccttcaatgagatgaccttctagaaggaaagaccatggagtgtgaagctcagtgggcaggttgaaatgataacagtccctttgtgtgtgcggcttcttagggttatcatatttgatcctcagcacacattcaggtagtcaggtcagagacgattgattccttagtctccagaggggaaagctgtggttgagtttcattaattgagggaatagggccagagtgcagtcagggtgtgctgattcctgctccaaggatcttccaggacgccaggctgcttctcactacagaactaagtgctacatcatgtggggctaactgactgtggtggagggggatcgttttgtttgtccccagagatatttgcagactcacttgcagtcagagaggaggctggaatgggggagtctgatagcacattcttcatgaaccgcatgccacctctgtctatgcagctgggccttcatgggcatattgttgggttcgaactcaacctcttcattcttggcttgttataagacaccatggcaacagagaatacgtaggacatgtttctgccctcagggaggttgcagagggtggaggagacaaaacatccacagaggaaacccccagagaccagtaacttacatttgtaaaatgctgagtgtatacaagaacttattcttttctgagtattattcctaaggggccagagagagacatgacggaggatgaatggagcagcagggaagggaatggggagtgaaggggtgctagggccgagggcctgggtgctgggaggagaagaggagacacagggccgcagggtatgagtaggaggcggagaggaggaggaaggggctttgcccctgctgctgacccgccttctccctgggttagcacccagtcttctttgtgggaagaagaattaacaccaaaagtctctgggaacacagaagctgatctgggcacagggagctccagccaagatgcctctctctgctttcgcctctcccataggcacagggcccccaaattctctacaacccatacctgggccttctgttgtcatagaagtcagagttgggggactcttagagtggtacctgatctggcttcctcccatgggaagaaaaggggactgaagctcagaaatggtcagtagtgtgcccaaggtcacacagcacgcagagacatcctcttctgaaagcttaatctcagtctgagctgctgtaaccaggcttagatccgggtactctgagaggatatggttcccccaaccctggggggatatggaggtagataccttgcttttatctcttaacttatcagagttgtggtccagaaactcattcaaactgggaggcctactttaagaatacaaagttaccaaaaaaaccccacttacttagaatgagaaaagtcacacagatcactagagccttggacattcaggcctcttctgtctgagttccttaggcatcgtaccagaaattcttcgagttgctgcctgactgcaacctggctccctctccccacccacaagtgccagcaactcccagcaccagcaggggccatttaagcaagccccctggaagctttcagcaaacctctctctttccctcagcctttgctctgcctgcttcctgggcttggggccgcagaggccagcgaggctcccttcattccctccaccaaagtgaggtcttccctgcccccacagagcaaactgatccccaaggccaaggccttggtgacaatgggactgtgagtcacaaaacaaacatagccagctgtcccgaatggatttttaatttctactgcaagacctgtttcagccccactggctgcttaaagccacccccactccctgctccttccttagtcctggctggagccccattcaatcagtcaacgattcacgaattattttgacatatattaagcaatgacttctccaggcctcatactggggataaaagtatcaataggccacagacacctttaggattttatgatacggtgaggaaaggcagccatctacataaataacacatacagctaccatcaccgaatcccaggtgctcagggctttagacagattatgggccctcacaggcccatgaatttggtcctgtagttgggcccaagacataggtgggaaatggaggccctgagacattgcctggggtcaggtggccagtggatagaagggccaaggtgaacactcccttcctgcatgcctcctcgctccttttacaaggctgaaggcaggctggaagtgtggggcaagaaggaaaaatcaatgatcctgcttggggcctggaaggagagagggctgagagcgcttccctcccacgctaggaaagagccgtcctcactgtctgtcctctgcccccaggttggctggagatggagtgggagccgtgaatatctgtaagtccttggctgcggcccatgggaagcatcccttgtgctgtttagatggggctgggtctagagaatggcagactggcccagggccctgctggaggggccaggagactccttcctttctacagggattgacaggtcccctggagcacatactgccaggctcaatggcctgggaagcactacaagagggcagggtggggccaggagcacctggggagcagccctaccctgtcagatgctccttctgggttggcccatggaggggggcaggggtgagggagaggggcagctggggcaggagggtggggtgcagtgaagggatggggtccctggtagggagcctcacgctgaagagagccctcctcttttctctcccagctgtgatgaattccactggtggcagtagcagtggcggtggcattgggctgaccctcgggggaaccatgggcagcaatgccctgagcttctccagcagtgcgggtcctgggctcctgaaggcttattccatccggaccgcatccgccagtcgcaggagtgcccgcgactgagccgcctcccaccactccactcctccagccaccacccacaatcacaagaagattcccacccctgcctcccatgcctggtcccaagacagtgagacagtctggaaagtgatgtcagaatagcttccaataaagcagcctcattctgaggcctgagtgatccacgtg

SEQ ID NO: 5390 - DNA, 138 bp, Homo sapiens
gccatctgctctgcaccgaaattggattctcctacgcagaggagaaggtggagaagattctccgtcttccggagggtagctactgccggtagctccgatttccttcggatcccctttcaagggcaagcagaaggaaat

SEQ ID NO: 5391 - DNA, 380 bp, Homo sapiens
gcgcccacgtgcggagtccccgggttaggaaaggccgcgcatccggaggccacgcagagcctcggggcttgcgcagaggggctgcggtgagtcctgaccctgagtgggggtcacggggctcgttgctcgctgaagtgaacacggttgcagctgtgcacagtggcggagggagaggatgagggactctgacccaaggttatgtggcagtgaggggcaagcagaaatgggggcctccggaccccaccccgagacagggctgctggccgctgcactatgctgaatatagcccaaattcttacatgggtcgtccccggggaatgctcatttttcaggctccagagcttgagagaaagtgcgaacccggtccctgagcaggtctg

SEQ ID NO: 5392 - DNA, 463 bp, Homo sapiens
ggcatggtggtgtgcactctgtagtcccagctgttcaggaggctgaggcgggaggattgcttgagcccagggtttgaggttacagtgagccattatcacactgctacactccagcctgggtgacagcaagaccctgtctccaaataaaaatgtgtcactttcttaatcagctgaaaaataagtgtttaaaggttataaggcattagttgatagaatataaagataggattttaaaacatgtcatcttcattatgaagggaaaatttgaaaactagtggtatcttttaggactaagggattgaagcacacacacactgatcctcttattgtctccccaaagacatccaacagatataacaacattatagcgaaaaatcttctcagaaattagaaactatgacggtatcccatctgtctacctgaaagttagtgtagagtgatgtgccaggagcccagcacatta

SEQ ID NO: 5393 - DNA, 463 bp, Homo sapiens; identical to SEQ ID NO: 5392

SEQ ID NO: 5394 - DNA, 288 bp, Homo sapiens
gtgtgtatgtgtgtatatgtgtatgtatataaaatataaaaccttttaccatggctaaatgcttgcaaagtgaattttcagtcatttttctttgtgaaagacacaatgttggtttccttggcggcaaggtaacttttaatttaatcttgtagaatttaaaaaataaaagtttttagcaaggtttatgccaccaaacctatttaatagtcctattaagaacgtctaacatcctgggccaggcatggtggctcacacctgtaatcccaacactttgggagccaaagcagg

SEQ ID NO: 5395 - DNA, 288 bp, Homo sapiens; identical to SEQ ID NO: 5394

SEQ ID NO: 5396 - DNA, 1839 bp, Homo sapiens
gttttgccatattggccagactggtctcaaactcctgacctcaggcgatctgcctgcctcagcctcacaaagtgctgggattataggcgtcagccacagtgcctggcccataggggggtcttatgtgggtgagggaggggggctcctgttgagcagtgagtggatgagtcagggcagctctttcctctagccatcagcaacctctgccagacctttgcacggaggcttgggggaaacccatcaaggccacagtcctggacaggacctgggagagtgggtaagagagggtgcaaggacaggtgcctgaggcctcagacctagctgacagccagggaccaatcgccagaccgcacccctcccctgctttatttatttatttatttatttattattttttgagacagagtctcgctctgtcgcccaggctggaatgcagtggcgtgatcttggctcactataagctccacctcctgggttcaagtggttctcctgcctcagcctcccgagtagctggaattacaggtgcacgccaccatgcccagctattttgtatttttagtagagacggggtttcactgtgttggccaggctggtctcgaactccttacctcaagagatccacccacctcggcctttcaaagtgctgggattacaggcgtgagccaccgcacccagcccctcccctgctttaaacctgttcatgactccctgtttctgcctggataaccccttgtactggctttcaaggtctttgaagctatgccctggctggcctcattttagggagagcccgcttggctgccagtctcacaaatccccaaacctttctccacgctgtgccctctgcctggaatatagctccctgggcatgtgcaccccagtgcccgcccacctgtcaagaaccagctccagggacccctccagaagactttcctgacccaccagatgacccactgtgctccaaactaatgtcaccttcctgtgacactgtactcagctggtgcatgtctcctctttctgtggcactttgagagtcaggagaggaggaaccaggcctttttcatccattatccccccaaggagctcatgggtggggtgggcatggtgggaaggtcaagaggtgatggcagaatctcttccagccctgtaggtttggtcaactcagtgtgtgtcaatgggaaaaaccgagatcatcccctcaaagtagagatagccagagtgaggccacagcgattttatttggagaatgaagggcagaaccacagagatctcaggagggagggcaaaggtaactcatcgtcatccacagagaggggactcaggattacgctgtgcgtccaggccatcttccctcccagcccagccttggcacaagtcggccccaggatcatcatgtgatagagcctgaagcctgtctccccaagtccctggaaagtagacatctgtgacaatcctcccgaattccagggcacagggagcatggctgagcacgccagactgcctgggctcaaattctgtcctgccatgaactgcctgggtgtctttggacaagtcatttgacagctctgagcctccgcctttttatctgaggacaacaggaataatgagggtacccacctcatggggatgtgatgaggcttaaagaagaaaatgcatgcaaagttttagcacagtacctggcagtgagtatatgtgcaataatattaattattactattttatcaagaggcctggattctggtcccagttctgccactgttttccctccctgggcctgcttgagtttctgtctataaagtaggtgttaattgattaaatgagataatggatgccaaagaa

SEQ ID NO: 5397 - DNA, 3381 bp, Homo sapiens
gttttgccatattggccagactggtctcaaactcctgacctcaggcgatctgcctgcctcagcctcacaaagtgctgggattataggcgtcagccacagtgcctggcccataggggggtcttatgtgggtgagggaggggggctcctgttgagcagtgagtggatgagtcagggcagctctttcctctagccatcagcaacctctgccagacctttgcacggaggcttgggggaaacccatcaaggccacagtcctggacaggacctgggagagtgggtaagagagggtgcaaggacaggtgcctgaggcctcagacctagctgacagccagggaccaatcgccagaccgcacccctcccctgctttatttatttatttatttttttttttttttttgagacagagtctcgctctgtcgcccaggctggaatgcagtggcgtgatcttggctcactataagctccacctcctgggttcaagtggttctcctgcctcagcctcccgagtagctggaattacaggtgcacgccaccatgcccagctattttgtatttttagtagagacggggtttcactgtgttggccaggctggtctcgaactccttacctcaagagatccacccacctcggcctctcaaagtgctgggattacaggcgtgagccaccgcacccagcccctcccctgctttaaacctgttcatgactccctgtttctgcctggataaccccttgtactggctttcaaggtctttgaagctatgccctggctggcctcattttagggagagcccgcttggctgccagtctcacaaatccccaaacctttctccacgctgtgccctctgcctggaatatagctccctgggcatgtgcaccccagtgcccgcccacctgtcaagaaccagctccagggacccctccagaagactttcctgacccaccagatgacccactgtgctccaaactaatgtcaccttcctgtgacactgtactcagctggtgcatgtctcctctttctgtggcactttgagagtcaggagaggaggaaccaggcctttttcatccattatccccccaaggagctcatgggtggggtgggcatggtgggaaggtcaagaggtgatggcagaatctcttccagccctgtaggtttggtcaactcagtgtgtgtcaatgggaaaaaccgagatcatcccctcaaagtagagatagccagagtgaggccacagcgattttatttggagaatgaagggcagaaccacagagatctcaggagggagggcaaaggtaactcatcgtcatccacagagaggggactcaggattacgctgtgcgtccaggccatcttccctcccagcccagccttggcacaagtcggccccaggatcatcatgtgatagagcctgaagcctgtctccccaagtccctggaaagtagacatctgtgacaatcctcccgaatcccagggcacagggagcatggctgagcacgccagactgcctgggctcaaattctgtcctgccatgaactgcctgggtgtctttggacaagtcatttgacagctctgagcctccgccttctcatctgaggacaacaggaataatgagggtacccacctcatggggatgtgatgaggcttaaagaagaaaatgcatgcaaagttttagcacagtacctggcagtgagtatatgtgcaataatattaattattactattttatcaagaggcctggattctggtcccagttctgccactgttttccctccctgggcctgcttgagtttctgtctataaagtaggtgttaattgattaaatgagataatggatgccaaagaagcttctgagatgagtgattatttctgccctttgaagttcacttccccgaggctgcagggtgttgtcacccccactctgtcaggtctttactgggctctccgtctaggccaggacccgttgctgaagggtcagcccatctcctcccttctgcccacaaggcagaataagaggaaaaggctggggttgcctcagcggggtctgtggttagacaggacgaagaacttccttccggactgcaggatgctgccctgggaaggagccagaggtcgtgggactgatgctgttgtggggaggagttgcttccaggggaatggccaggcccagccagttaagccagagttagccagtggggtgaatctgttgggcagtgacctcacttccagagaccctgatggggccctgtttaaactggccccagggctcccaggatcacagactacaaacaaaaaagacacagaaacactattctccaggcacagagagccagaggcaagtggttaccaacaagactacactgttccgtccaccaagaacactcttcccaagctctggaagcggctgaccatccttgctagcctcgtttaagacttgcctcctcagaagtgacctcccgacaacacatgcattctctcagcatttactgtgccccagctatgtgttaggcactgttctagacctgtgaacaagaccaagtcccggcatggcgtggtggctcacgcctgtaatcccagcactttgggaggccaaggcgggcagatcacaaggtcaggagatcgagaccatcctggctaacatggtgaaaccccatctctactaaaaatacaaaaaattagccgggcgtggtggcagactgaggcaggagaatggcgtgaacccaggaggcggagcttgcagtgagccgagattgcgccactgcactccagcctgggcgacagagcgagactccgtccccctgccccctcaagaaaagaccaagtccctgcccatcccatatcaagtagcacctgacccagccctgttcttctcaaacataacacactgtttctctctccagtttatggcctgtctccccaccagaatgtatgttccatgagggcagggacctcaactgtttgcttcaccagtgtaaacccagtgattaactcagtgtataaacctgtcacaaatcactaaaacatgcccttgataaataattgttttgtttttgtttttttttgagacaaggtctgctgtattgcccaggctggagtgcagtggtgcgatcttggctcactgcaacctctgcctcctgggctcaagtgattctcccacctaagcctcctgagtagctgggactacaggtgcacgccaccacgcctagctaatttttcacatttttagtagagatggggtttcgccatgttgcccaggctggtctagaactcctggcctcaagcaatctgcccccctaagcctcccaaagtgctgggattacaggcgtgagccaccacacctggccaagcccttgataaatattcgttgactaaatagacacatagatca

SEQ ID NO: 5398 - DNA, 131 bp, Homo sapiens
tcacgcctgtaatcccagcactttgggaggccaaggcgggcagatcacaaggtcaggagatcgagaccatcctggctaacatggtgaaaccccatctctactaaaaatacaaaaaattagccgggcgtggt

SEQ ID NO: 5399 - DNA, 249 bp, Homo sapiens
cagactcagtgccattgtagatgtttctgcatggaaaatacataaacacaaatatctgcagttgccaatccaccaccatcttgcagccccaagagagccccgggaatccaggttcctttggtatttctgctccctgcccttggtgcatagcctccatccccaggacgacaagaaggctgactgagccctaacatcatcccacagtccagctgggaagagagccagcgacaaagccagagggagctagct

SEQ ID NO: 5400 - DNA, 249 bp, Homo sapiens; identical to SEQ ID NO: 5399

SEQ ID NO: 5401 - DNA, 249 bp, Homo sapiens
cagactcagtgccattgtagatgtttctgcatggaaaatacataaacacaaatatctgcagttgccaatccaccaccatcttgcagccccaagagagccccgggaatccaggttcctttggtatttctgctccctgcccttggtgcatagcctccatccccaggacgacaagagggctgactgagccctaacatcatcccacagtccagctgggaagagagccagcgacaaagccagagggagctagct

SEQ ID NO: 5402 - DNA, 429 bp, Homo sapiens
ccaggagggggtgaggccaaaggctcccctggggagaactcacgtttttccagagccccattgtgtgccagccaccgcacatagcaactgtctctctctcactcttctgggccatgctgtgactttgttgatgaggaggttgaggcacagaggggtggagggatgtgctgcagggcccacagctacaatgggcagagctggaaattgcaccaagtctgtctgatgcgggggtctcctctgctcctctggcctccgctgcatccctggagaatctctgagacttctggttagagcctgggtctaagccaactcccattattttcaagtgaggggaagggccgacaactgccagtgctggcccaccagagtctggcaccagccgaggagtgcacgcacccattggtggtgtggcggttcactgatccccca

SEQ ID NO: 5403 - DNA, 4080 bp, Homo sapiens
gcgaatggggaaggatttgaagtcacctttgggtgtttggagtgatcagagctgtctgccctcttggggagtgacagtgccccactctgttaagtcccatgcctgcccccaactcagcttcagccacaatgatgtagcctcttttcctttccatccacagggcacctggcctgggtggagcccactcctcagcacccacctcacttcttgcagtattctgcagaccccagccctgtgcctgtgctcctggacagctggagataaggagtgggccctggaagatgctcattcaggccctgctcaagattccagtcctggtggggataagcaccacttttgtgtgtctctgtgctttttgttttgctgtaaagacacactgataggttcacgttgtcgtttggacacaacatgcgcgatgcgtgtcttcacactaagccctagtcacactctctgcattgtttttttatcccattttttcctactgtggtacagaacatctcacataaaattgaccattttaaccactttttttgtttgtttgttttttgtgtttttggacagagtctcgctctgtctcagcctcccgagtagctgggattacaggtgcacaccaccacgcccggctaatttttgtatttttagtagagacggagtttcgccatgttggccaggctggtctcggactcctgacctcaggtaatccacctgcctcagcctcccaaagtgctgggattacaggtgtgagccacggtgcctgacctcattttagccacttttaagggtagaattttctggctgttttcattcatgtactgatagacacttgggttgcttccatgttttagctgttgtggaaaatgctgctttgaacatgggtgggcaagtggttttcaagaccctgctttcagttttttgggttcagagtaacgaatggaattgctgagtcatatgttaattctcatttttctaattgtaatttttgggggcacagcacctctccagcagcggcagcactcgacctttccccagcggtgcacggggttccaacttctccgcatcctcacctacgtgtgttttgttttttggtagtagtagccattctaatgcgtgtgatatgggatctcattgtggttttgatttgcatttccctaatgattagtgatgctaagcatcttttcatggcttactgaccattcatacatctttggagaaaagcctacacaagccttctgcccatttttgcattgagttgtttgctttgttgttgttaagttttatctgagctgtttttttatggtagggagagtgggtttgttggagtctccttgtatctcccagaaggaagccagaatttcagagatggccaggagggggtgaggccaaaggctcccctggggagaactcacgtttttccagagccccattgtgtgccagccaccgcacatagcaactgtctctctctcactcttctgggccatgctgtgactttgttgatgaggaggttgaggcacagaggggtggagggatgtgctgcagggcccacagctacaatgggcagagctggaaattgcaccaagtctgtctgatgcgggggtctcctctgctcctctggcctccgctgcatccctggagaatctctgagacttctggttagagcctgggtctaagccaactcccattattttcaagtgaggggaagggccgacaactgccagtgctggcccaccagagtctggcaccagccgaggagtgcacgcacccattggtggtgtggcggttcactgatcccccagccttctgctcgatctacggggaaaactggggaaggcaggaaggccaaggaggctcaactcctgcttcctaccgtggctcatttcctgggtcctttgctgtatgactgtctggatggaaggttcagagtcctctcaaaaaaggaaaaaagtatgggttttgacatcctgcgtggcttgtcctctgaggcctaaatctccagaagattcctggcctctcttgagaggtctttctctgatgtgtttgcgtgtctgtcaggaagcagcagtgatgcctagatgtggtacattcgacctcacctatgcctctccccaccccctctgggttcgttttgtcttccagattgctggactcgctgaagagagactacgcaggaaagccccagccacccatcaaatcagagagaaggaatccaccttcttacgctatggcaggtaatgattcactattgtggagtaagacttttttttttttgagatgggattttgttgtattgcccaggctggtctcaaactcctgagctcaagtgaccctcccacattgaccttccaggtgggagttagactcttaatcagaaattggatacattgttgtaaaaaatccaagccacgtggaagtgtataaactatctggaattatcttgttttctatgttctcacttgtttcattgttcctttcgactccctccagaatttaggttcctcaaaagtggggccctgcctatcctgtctttgctgtgcctccaggccctgaaattctccctgggctgtagcaggggctcaagtgaatgaaccccaggaggcatcttgggtaaaaattcagtacgattctatctttgcttttgcaactgcttatcatgcacatatacatgaacatgcaatctctcaactttttaatttcacctaacgatataacatggagagcctttcgtgttagaacgcacaggttcaccttactctatacattatggtgtagattcggattttcgcccttggcaccactgacattctgggccagataatcctatgttttggggggtcatcctgtgcaccctgtttagcacctagcaccatccctggcctctgcccaccagatgccagtagcacccctcccccaccggctgtgacaaaccaaaatgtctccaggcattgagaaacgtcccctagcaggcacaacactgccccagttgagaaccattggtgtaggtatttcatttgcatctattctcctgttaagcccctaagtatagttcctttattgaaacaagagtctgagaaagtaaaattaaaatgttaaccatgaatctaacttatggaattcaacctttgtagccagctcaatgccctgaaacccattgcttcaaactgatacgtgtatcttttccttaaagtgtcattatgaaaaatttaaatcaagagtttaacatcttcttaaaggtgaccagggtaaatttaattaagcaaatcaccaggctgcctcccagacgaagtcagtatataagcctggagactctttccaatgaggaaaatactgcttcagaagcccctggtgtgaacgatactgccagtgccaggagggcctgactcttcctagagtcctctttgttatcagcatcaccactgaaagatgggctccatgtggccctgccttcccatgagaccagcgggtctgattcctcatgttttgtttaagtgtcagatttgatggactgggggagatggaagcagaactgtgccacactgaaaggtgcctgtagctgatatctgcaaatgtagggttagcatggaagactaattccagcagttctttattttggtgttagggagctggtctaaaccttcttacagaggataaccaaattaggttgggcttttaaaagatttagtggtggtatttttgaggagatataatttgacccattgtattgtgatgttgagctatgaataactggatttttaaaatgcccattgctttaaaactgccacctattagaaagtttggtatttctggggccaggtgctgtggctcataccagtaatcccagcactctgggaggccaaggtgggcagatcacctgaggtcgggagttcgagaccagcttgaccaacatggagaaacccggtcttaactaaaaatacaaaaaattatccgggcgtggtggcgcatgcctgtaatcccagctactcaggaggctgaggtaggagaattgcttgaacccgggaggcagaggttgcagtgagctgggatcgttgctccagcctgggcaacaagagcgaaactctgtttcaa

SEQ ID NO: 5404 - DNA, 349 bp, Homo sapiens
agtaacttgttcttcacaatcactgccctcccaagaacatccaggatttcagcctcagtgctaagacaaccatgtctctccctgacacatgctcgctgctgagaattctaggaaaagcagagggctgtgcaggcgcccctgcccctaggctaggagagctggcaaatgcctggagacccaaaggcctcatcctcagggcggccaactcttctgttttagtgatatacagactatcttttattgtgatttatagtgcaacttaccggttcaaacaatactacctgtattcataaactttctttttcctttccttcctcactgcccagctttaggttcattcttgtaagtg

SEQ ID NO: 5405 - DNA, 349 bp, Homo sapiens
agtaacttgttcttcacaatcactgccctcccaagaacatccaggatttcagcctcagtgttaagacaaccatgtctctccctgacacatgctcgctgctgagaattttaggaaaagcagagggctgtgcaggcgcccctgcccctaggctaggagagctggcaaatgcctggagacccaaaggcctcatcctcagggcggccaactcttctgttttagtgatatacagactatcttttattgtgatttatagtgcaacttaccggttcaaacaatactacctgtattcataaactttctttttcctttccttcctcactgcccagctttaggttcattcttgtaagtg

SEQ ID NO: 5406 - DNA, 349 bp, Homo sapiens
agtagcttgttcttcacaatcactgccctcccaagaacatccaggatttcagcgtcagtgctaagacaaccatgtctctccctgacacatgctcgctgctgagaattctaggaaaagcagagggctgtgcaggtgcccctgcccctaggctaggagagctggcaaatgcctggagacccaaaggcctcatcctcagggcggccaactcttctgttttagtgatatacagactatcttttattgtgatttatagtgcaacttaccggttcaaacaatactacctgtattcataaactttctttttcctttccttcctcactgcccagctttaggttcattcttgtaagtg

SEQ ID NO: 5407 - DNA, 7763 bp, Homo sapiens
gctggggtggtgctgctgctatgagctgcaccatcgagaagatcctgacagacgccaagacgctgctggagaggctacgggagcacgatgcggccgccgagtcgctggtggatcagtcggcggcgctgcaccggcgggtagcagctatgcgggaggcggggacagcgcttccggaccaggtcaggcagagggtaggagtccagtgctctcggattctgggcactgaagggtggagagcgaggtaaagtgggaactcggcctggaatttattcccggtctcagagggcggcggtgagaccattttcctgggtcggggctgagaatcctgccctggagccctaacttctgcctcttcagttgcatctgccgctgttctctttaaggcatgcttagtctgtctctatttgtccagtatcaagaggatgcatccgatatgaaggacatgtccaaatacaaacctcacattctgctgtcccaagagaacacacagattagagacttgcaacaggaaaacagaggttagtcaggccttttcatatctggtaatagtttaaagttattgcaaaattgccctaaacatttacaaaagtgtacatatatttccaggtcagtacttttagtaggagagtcctcctgatctggcccagtaacaataaagtttgttagattacccttttcaaggtcatctgactaatattgcagcagcttaccaaagaggtgctgtgtagagttggtattattgcatggtttatttttaagcatcctcagatgtgtaacaaaagagttcatagcctcatggacttaaaatttaatgtttaagtattaatataaacactgaaggtaagatttaaggttttgtttatgttcttgtttgtgcaaggtgaagcagcagaattttattctaagggtatatattcttaggcttgattagtacattattaatgattgtggtattaatagttgtttaccagaggggtttcacatatatcattctactgtattctcatatcttcatttttatctaccacaatgcagttaagaaataggctcagaagaagctaaatgatttacttatgagtattaaccaagcaagttacagaactgaactcaaacacatgtcttctgatgatacatccattgttgtttctgcaagactttgcttctctgcctagaaagttacctttcacatagactttaactgttcagttttgcggacttaaacattgatttacaactttagattcatattatctatatagtgttacaaaattccaactgttaagactttggatttgggaactgtctctcagacatcactgccaagttcttttattttttgacagagctatggatttccttggaggaacaccaggatgctttggaacttatcatgagcaaatatcggaaacagatgttacagttaatggttgctaaaaaagcggtggatgctgaaccagtcctgaaagctcaccagtctcactctgcagtaagaaactttgaataaattcgaaatgaaccaaattgaaatcttgagattgttttagattgtgtgcttgtttttttgctttgtgagatagggtctggctcttgtcgaccaggccgtggtgtaatggcacgatctcggctcactgcaacctctgcctcctgggctcaagccatcgtctcacctctgcctccggagcagctgggactacaggtgcacaccaccacgccctgttaatttttgtggggttgtttgtttgtttgtttgtttgtttgttttttggtagagatgacatttcgccatgttgcccaggctggtctgaaactcctgggctcaagcgatccacccacgttagccttccaaagtgctgggattataggcatgaaccactgcgcctggccatgtgtgcttgtttttgaagaaaagtaagctcattttcctttcatgtttatcacatttgttgtttattttgccatggctttgtaaagatatgaatagaaagaaggaggataggggctgctcagatccttttatttgagtgggactaaggttccccctccctcaccaagatctcttttgaaaatgttcattaattcttagcgctcccaccaaacataatgccagttagtgttgaagctgcctggtaaacacttggttggttattacttatacatttaacttaagctccttgcttgtaaggcgcatgaattcacattttattcctaacatagtacctgacatacagcaggcagtcagtaaaccttttataaactgaaccacatagtatcatactatgttgttaggggagagaagtatggttttttaaaaaaacaaacatggcatagtttctgttctttgctaatttgggagactcagtaattgttcttatgtttataggtgcttcatggttgtcattgtacattcttgtgtactgtatcatttaattctagatgtatagggttggagcctactacttctgtgagatgtagtgaaatataagcttcatcttaaattccattgaatgcattttactgacttaaaagttttaggaaacagatattttaaatatttgaatggctttcatctggaagagaaaaatagattttcttctcgtatggaggaaaaaacttgaaccttgaaagagacagagtttactcagatagataaactttctaagtgatatgtccaaagatggaataaagcaccttggaatgtagtaagcttcctgccagtaaaagtattcaaatttaagttaaacagccacttagagatagtatccaacatccaatgggtagttaaactacaattgattttttttttccatttcaaatctttttattggagtgtggacctactgggggattgatgcactggacatagataattttcagaaatgaaaataacattgcttgcatcgaatcagatttcacccacaaaaatgactaaggccttaccagagttggcattggatgaaaccttagtcctttatggaaagggaatcatgtggccttctatttctgaaatagactaaagattactcatttattctctgcaattacagccatcagatcctttgaaatcttggaaggcatgagatgatgacatgagtgtaacacaaatccatattgaagagcccagtattttaaaattccccatgttcacataccaaagggttacttatgagctgatgcatatcacagataaccatatgattatcaacttgatgtctgggcaaagagcgaaaacagaaaatgcattctactcttcacttcttggttttaaatataagaaacattatatatattttaaaaaactgtattccttagtagtggtatcaatagaacatatacaactggaatgaggatccccttaaggaggccttttttttgtttgttttttaaataagttctagggtacatgtgcaaaacgtgcaggtttgttaacatatgtatacatgtgccatgatggtgtgctgcacccattaactcgtcctttacattaggtattcctcctaatgctatccgtccccactcccccaaccctatgacaggccccggtgtgtgatgttccccaccctgtgtccaagtgttctcattgttcaattcccacctatgagtgagaacatgcggtgtttggttttctgtctttgtgatagtttgctcagaatgatggtttccagcttcatccatgtccctacaaaggacatgaactcatccttttttatggctgcatagtattccatggtatatatgtgccacattttcttaatccagtctatcattgatggacatttgggttggttccaagtctttgctattgtgaatagtgccgcaataaacatgtgtgcatgtgtctttatagtagcatgatttacaatcctttgggtatatacccagtaatgggattgctgggtcaaatggtatttctagttctagatccttgaggaatcaccacactgtcttccacaattgattttttgaaagaaaaaaaaaaaaatatccgtgaatacaaggtcactttactatggcttcatgtctgaggactaaaattgtagggaaactccattgtaacttctgtatcatagattaaatgaacttttaaaaatcgtaatgcacatgcttttacgttctttatatctacagaacaggtgatttttccacctttgtttccttaatatcttcacaggaaattgagagtcagattgacagaatctgtgaaatgggagaagtgatgaggaaagcagttcaggtggatgatgaccagttttgtaagattcaggaaaaattagcccaattagaggtaagattgtagctaatttaggttcacagtatttcatagttttccgagtctggaagatatgccatcactatcccatcactgtaatatattgatgttttctgtgtgctcatgatttaaaattaaaactcctccttcatacccttttatacccttttgaagaaaggaaatatagtaaacagcaatcaatggaaataccaactatgtattggcaagaacttgaggtattatcatatgggaaggtagagggagtggaggggagaagttatatgtgagataaaatccttcatctgccataataagaagtgaagtagataatgtctaaaattgatgatcaggaaatagcagtataagcatattatttagaattacagaattaaataccaaaagaaatagataaaagtgttaaaagtggttgcatttggggtacaaagccaaagaactgcttgtataagccttgtagtcttgatttcttaaaagctatgtttatgtcatattttgattagaataggaatatgttacaaaaaaagttcggggtattagtgtgctcataaaattgttaaggaaaaacatttcaactttgagaggctgaggtaagtgaattgcttgagcccaagagttcaagagcagcttgggcaacatggcggaaccctgtctttacaaaaaatacagaaaattagccaggtgtggtggtgcacacctgtaatcccaggtactcagaggctgaggtgtgaggatcacctgaacctgggaagtcaaggctgcagtgagccacgatcatgcatgccactgcactccaaccgagtgacagagtgagaccctgtctcaaaaaaaaaaaaaaaaaagcaaagcatttcagtgaatggtttgaatgctgcttattacaaggtgctgtcctggggcctttgagaaataccagagagaaaaaaacagatacctgcccagagtctagtggaagggataaccctagtattatatgatattaaataatatgtaaatgctaggagacagatacaaataccgaaggaagcacttcatgtggtagaagattcgtcgaccacaggctctaatctcttagttactctagctgggacttccgcacatcttggtgaagctaaaaatgctttggtttaccagagttttctgcagaggataaggatgaagagcagaagctaccctctctagaaatcaaaggtagtgacaggtcccaagtaggaattaggagctagtgaaatgatagcatgaccttctatttatccccgatttacctcacttacggaaacagccctaaggaaatgtggggcaaattctaccttaatacttcaagtagaaaatacacgaccaccagattcagaccccagcaataccacatccaagttgtctgaatttggacaacttttaggaattttgtgagccagagtatcctcatctgaaatatatggatgtaggcaatgatacctaccctacagattattgtgagataacatatacagggcacccaagtagtacccagctacatgctcaataagtaatttctttccccctttccttccatttctctagaactgtaagatatccaggagaggagattaatcagagtgaaacgattattaggaattttttaaataaaagaaataatagtaaaactgtgggaaccaagaagaatataacagtgaattccttaaatggagaggaccttgttttttgtttctcctttgtaatcctaacacttggtatatagaaattactcagtaaattactactacaaaagagtatcattgcctacatcctacatgtaaatgtttgttaaatgaataaagtagtatttaaggaaattctcaactagtggattttttgtttccataaattttttaaaattaaaataatgttttctgctcctggctcaaaataatgtgttgttgtaatgcagttggacagtaaaaataccagaaataaacatgcctttttttttccagcttgaaaataaggaacttcgagaattattgtccatcagcagtgagtctcttcaagccagaaaggaaaactcaatggacactgcttcccaagccatcaaataactgaactctgaatgatggctggagattgtctatcaaggaaggaagttactgtcttcccattcaagtactgtccattaagtgtcttgcctcagatttgatttaatcttaattaaaggtatcaggtggcaatttagaattccagtcaatattggctgtccacagttctcagatgtgttaatgtgaatactacatgctgaatttcaccattcctttctcaaagagactacttttaattttcatttctgggaccttgatttatataaactatgttttcagttctttgttatttttcacatctctgaaactttgagcattttttataagccagcaatttattttacatagcattgtaaaatacacttctaggaaattttaggaaagatttaactgtttaaatctatttggcataaaccttgattttttttttccatttgacaaaaataatacaattccacagaactagatcagcagattctctgatttgtaatgtcattcacctgtgacattttaagtctctctggtgctaagaattggcactttatagcctggtgcctttacttttaatttgagagaacctactgctagtcccaggaaacacacttggaaataagtcagctattttttttgcccagtgatgctatagttgtcatattgtccaaagttcatattgttcaaagctgaggagcttgtcctgtgtatgtgaatgcacacatgtgcacttagttcaaatactaaaagtagcttttattaaatataatcagccaaaaacacacacaaaataaaaaaaacaaatataagtagtcagtttttcaatgttatcctactagttctacattctattttaatttttatacaatttccattttatagttaagaaccatcacttacttggattggatgtctttcattcctagcactaatagttggctttctttttttttgtttacatagaagcagggtttttttttatcttttttctttttttttgtttaagctatataaaaaggtgaggaagcagttttgttacctaatgaaaattattacactcataatgctgtgtaggcaacattgagattcaaatgcccagtggtcaactgggttcactcatcaactcattcccgtcccagtttactcacatttcaaatttataaatttcttcatgttatactattctatttagatttgcccagaattagttgaaataatgctaaacctgtcaatattttccagtaacattaagcaccatactgcatgggagagacacagtactaaaaagagttgttagtgctttatgtgagtgatatttctttcgtaatgctataaagaactacagttaaaataacaaaatattttaaagatgtcctaaaagcatctgatcccagtaataactaatggatgtcatctag

SEQ ID NO: 5408 - DNA, 114 bp, Homo sapiens
gctgaggcaggagaatcgcttgaaccctggaggcagaggttgcaatgagccaagatcgcgccactgcactccagcctggacaagagcaagattccgtctcaaaaaagaaaaaaa

SEQ ID NO: 5409 - DNA, 3033 bp, Homo sapiens
gataaatcgacatactaacttttccccctgcaaaattaaaagcctgaggtacaagtctaagaagcttttagtgctctacataatataaattctggctggtgttaatgctatgaagataatatgtagttagaaaattgagtcggggaggaatgctcttcattttaagtggattttaaagtttctccttgagtggatgaagaacttgcctggtttgcaaaaatcttagttcaaaattatattttctaacaaaaactgcattttgagaagataagctaattttactcagtagtaagtcaaatgaggaagtgcagagggtttttttacatatatatagcaaccttgtcaagtggtcctcacaagagtcataaatactttgtaattagcacagtatattcagcagtgtataactctacaaatagtaccttatattagtgtagtattatatcaatatcttatgtataattcttatattaataccttatgcataattggattcaaacattgaaggtctattttagtgttcttcaaaatgtgcttccctgacctactgaaatagaaacttggtgatgaagttcaagaatttgtattctaatcatctcaaacaattcctaaagacactgattttaaaatatctagtctaggccccattgtgtaatagttagcactctaaaagatgaaaaagaaaatagtctatgtgccaaccacttcattagtacttatgaatttaaaaatgaaaaagtctggtacaggagacaagtatatatataaaattataatgcagtgtgataaatccattatagtatgtataagatacagaagagggactttaaacttgagaattcaatagagataataaatgggtaggagggaaatagaaaactttggtgccacaaaagcaaagtatgtatggtattgccaataatagctaccatctattgagtgctttactacctgtcaggtactgtattatataaactccattttaactgtacctcattttgcagatactcaggcacaaggaggtggttatttgtccaaactggaaccaagattcaaacccagacagagtcttaagcacatttttaatcactaactaacttgagatgcctaaatgccaaatactgttgggagttcaagtggttcttgattagcaaaatctatttttattagtgcaaaagaaacaccacagcttataaagtattatgaattcaataaatggagtcttaactaatgagatattattttctagaatggtgtagctgagagtatgtgtgattcaactgaaaggaataatgtttaatcagtgactcttactatatacaggaaaaggtgcagttctgtctttcaaatctgcctccttaccatattggcttacatccctcatgctgttttcttgtgtttgctagaaagttgttgccaagccaaatgtcatggccatgttgaaggcaaggaagaaaaaatggaaatggcctgtgccagctatatatatcgccttttatgagggaaagcaaagctttctcagaaatcccaaatggattttcccttgacttaattgcctgaccagttaaatggccactggtacctgcaaagaaagcagggtacatagctgtcccaaataaaatcagtattagcaagaagaaagaatattgagaaagcaattaacagtgtctgtgactgtgacatgtctgtgactttatattgtcaagtcctttccccttgaatatagttttggaagaattagctgaaggagtgtgttgacattgaatggccaagagaatgggctgtagcagacatctgtcatttctcttttggctgcccagtatcctaactcctgtgtttaaggaatccctcacctaatgaggcagagcatttcttcctcctaaagaatttgaaagtaccaggtaatgttttctcagcctccttttgcagctaaggaagaaacatctgccttcaattttaaaattagtgatacaaagaaggagggaaccatgcagattcctttgaagatggtgattaacaacactactgcattcatctccacagaggtacagcaaaagtgatttagttagcgataacctctaattctatttttttatttttattttttgagacagtcttgctctgtcaaccaggctggagtgcagtagcactgtcttaactcactgcaacctccacctcctgggttcaagcgattctcctgcctcagcctcccaagtcgctgggattacaagtgcccaccaccatgcacagctaatttttgtgtttttagtagatggggtttctccatgttggccaggctggtctcgaacttatgacttcaggtgatccgcccgccttggcctcccaaagtgctgggattataggcgtgagccactgtgcctggcctgtaacctctaattcttgtttgctggctgtcctagagatcctgagaattacttttaataaaatcatttttttgctgttattaaaactaacctgaattgcctaaaaccaagaactctgcttgataaaataagcatagttttaggaacagccatgcagatataaattttatcaacactttatacataatttgggacttatatttaaatgtaatatttgatgcttataaaagggtaaatggggaatgcaaataaattatcaagcataataactcatcacctaacttaagaataacattatgagtgcttgtattttatctatttgagctcttctcctatctttgccgacccccccgctctctttttaatagatttgttcgaatgtagaaagacctaaaatacatatgtatccctaaagtgacttattttatagttttctttctttttgaacttcaaaaaaattgtatcatactctatgtagtctaaggatttggtttttttcactcaacatgtctctagaattcacaagttttattgttttatagctgtcattttcattgatgtatatttcattgttgggttatacaacatattgttaaggaatacatacatatataataaattatacattttttaaaaaaatccttgctaa

SEQ ID NO: 5410 - DNA, 726 bp, Homo sapiens
tctggagcccctaggagatactcagggaagcaaatccttgtttgggctggcaagcaaatccgacacgacgaggtccacaaactgtttctgcatcccagggctctgacgaaggcgttaagaaacagatgctgttcccgcgtaggctcccaggggccccagggaggtccaggtggactgcctctctcattcccagtagctgtcctgggactttgggatttcttctcagctttctccacctttcagtttctcagttgtttcagaaacatagcaatgacataaaaactgctatggagagaaagctaacatggtcccatgccttccaggcagccctgctgaaggatctaagttggccctgttcctgcaaatcatcaacgtgcctggactcgccagctaaaagcctgggccttccccagccttttttctggggcacctattcctctgccagtcctgctcccctcaccttccttgggcccgtcagagtcttttgtggtgctgtgcttctcagaggcaggatccaagcagatcagcccagcctagcccagctcaggcaggccatggccgctcaagggaaagactgccccagaagagcaagctggagaggctgggcaggggctgatggggctgggtacactggggaatgttagcaagactgggaaggaggccacattcctgtctgcagcagccgccagcgatggtcttcagcaataaaagttgtgtgacctgaga

SEQ ID NO: 5411 - DNA, 726 bp, Homo sapiens
tctggagcccctaggagatactcagggaagcaaatccttgtttgggctggcaagcaaatccgacacgacgaggtccacaaactgtttctgcatcccagggctctgacgaaggcgttaagaaacagatgctgttcccgcgtaggctcccaggggccccagggaggtccaggtggactgcctctctcattcccaggagctgtcctgggactttgggatttcttctcagctttctccacctttcagtttctcagttgtttcagaaacatagcaatgacataaaaactgctatggagagaaagctaacatggtcccatgccttccaggcagccctgctgaaggatctaagttggccctgttcctgcaaatcatcaacgtgcctggactcgccagctaaaagcctgggccttccccagccttttttctggggcacctattcctctgccagtcctgctcccctcaccttccttgggcccgtcagagtcttttgtggtgctgtgcttctcagaggcaggatccaagcagatcagcccagcctagcccagctcaggcaggccatggccgctcaagggaaagactgccccagaagagcaagctggagaggctgggcaggggctgatggggctgggtacactggggaatgttagcaagactgggaaggaggccacattcctgtctgcagcagcccccagcgatggtcttcagcaataaaagttgtgtgacctgaga

SEQ ID NO: 5412 - DNA, 926 bp, Homo sapiens
actgaagacaagacatcccccttcctccgggaggtgcaggtcaatctcatcgacttcaagaaatgcaatgactacttggtctatgacagttaccttaccccaaggatgatgtgtgctggggaccttcgtgggggcagagactcctgccaggtgagggtacctgtgggtggggctcaggtcccagcaccctggggatgggggaggcaggggtgttggggctgatgtgggaattgggaccccaccctttcccgctcatggaccacctgtcccatcctgcgaatgtgccccctctcccctgcagggagacagcggggggcctcttgtctgtgagcagaacaaccgctggtacctggcaggtgtcaccagctggggcacaggctgtggccagagaaacaaacctggtgtgtacaccaaagtgacagaagttcttcctggatttacagcaagatggaggtaagatccctgcagcaggacactgcacccagcaggctgggaacttcctcaggtggggaccctggaggagcacccaggttgtaggcagaggtcccctcagcgtccccatattcggggggtgttctggacagggtcaaatgtgatgcctggggtcaaatcccagctgtctgtgtttctttccctgcttttcttccctcagaacagagctcagcgggttgaaaaagggtggacctacaggccaggcaggcagttgctgggcagatgttctcccagaagtatttttttgtgtaaggttgcaatggactttgaaaacgtttcagtttctgcagaggattttgtgatagtttttgttatcaagcatttatgcatgggaatccgctcttcatggcctttcccagctctgtttgttttagtctttttgattttctttttgttgttgttgttgtctttttttaaaaacacaagtgactcca

SEQ ID NO: 5413 - DNA, 926 bp, Homo sapiens
actgaagacaagacatcccccttcctccgggaggtgcaggtcaatctcatcgacttcaagaaatgcaatgactacttggtctatgacagttaccttaccccaaggatgatgtgtgctggggaccttcgtgggggcagagactcctgccaggtgagggtacctgtgggtggggctcaggtcccagcaccctggggatgggggaggcaggggtgttggggctgatgtgggaattgggaccccaccctttcccgctcatggaccacctgtcccatcctgcgaatgtgccccctctcccctgcagggagacagcggggggcctcttgtctgtgagcagaacaaccgctggtacctggcaggtgtcaccagctggggcacaggctgtggccagagaaacaaacctggtgtgtacaccaaagtgacagaagttcttccctggatttacagcaagatggaggtaagatccctgcagcaggacactgcacccagcaggctgggaacttcctcaggtggggaccctggaggagcacccagggtgtaggcagaggtcccctcagcgtccccatattcggggggtgttctggacagggtcaaatgtgatgcctggggtcaatcccagctgtctgtgtttctttccctgcttttcttccctcagaacagagctcagcgggttgaaaaagggtggacctacaggccaggcaggcagttgctgggcagatgttctcccagaagtatttttttgtgtaaggttgcaatggactttgaaaacgtttcagtttctgcagaggattttgtgatagtttttgttatcaagcatttatgcatgggaatccgctcttcatggcctttcccagctctgtttgttttagtctttttgattttctttttgttgttgttgttgtctttttttaaaaacacaagtgactcca

SEQ ID NO: 5414 - DNA, 6422 bp, Homo sapiens
cccagctgccctgtcaaaccctgttcctgaccgatgaggagaagcgtctgctggggcaggaaggggtttccctgccctctcacctgcccctcaccaaggtaacatgcttcccctaagggtatcccaacccaggggcctcaccatgacctctgaggggccaatatcccaggagaagcattggggagttgggggcaggtgaaggacccaggactcacacatcctgggcctccaaggcagaggagagggtcctcaagaaggtcaggaggaaaatccgtaacaagcagtcagctcaggacagtcggcggcggaagaaggagtacattgatgggctggagagcaggtacgcctgggttatttctggcttcttgtgggccatgtctgggccccttcctcaccatgggaggcaaggtaagggactcaggttgctgagccttgtcctacctccctacattctagggtggcagcctgttctgcacagaaccaagaattacagaaaaaagtccaggagctggagaggcacaacatgtgagtgaaagcattgtgtgtgtatgtgtgttttgaaggcaggtacagcacacaggggtgccattcttggcccctggtacccagatgatactaactcttcattcctcctttcccagctccttggtagctcagctccgccagctgcagacgctaattgctcaaacttccaacaaagctgcccagaccagcacttgtgttttggtaccattagtctatctactcccatctccccccacacttctatccttataccccgactacccggccagatctacttcccacatccgataaccccagctggcctccgttcactctaccccctgctcccttcatctgttcctcttgcttcctcccagattcttcttttttccctggctctcatcatcctgcccagcttcagtccattccagagtcgaccagaagctgggtctgaggattaccagcctcacggaggtgagaggcaagggcagggagcaacccctggctgagcaagggagggggactctgttctccaaggtcgtcaagaagcaagagggaggtcctgtcctgtctagggtctcccacccaggggagcactctactactgccctcttgccttcacctcacagtgacttccagaaatatcctgacccacaaggacgtaacagaaaatctggagacccaagtggtagagtccagactgagggagccacctggagccaaggatgcaaatggctcaacaaggacactgcttgagaagatgggagggaagccaagacccagtgggcgcatccggtccgtgctgcatgcagatgagatgtgagctggaacagaccttcctggcccacttcctgatcacaaggaatcctgggcttccttatggctttgcttcccactgggattcctacttaggtgtctgccctcaggggtccaaatcacttcaggacaccccaagagatgtcctttagtctctgcctgaggcctagtctgcatttgtttgcatatatgagagggtacctcaaatacttctgttatgtatctgtgattttatttcttctttgggtatagggttgaggggaaataagttttgagtgagaaataaacgttttagctgaaattgtatcccagaagtttgaaataagtagtagaagagggggaaaacaagggagaagtggtggggaagacttggtagattggggccttaagtaaccacctcctttccctctctgcccccatgacttcctgctccaagttacagaagggaaggaaaccattttactctttttattctgctcattaatgatctgaaagaagaagatggggaaaaggggattccaccacaaggctccaaagaaccaagagtgcaaatcagtccatttcactttcactgtctgagatagggtctctaagacccaggatacaagggtggaatgtagctatatggactcgatttgcttccggaccttttccagagcctttctgtccaattgtcgctgacgaatgatgacaagacaagcgaagatcagggccacacacacgacagccccttcgaacttccaaaataagcgttgttccatcaaagctgagcggcagctgagggcaggaaggaatagttattcccaaggaaggccagacagcttctccctctaatttcccttctacttcagcctagccaggatacactcaagaggaaatcagagccaggcttctattgtgtgtatagtacataaatccctctcaaatagatcatttaatttattctctggataagcagagctagtattaaccaattttactgatgagaaaatatggccaataacatagtgctgaggagtagagctgggacttgggttcaagtaatttggctccaaatcccgtcttctttcttattatttttgagatggtgtctcgctctgtcacccagactggagtgcagtggcgtgaccttggctcactgcaacctccacctcccgggtttaagcagttttctgcttcagcctcccaagtagctgggattacaggtgcccgccatcatgcccagctaatttttgtatctttaagagagatgaggtttcaccatcttggccaggctggtcttgaactcctaacctcgtgatccacccgcctcggcctcccaaagtgctgggattacaggcgtgagccacccctcccagcctcttttttttttttttttttttgacacacagtctcgctccattgcccaggctggagtgcagtggcatgatcttggctcactctaacctctgcctcctgggttcaagtgattctccctgcctcagcctcccaagtagctgggattatgggcacccaccacaccagctaatttttgtatttttagtagagatggggtttcaccacgttggccaggctgatctcgaactcctgacctcaggtgatctgttagcctcagcctccctaagtactgggattataggtgtgagcccggccccctcttctttcagatattccatgctacccccagaccaggggaaaaggtgggaccatccatctaaagtcataggagcaaaggaggtgatctcagagaagagaaacagcactcaccttttgaactcatttctcttagatgagctgcatgtgattttctctacatatcctgtgggaccacactcaggggtagttttctgccaggagaaaaggagcaaagtacatgttaggaaggggcaacaggataaacaaaaaggctgccattcagaaggtgcaggtgcccaactgctatggtttggagtggtaggcaacagagagctaatgaaagagttctgatgcggatggtggaggtggtggttgcatgattacgaatgtatgttagaacacttcaggggcaacagtctaggagtggcaaagatacattccattccagagcctactatactaaaagtgaataaaacatagttatttgaggccgggtgtggcggctcacgcctataatcccagcactttgggaggccgaggcgggcagatcacgaggtaaggagttagagactagcctggccaacacagtgaaacccgagtctactaaaaatacaaaaattagccaggcatggtgcaacgcgcctttagtcacagctactcaggaggctgaggcaggagaatcgcttgaacccgggaggcggaggttgtggtgagccgagatctcgccactgcactccagcctgggcaacagagtgagactccgtctcaaaaacaaacaaaaaaaccatagttatcagttgaatactgccattagcttggaaagaaaggggcacattttcaggggaaagacaagtacagatttggacatacactgagactgcaagaagaaagaaaaaaagatgatgcaaaggcagcttaataagacttggatgttaagatgttgcttaagtgtttgcttagatgtttaaaaaaaaaaagggtagagaaatagatactcacagcccggaaattagagcatggagagcactcttctgctaccacaaactcttccaccagccagcatggcaaatttgaggtgcttgctgaaaggaaagataaatgccagccccaggccattcagaaaacatttctcccaggctctgcccatccaacttcccggcacagcgcttgccctcattccatgtggtgccggccttttccacctgtgctcttggtatatggggaagatactaaaaccaaaaacaaacgacgggacgtgtcgggttcccagacaatcacccacctgacagcttctcttcctgcacgggagcctctgcttggctgtagcggagttgggggaagggacaaaagtcaaaacccagaaaatagggcaccccctcctgcgctgtccatggataagatctcccccagccccgaggccgggaacgatcctgtcctccagtgacctccttttccctccccttacctcctccttaccagagctttaaggtgaaagcacagagcaaccagcagaggtggcggccctgggggaggccaggcctcccggcacccgcaagcatggagcgccaagtgtcgcacctgtcggaacagagggacctactccacaggcctcgtgcctccgtcggagcgcagaggcggcacttactctgcagccctcccagaggttccaggtcagggcagggaaggccggagttgcctattggagcagaggatctatcaggacgtccccgttgccacagcgagaaaaatcgatatgtttttgcgggctagggaggcgagcgccttctgcggggtccgcagggcgctggaggaagggccggcgggggctcgcggccctagcgcccgctcacctccgctcccgcccccgacgcagccatctagccccgtggaggatcctcgggcgcgggaccgagctcggggcccggtgttcccgggggcgttcggtcgtcgcccgctggggcttatagtcttccgcgtcggtggcgcctcgcctgctgctcactgggaattagctcggcgccccgttgcattgtggtcttggtagtctttgcgagaacggcaaatggcggttgcagaggctcgtccgaattctcggctcgctgctccctggctggcgcgtgtttgttcattctgggctaggtgagcagggacaatacgtcgccctctcaggactttgctctctccttaaaacccgaggattcaccgtcaagcttctggtttctctgacatccttccccagccgccccttcatcgccaccgatgatccagtggagaagctgtgttggaggtcaagggatggaggcgaaactgcgcgttctcgtccctgcagaaaccggaatatccgagacacatgacgaacatgaaactttctccttgtctcttggctcccactccgctacacagatgaacggtgttaccttccctcatgttactttgctaagcctactcctcagagctggtcctttgcataacctcttcaaatgctctcaactctcccttgctcctacataatggagtaatcataagtgcaatgagaaaagcatgagatttgaagttccataagtattgagtctaggttctggtggttattaactccatgatcttaggaaagtatctgtcagtgttctgtgtaaaacggaaatgctaatgtgtatttaccaggactttttcttgcgagaggcagatgaaatgtatctccgtttcatgagtaagttcagagaatataagtgacttgtccaaggtcagcaagctaatgagtgggaaagctgaggcttgagcctagactgtcaacacccaggccaaagattcattgcctgcttttcatcttatggagttaaaccttgatacacactcagatctgcagtgacttgaccagcactgtgggttcatgctttactgtctgataacgaattttcatttaattttattttttttcttagacagggtctagctctgtcacctaaacctgatgagggctgagccttcatttcgccgttttttgtttgtttgtttttgtttttgaacgagatggactctggctatgttgccagactggagtgcagtggcaagtcacaggagccatcatagcgcattacagcctggaacttctcgtcttcagggatcctcccaagtagctgggatttcaggcatgtgccaccatacctggctctaattttgaatttgtttctttaaattattatttgtgtttgctgaaattgtgtgtgtattatttttgtgtatgtgtgtgagtagttatatgttacataaagtaggttgtggggttttttccagtaatgtttagctataattgaagtttgggccgaaatctgctagtatttgttactcctcaccaaatcctaccttatctcacaacaaactgtaagatcttgtgatatttcacttccaataaccttaccaggcatcagagtggggtctctactctgaaattaaatatctgccataaggta

SEQ ID NO: 5415 - DNA, 391 bp, Homo sapiens
tgagacgtatggctgcctttgggaagctccttgtatgagaggggacagaacctgagtctgagaagcagagctcagaccctaagggagaatgggccactgccccagggagctccctgaggttgacgggcaactggataacacactctgctaaatggaagttaatgactgaaagtgaatcatgtgcttgctgtaaggaaattatgcaaacttcactgtagtgagttctttcaggttctcttgggtatggggagacatggaccagaataagccttctctagcttgctcagagtgccaaggtcctcagtgtctgggtgaaggatatgacaataccctcctctctcccttcttggcctcaggatgtccctttggcttgatctagagcctgtctgaa

SEQ ID NO: 5416 - DNA, 469 bp, Homo sapiens
actacagaactcaaacacagctgggcgcagtggctcacgcctgtaatcccagcaatttgggaggccgaggtgggcggatcacctgaggtcgggagttcaagaccagcctgaccaacatggagaaaccccgtctccactaaaaatacagaattagctgggcatggtgccatatgcctgtaatcccaggtactcgtgaggctgaggcaggagaatcacttgaacccgggaggtagaggttgcggtgagccgagatcacaccattgtactccagcctgggcaacaagagcaagaattcatctcaaaagaaaaaaaaaagaacttaagcataagccacaaataaggtttatcattacctcatcaatgcttggatacttacatttatcaagttattacattttgctgtgtaaaaaatattatgtatggtgaaagggggatatatatatattatgtattaaaatatgtattatat

SEQ ID NO: 5417 - DNA, 3805 bp, Homo sapiens
cttgagcaggtcacttgtccctggtggaagggacacctgtccccagggctcttgccgtggtcccatctcagttggctcagactggggtttccacagggcaggggtgtggctgcttttgttctccgttatctccccggagtctagcactgggcctgccacacaggtgctcagtaaatacgtgttgaagagtgaatggatgggtggatgccagaaggaaggaatgagggagtgaattaaagggacgcattcctggcggcggcactaaagcactcagagcaaactgcagagttgggggctgaactgtgactgtagccactggccgtcctgctgaccatcccgcccccccaacctccgcaggtgagtgtcccagcccggggcgcggtagcgccgccaaacggaagaagaagcagcggcggaaccgcaccacgttcaacagcagccaactgcaggcgctggagcgcgtgttcgagcgcacgcactaccccgacgcctttgtgcgcgaggagcttgcccggcgcgtcaacctcagcgaggcgcgcgttcaggtgagcgctcagtcccgggcctcccgtgggagcgtgcgcgtgggagcgcacaaccactgttcacccgggattacacagttgcccaggaggggtgtttgagcaggagcatctgaggccaggaggacgggggttcagatcccagccctgccacttactggctgtgtgcccttgagcaagtgacttaagctgtctgtgctgcaggcacctgccctacctggaaaatgaggatcacgtaggtccttttgctataggggtccttcgaggattagagttaaaattttcataaagcggccaggcacagtggggttatgcctataatcccagcactttgagaggccgaggtgggtggatcacttgaggctaggaatttgagaccagcctggccaacataatgaaaccccatctttactaaaagtacaaaaattatccgggcgtgctggcgcgcgcctgtaatcccagctgcttgggtggctgaggcaggagaatcgcttgaactcgggaggtagaggttgcagtaagctgagattgcgccactgcactccagcctgggtgacagagtgagaccctgtctcaataaataaacaaacaaacaaacaaataaaaataaattttcgtaaagcgcttagaacaatgcctggcaccaagggttctgataaagaagtccttttccagtttcaagttcttaactctgtgccagcactgagccgagtgctcagcaagcgcctctccccgcgagtcctcagcaagcgcctctccccgcgagtcctcagcaagcgcctctccccgcgagtgctcagcaagcccctctccccgcgagtgctcagcaagagcctctccccccgagtgctcagcaagcgcctctccccccgagtgctcagcaagcgcctttccccgcgagtgctcagcaagcacctcgctcccagtggccgagtgcctctccattcgttctcattctccaacacattctccattcattctccattcattggtgttctcaatctccaacacatacccagcagcaggcgtcatttgtcatccccattctacagatgaaaaaactgagggtcagagaggtgacgctgccagccctgggctggtgacagagcaggcacacacccaggtccagaaggacttgggtcccccctgcccatgctgcaccctgctcaccctcccacccacaggtctggtttcagaaccgccgcgccaagttccgcaggaatgaaagggccatgctggccagccgctctgcctcgctgctcaagtcctacagccaggaggccgccatcgagcagcccgtggctccccggcccaccgccctgagtccagattatctctcctggacagcctcgtccccctacaggtgagagcgggaacacctttgggccaggaaggggcagctcgaggaatcccagagggcttttccggcctggactcctctgagggtctggagagagcttgaatggtgtccacgcgcccctgggatctggggtacaccaagtgatgtgtggcgagtgtgcctgtgagtgggtgttcacgagcacctgcacgtgcatgttgtaagagttggcatgtgtgtgtgtgtcaacgtacatgtgggcacacatgactgtgagtgtgcatgcacatgcctgcgtatgcaaaggagcgtgcaagcatgcgtgtccacaggggtgtgagtgtgtgcgtgaacacctggagccgggagaaaacaggcctatctggagggggagcaaagtacaggcatcaccctgagggagtagaaaacctgcaggaagattcctaggctgtcacgggggccccagcgccctgtgtccaccctccagacgagaaactgacgctgggagggctgaggaaatggtctccctggcctgcgggcatggctggggcccagagccaagttctggggcagttttgtctggatcaaagctggaaagactctgacatggtcggcaggaggtgctcgagagtcgggccaccataccccacagctccagaggcgccgtctgctccttgggctgtgagggtggctctgctggagccatggtcatgtggggggacagggatttcgtgggtccgcttgagggttcttagtcctcaccgccctcctaacttccctccctattcatcgttacagggggcaggaaaaccaaggggcatccttatttatttatgtatttatttttgagacagagtctcgctctgtcacccaggctggagtgcagtggtgcaatctcggctcactgcaacctccgcctcccaggctcaagcaattctcctgcctcagcctcttgggtagctgggattacaaacgcccgtcaccacgccaagctaattgtttgtatttttagtagagacagggtttcaacatgttggccaggctggtctcgaactcctgatctcaggtgatccgtccacttcggcctcccaaagtgttgggattacaggcgtgagccaccacgcttggccccaaggggcatccttaaatccaggtgcctgttcattctgcctccatcctgctgagagccaggcccagggtacgcatggaggggggcatggaccaacccaggccctgctgtcaggaagctcatggctcatatggaggctcctgtgtcccagcactgagctggggggacttctgactcctgcccaaaccctacagctccaaatcacccccagtcctgggtgaaggctgcccaggagagcaagctaaggaggggggtggcaggaccagaggctggggtcgagcactgatacccagaagccaaccgcacccatgtgacctgtgtctcatgtcgcccccagcacagtgccaccctacagccctgggagctcaggccccgcaaccccaggggtcaacatggccaacagcatcgccagcctccgtctcaaggccaaggagttcagcctgcaccacagccaggtgcctacggtgaactgaagtccagtcccaccaggacccagacgcctccctgggtggacagcaatagaaaagggggcagacgcccaggaagtgaccttctcctggatgagctctcctggcccgtctgtccagcctggactcccgagcccacgaggctgttgaggcccctgcagccgggcccagctcttctgtccttggccaccagagactgcagcccacaacccttggaggggttgggccggaaggtggaagagcctgccaaggacctcatttagtttgtgtattaaaaccaaaaagcttttgtctttaagaaataaaaccatttttttaaagcccaaaa

SEQ ID NO: 5418 - DNA, 3801 bp, Homo sapiens
cttgagcaggtcacttgtccctggtggaagggacacctgtccccagggctcttgccgtggtcccatctcagttggctcagactggggtttccacagggcaggggtgtggctgcttttgttctccgttatctccccggagtctagcactgggcctgccacacaggtgctcagtaaatacgtgttgaagagtgaatggatgggtggatgccagaaggaaggaatgagggagtgaattaaagggacgcattcctggcggcggcactaaagcactcagagcaaactgcagagttgggggctgaactgtgactgtagccactggccgtcctgctgaccatcccgcccccccaacctccgcaggtgagtgtcccagcccggggcgcggtagcgccgccaagcggaagaagaagcagcggcggaaccgcaccacgttcaacagcagccaactgcaggcgctggagcgcgtgttcgagcgcacgcactaccccgacgcctttgtgcgcgaggagcttgcccggcgcgtcaacctcagcgaggcgcgcgttcaggtgagcgctcagtcccgggcctcccgtgggagcgtgcgcgtgggagcgcacagccactgttcacccgggattacacagttgcccaggaggggtgtttgagcaggagcatctgaggccaggaggacgggggttcagatcccagccctgccacttactggctgtgtgcccttgagcaagtgacttaagctgtctgtgctgcaggcacctgcctacctggaaaatgaggatcacgtaggtctttgctataggggtccttcgaggattagagttaaaattttcataaagcggccaggcacagtggcttatgcctataatcccagcactttgagaggccgaggtgggtggatcacttgaggctaggaatttgagaccagcctggccaacataatgaaaccccatctttactaaaagtacaaaaattatccgggcgtgctggcgcgcgcctgtaatcccagctgcttgggtggctgaggcaggagaatcgcttgaactcgggaggtagaggttgcagtaagctgagattgcgccactgcactccagcctgggtgacagagtgagaccctgtctcaataaataaacaaacaaacaaacaaataaaaataaattttcgtaaagcgcttagaacaatgcctggcaccaagggttctgataaagaagtccttttccagtttcaagttcttaactctgtgccagcactgagccgagtgctcagcaagcgcctctccccgcgagtcctcagcaagcgcctctccccgcgagtcctcagcaagcgcctctccccgcgagtgctcagcaagcccctctccccgcgagtgctcagcaagagcctctccccccgagtgctcagcaagcgcctctccccccgagtgctcagcaagcgcctttccccgcgagtgctcagcaagcacctcgctcccagtggccgagtgcctctccattcgttctcattctccaacacattctccattcattctccattcattggtgttctcaatctccaacacatacccagcagcaggcgtcatttgtcatccccattctacagatgaaaaaactgagggtcagagaggtgacgctgccagccctgggctggtgacagagcaggcacacacccaggtccagaaggacttgggtcccccctgcccatgctgcaccctgctcaccctcccacccacaggtctggtttcagaaccgccgcgccaagttccgcaggaatgaaagggccatgctggccagccgctctgcctcgctgctcaagtcctacagccaggaggccgccatcgagcagcccgtggctccccggcccaccgccctgagtccagattatctctcctggacagcctcgtccccctacaggtgagagcgggaacacctttgggccaggaaggggcagctcgaggaatcccagagggcttttccggcctggactcctctgagggtctggagagagcttgaatggtgtccacgcgcccctgggatctggggtacaccaagtgatgtgtggcgagtgtgcctgtgagtgggtgttcacgagcacctgcacgtgcatgttgtaagagttggcatgtgtgtgtgtgtcaacgtacatgtgggcacacatgactgtgagtgtgcatgcacatgcctgcgtatgcaaaggagcgtgcaagcatgcgtgtccacaggggtgtgagtgtgtgcgtgaacacctggagccgggagaaaacaggcctatctggagggggagcaaagtacaggcatcaccctgagggagtagaaaacctgcaggaagattcctaggctgtcacgggggccccagcgccctgtgtccaccctccagacgagaaactgacgctgggagggctgaggaaatggtctccctggcctgcgggcatggctggggcccagagccaagttctggggcagttttgtctggatcaaagctggaaagactctgacatggtcggcaggaggtgctcgagagtcgggccaccataccccacagctccagaggcgccgtctgctccttgggctgtgagggtggctctgctggagccatggtcatgtggggggacagggatttcgtgggtccgcttgagggttcttagtcctcaccgccctcctaacttccctccctattcatcgttacagggggcaggaaaaccaaggggcatccttatttatttatgtatttatttttgagacagagtctcgctctgtcacccaggctggagtgcagtggtgcaatctcggctcactgcaacctccgcctcccaggctcaagcaattctcctgcctcagcctcttgggtagctgggattacaaacgcccgtcaccacgccaagctaattgtttgtatttttagtagagacagggtttcaacatgttggccaggctggtctcgaactcctgatctcaggtgatccgtccacttcggcctcccaaagtgttgggattacaggcgtgagccaccacgcttggccccaaggggcatccttaaatccaggtgcctgttcattctgcctccatcctgctgagagccaggcccagggtacgcatggaggggggcatggaccaacccaggccctgctgtcaggaagctcatggctcatatggaggctcctgtgtcccagcactgagctggggggacttctgactcctgcccaaaccctacagctccaaatcacccccagtcctgggtgaaggctgcccaggagagcaagctaaggaggggggtggcaggaccagaggctggggtcgagcactgatacccagaagccaaccgcacccatgtgacctgtgtctcatgtcgcccccagcacagtgccaccctacagccctgggagctcaggccccgcaaccccaggggtcaacatggccaacagcatcgccagcctccgtctcaaggccaaggagttcagcctgcaccacagccaggtgcctacggtgaactgaagtccagtcccaccaggacccagacgcctccctgggtggacagcaatagaaaagggggcagacgcccaggaagtgaccttctcctggatgagctctcctggcccgtctgtccagcctggactcccgagcccacgaggctgttgaggcccctgcagccgggcccagctcttctgtccttggccaccagagactgcagcccacaacccttggaggggttgggccggaaggtggaagagcctgccaaggacctcatttagtttgtgtattaaaaccaaaaagcttttgtctttaagaaataaaaccatttttttaagccccaaaa

SEQ ID NO: 5419 - DNA, 6287 bp, Homo sapiens
  SITE (30): n equals a,t,g, or c
  SITE (129): n equals a,t,g, or c
  SITE (389): n equals a,t,g, or c
  SITE (542): n equals a,t,g, or c
  SITE (567): n equals a,t,g, or c
  SITE (1236): n equals a,t,g, or c
  SITE (1255): n equals a,t,g, or c
  SITE (1271): n equals a,t,g, or c
  SITE (1280): n equals a,t,g, or c
  SITE (1301): n equals a,t,g, or c
  SITE (1736): n equals a,t,g, or c
  SITE (1788): n equals a,t,g, or c
  SITE (2035): n equals a,t,g, or c
  SITE (2095): n equals a,t,g, or c
  SITE (2152): n equals a,t,g, or c
  SITE (2212): n equals a,t,g, or c
  SITE (2265): n equals a,t,g, or c
  SITE (2352): n equals a,t,g, or c
  SITE (3023): n equals a,t,g, or c
  SITE (3025): n equals a,t,g, or c
  SITE (3051): n equals a,t,g, or c
  SITE (3055): n equals a,t,g, or c
  SITE (3172): n equals a,t,g, or c
  SITE (3356): n equals a,t,g, or c
  SITE (3681): n equals a,t,g, or c
  SITE (3711): n equals a,t,g, or c
  SITE (3721): n equals a,t,g, or c
  SITE (3755): n equals a,t,g, or c
  SITE (3923): n equals a,t,g, or c
  SITE (4046): n equals a,t,g, or c
  SITE (4050): n equals a,t,g, or c
  SITE (4446): n equals a,t,g, or c
  SITE (4490): n equals a,t,g, or c
  SITE (4761): n equals a,t,g, or c
  SITE (4954): n equals a,t,g, or c
  SITE (4956): n equals a,t,g, or c
  SITE (4972): n equals a,t,g, or c
  SITE (5116): n equals a,t,g, or c
  SITE (5310): n equals a,t,g, or c
  SITE (5419): n equals a,t,g, or c
  SITE (5544): n equals a,t,g, or c
  SITE (5788): n equals a,t,g, or c
  SITE (5791): n equals a,t,g, or c
  SITE (5817): n equals a,t,g, or c
  SITE (5978): n equals a,t,g, or c
  SITE (6118): n equals a,t,g, or c
  SITE (6159): n equals a,t,g, or c
  SITE (6162): n equals a,t,g, or c
  SITE (6166): n equals a,t,g, or c
cttgagcaggtcacttgtccctggtggaanggacacctgtccccagggctcttgccgtggtcccatctcagttggctcagactggggtttccacagggcaggggtgtggctgcttttgttctccgttantctccccggagtctagcactgggcctgccacacaggtgctcagtaaatacgtgttgaagagtgaatggatgggtggatgccagaaggaaggaatgagggagtgaattaaagggacgcattcctggcggcggcactaaagcactcagagcaaactgcagagttgggggctgaactgtgactgtagccactggccgtcctgctgaccatcccgcccccccaacctccgcaggtgagtgtcccagcccggggcgcggtagcgncgccaagcggaagaagaagcagcggcggaaccgcaccacgttcaacagcagccaactgcaggcgctggagcgcgtgttcgagcgcacgcactaccccgacgcctttgtgcgcgaggagcttgcccggcgcgtcaacctcagcgaggcgcgcgnttcaggtgagcgctcagtcccgggncctcccgtgggagcgtgcgcgtgggagcgcacagccactgttcacccgggattacacagttgcccaggaggggtgtttgagcaggagcatctgaggccaggaggacgggggttcagatcccagccctgccacttactggctgtgtgcccttgagcaagtgacttaagctgtctgtgctgcaggcacctgcctacctggaaaatgaggatcacgtaggtctttgctataggggtccttcgaggattagagttaaaattttcataaagcggccaggcacagtggcttatgcctataatcccagcactttgagaggccgaggtgggtggatcacttgaggctaggaatttgagaccagcctggccaacataatgaaaccccatctttactaaaagtacaaaaaattatcctggcgtgctggcgcgcgcttgtaatctcagctgcttgggtggctgaggcaggagaatcgcttgaactcgggaggtagaaggttgcagtaagctgagattgcgccactgcactccagcctgggtgacagagtgagaccctgtctcaataaataaacaaacaaacaaacaaataaaaatacattctccgtaagcgcttagaacaatgcctggcaccaagggttctgataaagaagtccttttccagtttcaagttcttaactcntgtgccagcactgagccgnagtgctcagcaagcgncctctcccncgcgagtcctcagcaagcgcnttttccccgggagtcttcagcaaagcgcttttccccgggattgttcagcaggcccctctccccggcgagtgctcagcaggagcctcttcccccgagttgctcagcaagcgcctctcccccccgagtgctcagcaagcgcctttccccgcgagtgctcagcaagcacttcgctcccagtggccgagtgcctctccattcgttctcattctccaacacattctccattcattctccattcattggtgttctcaatctccaacacatacccagcagcaggcgtcatttgtcatccccattctacagatgaaaaaactgagggtcagagaggtgacgctgtcagccctgggctggtgacagagcaggcacacacccaggtccagaaggacttgggtcccccctgcccatgctgcaccctgctcaccctcccacccacanggtctggtttcagaaccgccgcgccaagttccgcaggaatgaaagggccatngctggccagccgctctgcctcgctgctcaagtcctacagccaggaggccgccatcgagcagcccgtggctccccggcccaccgccctgagtccagattatctctcctggacagcctcgtccccctacaggtgagagcgggaacacctttgggccaggaaggggcagctcgaggaatcccagagggcttttccggcctggactcctctgagggtctggagagagcttgaatggtgtccacgcgccccntgggatctggggtacaccaagtgatgtgtggcgagtgtgcctgtgagtgggtgttcacgnagcacctgcacgtgcatgttgtaagagttggcatgtgtgtgtgtgtcaacgtacatngtgggcacacatgactgtgagtgtgcatgcacatgcctgcgtatgcaaaggagcgtgcanagcatgcgtgtccacaggggtgtgagtgtgtgcgtgaacacctggagccgggnagaaaacaggcctatctggagggggagcaaagtacaggcatcaccctgagggagtagaaaacctgcaggaagattcctaggctgtcnacgggggccccagcgccctgtgtccaccctccagacgagaaactgacgctgggagggctgaggaaatggtctccctggcctgcgggcatggctggggcccagagccaagttctggggcagttttgtctggatcaaagctggaaagactctgacatggtcggcaggaggtgctcgagagtcgggccaccataccccacagctccagaggcgccgtctgctccttgggctgtgagggtggctctgctggagccatggtcatgtggggggacagggatttcgtgggtccgcttgagggttcttagtcctcaccgccctcctaacttccctccctattcatcgttacagggggcaggaaaaccaaggggcatccttatttatttatgtatttatttttgagacagagtctcgctctgtcacccaggctggagtgcagtggtgcaatctcggctcactgcaacctccgcctcccaggctcaagcaattctcctgcctcagcctcttgggtagctgggattacaaacgcccgtcaccacgccaagctaattgtttgtatttttagtagagacagggtttcaacatgttggccaggctggtctcgaactcctgatctcaggtgatccgtccacttcggcctcccaaagtgttgggattacaggcgtgagccaccacgncnttgggcccaaggggcatccttaaatnccanggtgcctgttcattctgcctccatcctgctgagagccaggcccagggtacgcatggaggggggcatggaccaacccaggccctgctgtcaggaagctcatggctcatatggaggctncctgtgtcccagcactgagctggggggacttctgactcctgcccaaaccctacagctccaaatcacccccagtcctgggtgaaggctgcccaggagagcaagctaaggaggggggtggcaggaccagaggctggggtcgagcactgatacccagaagccaaccgcacccatgtgacctgtgtcntcatgtcgcccccagcacagtgccaccctacagccctgggagctcaggccccgcaaccccaggggtcaacatggccaacagcatcgccagcctccgtctcaaggccaaggagttcagcctgcaccacagccaggtgcctacggtgaactgaagtccagtcccaccaggacccagacgcctccctgggtggacagcaatagaaaaggggtcagacgcccaggaagtgaccttctcctggatgagctctcctggcccgtctgtccagcctggactcccgagcccacgaggctgttgaggcccctgcagccgggcccagctcttctgntccttggccaccagagactgcagcccacanacccttgganggggttgggccggaaggtggaagagcctgccaanggacctcatttagtttgtgtattaaaaccaaaaagcttttgtctttaagaaataaaaccatttttttaagccccaaaaggttgcaggaaggtgggtaagggccgcaaacaatgttggtggctgagatgagagctgggaccccacagggctggatggccttcctgggcnccttttctggcctgcagcaggcatggagaccgcctcggcctggctcagaccagcagccatgggaggcccactgccctcatatctgtactgttcccgggaatgaagtcctctgtcaccctgcanggcnccccagaaatgggggctgggggggtgggagaggaggacagaaacccaccctagaccccatctcccatcttgagtcccaaggggacacccagatgtttgggcagagccttgctgtgtgaacctgggcagggatcgtctccccatcctattgcggggcaggatgggtgatcatggattcctagactggccagagggtgtgtgggacagatggaaggacattcagtcccttgcttctgggcacacagaaggcgtgggatctctccggccatttaaccatgaaggggctgaggaaatggcccagaaaacaggtgcagactgtaggtcccggccaggctcccaggacagctgaggccagcagaagactcaagtccctcaacccacccatttgcagccagtnaactgagggtgccaccagccagtgacaccacttacgagggatcntgcagaaaacaggggtgagggatggtctgaggccagtccctctacctgtccccacgcccaccagggaagtcaggagagcctttctgctcaaagtcaccccagtccagcccccgggaggtaggacaacactcccccatcccagagggcacaaagacggtcagccctgggcaatggtggtgggaaccctggcccttggggtggcggggtggcagatggcacagcaaggaatctcgatggagtcaatgagctgggccagttctccagtatcccntgcctgcccatgcagggtcaccatgcccctaaagtgccagccatggggctccacacatgagtagtctgcacggggacaacctactttctttttctttctttctttctttctttctttctttctttatctatctattctatttttttgagacggagtgttgctctgtcgcacaggctagagtgcagcagcacgnantctcagctcactgcanacctccgcctccaggggttcaagcaattctcctgcctcagcctcccaagtagctgggattacaggcgtccgctgctacgcccagctaattttttgtatttttagtagagatggggtttcgccatgttggccaggctggtcttgnaactcctgacctcaggtgatccacccacctcagcctccaaaagtactaggattacaggcgtgagccactgtgcctggcccccactttagttagaaggtacagcagctacacttgtgaataaagtgaggaccatctcccacctgcccccaatacacccctgaatactcttccccatactccatccggatttccanccacagaacgtggccccttcagatgtgcaaacacacctggggaagagtgaccgcccggtcgctgtgtgacttcttccttcggtggctggacggcttcctccctggccgncagcagggcctctgaccagcaggagagcctggggcaccagtgggggctggggtggaggggagggggagttctgctgaggtctacagctgctcagccccacctgactgtgagggccaggcctgtgnccctggactgggggaggagggggagtcagatttgtgttttctggctcagtttggcctctgcctcgggtaagtgctttctggacctccatttgccattcttgcactgagaaaatattatgaaacgcaaggttcctggccgcagaggctgcgccatgctatgaggaggcaaagacaaaggaataattacagcaccactaaggctatgagggggtgctgcaggggcccagggagcacagacggggcnccncaaaccttgttgaaggcatctgggcnaggcttcctggaggaggtatgcctgagaggatgaagagttcaccaaagaggggggaggggcaacggtgtttctggctgaggggactgcatgagtgtagccctggggcaggccagaagcttctctttgggccagtgggagctgttcccgggctggatctccntggtgccgggtgaaggtggagaggaacaggaactggctcaaacgaggtttgtgtggccgggactagatgtttggatgtcaccctgtctgtggggagccatggaggggatttgcttggtggagggacgtgccctgagcctnccatgaggaagagggaccgtgggctaagagtgaaggagacnagncccnttgcggaggccagggcgggtgtccaggtgggaggggctgtggcctgggccagatggggacagagttggtggagctgggagatgtttcggatgccgcaaaaaaaaaaaaaaaaaaaaaaaaa

SEQ ID NO: 5420 - DNA, 448 bp, Homo sapiens
aattatggtgcaaggtgagagccactgagaaatgaaatgggtatccaggcaggggagagatttcctccatttgggagactctgggaagacttcctggcgtagctgacatttggccatttgagccgagtaggaggtgaatatgtcgggatggcatcctaggcaaagcaaacagtaagaaggaaaaggtggcaggaaagcactagatgtgaattagcagtttagagtaattacttggccatgcatagagaagaggagatgtgagggaagtgaggttggttgagggcgttcatggcagctgttgagtgccaggctgcagctgtccagggtcgttcttggggcagtttgtagccgctgagtgttcctgaggctgggtgtgcagaattggagagctgggctatgggaggcttggcctgaccagagcgtctccaaagctccccatctgagatgg

SEQ ID NO: 5421 - DNA, 526 bp, Homo sapiens
tcccacttagaaacatttttattagactttacaattattattatgttttgttctcaaagcaagtattctacatcttgaaatactgaaaattaacacaagcaatagtttattgtccaatacatgacaggtggtatgctctagacttctggtgtattgtgtctcttgatggaaagaaagatggcttccccctctggacaccactggcccaaatagtgttgcagaagtgggatggggactgttgaaaggaagtctcagttcagtgggattccaccctctaaaggagagtgggcctgatccctgtcaggtgaccatgcttatgtgcagtcacaaggggaaatgtttggatgtgccaacaggatctcctggacatacatcctggaaaagctcaggagagtcttcagtgaacatgtctttgacaggagttaacatgccacatgtagttatctgtttctccagcggtgttccgccactcttgccttccttccttcactgaccactgggtaatgacaactgtggaccactcctg

SEQ ID NO: 5422 - DNA, 1413 bp, Homo sapiens
gaatggaacgcctgtttaaattaattctacaatatgtttcatgatgatgttatgaatggtgatttcctatctttctatgctgatattaatctgaatcggggagtttattgattttaaatatagccctacaaaaataactcagactaataaaatcataaatcatatgcgtgaatggatattatccatatagtgaatttgtgatgatgaattcatctgtgctaaaaatgttagtttaataaaatatgaaagtgacctgtaataacagttgttgttgattgagaacaaataagtttatgtgaaaaatatataaatacattagctggtcttgtgtgtcattttatttttttttgttgctaacacagggatatgaacaataactaaaagggcactttatatgagcggaaaaccagcggcgcgtcagggagatatgactcagtatggcggtcccattgtccaggttcggcaggtgtaagaattggcgcgcccaccggcgtggcgtgctcggtgtgtccgggcgggatgacttcgggcaacccggtaaatccgctgctgggggcgaaggtgctgccggcgagacggaccttgcgctgcccggcccgctgccgttcattctctcccgcacctacagcagctaccggacgaagacgcctgcaccggtgggcgttttcggccccggctggaaagcgccttctgatatccgcttacagctacgtgatgacggactgatactcaacgacaacggcgggcggagcattcactttgagccgctgctgccgggggaggcggtgtacagccgcagtgagtcaatgtggctggtgcgcggtggtaaggcagcacagccggacggccatacgctggcgcggctgtggggggcgctgccgccggatatccggttaagcccgcatctttacctggcgaccaacagcgcacaggggccgtggatactgggtgttctgaccggtgccggtgctgaggacgtactgccagcgccgctccgccgtaccgggtgcttaccgggatgcggaccgcttcggcggacgctgacgtaccggcgtgaggccgccggtgacctggccggggaaatcaccggcgtgacggcggtgccgggcgggagttccgtctggtgctgaccacgcaggcgcagcgtgcggaagaggcccgcacctcttcgctatcttcttctgacagttcccgccctctctcagcctcagcgttccccgacacctgcccggtaccgaatacggccccgacaggggtatccgcctttcggcggtgtggctgatgcacgacccggcatacccggagagcctgcccgctgcgccactggtgcggtacacgtatacggaagccggtgaactgctggcggtatatgaccgcagcaatacgcaggtgcgcgctttcacgtatgacgcg

SEQ ID NO: 5423 - DNA, 138 bp, Homo sapiens
tggctgatgctcgacccggcatacccggagagcctgcccgctgcgccactggtgcggtacacgtatacggaagccggtgatctgctggcggtatatgaccgcagcaatacgcaggtgcgcgctttcacgtattacgcg

SEQ ID NO: 5424 - DNA, 138 bp, Homo sapiens
tggctgatgcacgacccggcatacccggagagcctgcccgctgcgccactggtgcggtacacgtatacggaagccggtgaactgctggcggtatatgaccgcagcaatacgcaggtgcgcgctttcacgtatgacgcg

SEQ ID NO: 5425 - DNA, 1469 bp, Homo sapiens
gtaaataaggggctgttcttggttgaatggaacgcaccttgtttaaattaattctacaatatgtttcattgatgatgttatttgaatttggtgatttcctatctttctatttgctgatattaatctcgaatctggtggagtttattgattttaaatatagagcctacaaaaataagctcagactaataaaatcataaatcatatgcgttgaatggatattatccatatagtgaattggtggatgatgaattcatcttgtgctaaaaatgttagtttaataaaatattgaaagtgacctgtaataacagttgttgttgattgagaacaaataagtttatgtgaaaaatatataaatacattagctggtcttgtgtgtcattttatttttttttgttgctaacacagggatatgaacaataactaaaagggcactttatatgagcggaaaaccagcggcgcgtcagggagatatgactcagtatggcggtcccattgtccagggttcggcaggtgtaagaattggcgcgcccaccggcgtggcgtgctcggtgtgtccgggcgggatgacttcgggcaacccggtaaatccgctgctgggggcgaaggtgctgcccggcgagacggaccttgcgctgcccggcccgctgccgttcattctctcccgcacctacagcagctaccggacgaagacgcctgcaccggtgggcgttttcggccccggctggaaagcgccttctgatatccgcttacagctacgtgatgacggactgatactcaacgacaacggcgggcggagcattcactttgagccgctgctgccgggggaggcggtgtacagccgcagtgagtcaatgtggctggtgcgcggtggtaaggcagcacagccggacggccatacgctggcgcggctgtggggggcgctgccgccggatatccggttaagcccgcatctttacctggcgaccaacagcgcacaggggccgtggtggatactggggtggtctgagcgggtgccgggtgctgaggacgtactgccagcgccgctgccgccgtaccgggtgcttaccgggatggcggaccgcttcgggcggacgctgacgtaccggcgtgaggccgccggtgacctggccggggaaatcaccggcgtgacggacggtgccgggcgggagttccgtctggtgctgaccacgcaggcgcagcgtgcggaagaggcccgcacctcttcgctatcttcttctgacagttcccgccctctctcagcctcagcgttccccgacacactgcccggtaccgaatacggccccgacaggggtatccgcctttcggcggtgtggctgatgcacgacccggcatacccggagagcctgcccgctgcgccactggtgcggtacacgtatacggaagccggtgaactgctggcggtatatgaccgcagcaatacgcaggtgcgcgctttcacgtatgacgcg

SEQ ID NO: 5426 - DNA, 105 bp, Homo sapiens
tggctgatgcacgacccggcatacccggagagcctgcccgctgcgccactggtgcggtacacgtatacggaagccgtgaactgctggcggatatgaccgcacaaa

SEQ ID NO: 5427 - DNA, 140 bp, Homo sapiens
tagtcccagctactcgggaggctgaggcaagagaatggcgtgaacctgggaggtggagcttgtagtgggcagagatcgctccactgcactccagccagggtgacagagtgagactccatctcaaaaaaaaaaaaaaaaaa

SEQ ID NO: 5428 - DNA, 115 bp, Homo sapiens
ggctcaggcaggagaatggcatgaacccaggaggcggagcttgcagtgagccgagatcgcaccactgcactgcagcctgggtgacagagcaagactccatctcaaaaaaaaaaaa

SEQ ID NO: 5429 - DNA, 35 bp, Homo sapiens
ggtgacagagtgacactccatctcaaaaaaaaaaa

SEQ ID NO: 5430 - DNA, 166 bp, Homo sapiens
ggcgtgcgcctgtagtcccagctactcgggaggctgaggcaggagaatggcgtgaacccgggaggcggagcttgcagtgagccgagatcgtgccactgcactccagcctgggtgacagagcaagactccgtctcaaaaaaaaaaaacaaaaaaaacatgtaggcag

SEQ ID NO: 5431 - DNA, 129 bp, Homo sapiens
caagctactcaggaggctgaggcaggagaatggcatgaacccgggaggtggagcttgcagtgagctgagatcgcgccactgcactccagcctgggtgacacagtgagactccgtctcaaaaaaaagaga

SEQ ID NO: 5432 - DNA, 168 bp, Homo sapiens
cgggcgtggtggcgggtgcctgtagtcccagctactcaggaggctgaggcaggagaatggcgtgaacccaggaggtggagcttgcagtgagcccagatcgcgctactgcactccagcctgggcgacagagtgagactccgtctcaaaaaaaaaaaaaaaagaagaaga

SEQ ID NO: 5433 - DNA, 57 bp, Homo sapiens
ctgcactacagcctgggtgacagagcgagactccatctcaaaaaaaaaaaaaaaaaa

SEQ ID NO: 5434 - DNA, 153 bp, Homo sapiens
cccagctactcgggaggctgaggcaggagaatggcgtgaacccgggaggcggagcttgcagtgagccgagatcgcgccactgcactccagcctgggcgacagagcgagactccgtctcaaaaaaaaaaaaaaaaaaaagaaagcagtggggcc

SEQ ID NO: 5435 - DNA, 193 bp, Homo sapiens
cgggcgtggtagcgggcgcctgtagtcccagctactcgggaggctgaggcaggagaatggcgtgaacccgggaggcggagcttgcagtgagccgagatcgcgccactgcactccagcctgggcgacagagcgagactccgtctcaaaaaaaaaaaaaaaaaaaaaaaaaaaaaaattgactcctaatcaaaaa

SEQ ID NO: 5436 - DNA, 132 bp, Homo sapiens
gaggctgaggcaggagaatggtgtgaacccaggaggtggagtttgcagtgagctgaaatcgtgccactgcactccagcctgggcgacagagtgagattctctctcaaaaaaaaaaaaaaaaaaaaaaaaaaa

SEQ ID NO: 5437 - DNA, 170 bp, Homo sapiens
gccgggcgtggtagcgggcgcctgtagtcccagctactcgggaggctgaggcaggagaatggcgtgaacccgggaggcggagcttgcagtgagccgagatctcgccactgcactccagcctgggcgacagagcgagactccgtctcaaaaaaaaaaaaaaaaaaagactg

SEQ ID NO: 5438 - DNA, 98 bp, Homo sapiens
tgtgaacctgggaggtggagcttgcagtgagcggagatcgtgccactgcactccagcctgggtgacagagtgagactccatctcaaaaaaaaaaaagg

SEQ ID NO: 5439 - DNA, 147 bp, Homo sapiens
ggtcccagctactcgggaggcttaggcaggagaatggcgtgaacccaggaggtggagcttgcagtgagccgagatcgcgccactgcactccagcctgggcgacagagcgagactccatctcaaaaaaaaaaaaaaaaaaaaattgtg

SEQ ID NO: 5440 - DNA, 116 bp, Homo sapiens
agaatggtgtgaacccaggaggcggagcttgcagtgagctgagatcgcgccactgcactccagcctgggcgacagagtgagactctgtctcaaaaagaaaaaaaaaaaaaaaagaa

SEQ ID NO: 5441 - DNA, 87 bp, Homo sapiens
ccgggaggtggaggttgcagtgagctgagatcgcgccattgcactccagcctaggcgacagagtgagactccatctcaaaaaaaaaa

SEQ ID NO: 5442 - DNA, 150 bp, Homo sapiens
ggcgcctgtagtcccagctactcgggaggctgaggcaggagaatggcgtgaacccgggaggcggagcttgcagtgagctgagatcgcgccactgcactccagcctgggcgacagagcgagactctgtctcaaaaaaaaaaaagaattggc

SEQ ID NO: 5443 - DNA, 159 bp, Homo sapiens
ctgtggtcccagctactcgggaggctgagggaggagaatggcgtgaacccaggaggcagagcttgcagtgagccgagatcgcgccactgcactccagcctgggtgacagagcgagactccgtctcaaaaaaaaaaaaaaagaaaagaaaaagaaaaata

SEQ ID NO: 5444 - DNA, 153 bp, Homo sapiens
gggcgtggtggcgggcgcctgtagtcccagctactcgggaggctgaggcaggagaatggcgtgaacccgggaggcggagcttgcagtgagctgagatcaccccactgcactccagcctgggcgacagagtgagactctgtctcaaaaaaaaaa

SEQ ID NO: 5445 - DNA, 155 bp, Homo sapiens
ggtagcgggtgcctgtagtcccagctactcaggaggctgaggcaggagaatggcgtgaacccaggaggcggagcttgcagtgagctgagattgccccactgcactcccgcctgggcaacagagcgagactccatctcaaaaaaaaaaaaaaagaa

SEQ ID NO: 5446 - DNA, 63 bp, Homo sapiens
ccactgcactccagcctgggtggcagagcaagactccatctcaaaaaaaaaaaaaaaaaaaat

SEQ ID NO: 5447 - DNA, 142 bp, Homo sapiens
cctcagctactcgggaggctgaggcaggagaatggcgtgaacccggggggtggagcttgcagtgagccaagatcgcgccactgcactccagcctgggtgacagagcgagactccgtctcaaaaaaaaaaaaaaaaaaactta

SEQ ID NO: 5448 - DNA, 154 bp, Homo sapiens
tgtagtcccagctactcggtaggctgaggcaggagaatggcgtgaacccaggaggccgaggttgcagtgagctgagatagcaccactgcactccagcctgggcgacagagcgagactccgtctcaaaaaaaaaaaaaaaaaaaaaaagggccgc

SEQ ID NO: 5449 - DNA, 1548 bp, Homo sapiens
agcagctcttgcagtgggtgggcgacttcgtgctgtacctgctggccagcctacccaaccaggtgcgccatgctctcccctaaggccccgccccccacctgggcccccatctcatcaggaccccgcttccctgcccctgcccctcaaaaccacctcagccccgcccctagttggagtcccgcccctacttggagtcccgcccctacttggagtcccgcccctgcttggagtcccacctcagccccgcccctggttggagtcccacccctacttggagtcccacttcctgagtctgtctcttcttaaacccccacttcctagccctgccccacttcctagccctgccccacttcctagccctgccccacctcggagccctgccccatctcggagccctgccccacctcggagccctcccccacctcggagccctcccccacctcggagccctgccccacctcggagccctgccccacctcggagccctgccccacctcggagccctcccccacctcggagccctcccccacctcggagccctgccccacctcggagccctcccccacctcggagccctcctctccatgaagcctctgctgtaagaagcctttccttggccacacccttcctgcccattctcaaagccccgcctcccaggccctgctccttctcagccccacccctacacgaaggccggttcgccttgctcctgctgctgctgcccccaccccttaccctccccagctccctgcgcctggggtgggcggccttgaaatcaagtctccatccacacctccaccttcagttttgcggcttgtgcgcccctgaccagggctccaacctcgcccccacccccccgccggtacactctgtcctgccccagctgtgatttcttctgccccacccacccggcttcatcctgccctggggcccgcccttctccaccgcgcccatcacggacggtttgaagtccctctcttctttttgtggggctttaggctgccaggggccacccctggggcctccccttccctggtcctctcagctcccagtacagtcaccaggggcccgggcccgcagctgtaggagggggcggctgctcctccacgtgcaggtggggatattggcctcagccagagcctcgtcttagtcttgtggactctcagggatgggacgactctgcaaatggggctgtcctgggccctgcagggctctgagcagcgtccccggcatccacccactcggtgccagaagcaccccagtcctgaccaccacaaatgtcccagaccctgcccattgccccccggtcggggttccaccgaccccaagacacttcatcccatcgccatctgccccccgccgccccagccacaccgatgcctctttcgggcagggttccctgctgaggccgggccacagctttctgcgggacggcacctcgctgggcatgcttcgggaattgatggtggtcatccgcatctggggccttctgaagcccagctgcctgcccgtgtatacggccacctaggatacccaggacagcatgtc

SEQ ID NO: 5450 - DNA, 129 bp, Homo sapiens
ttttttttgagatggagtctcgctctgtcgcccaggctggagtgcagtggcgctatctcggctcactgcaagctccgcctcctgggttcacgccattctcctgcctcagcctcccgagtagctgggact

SEQ ID NO: 5451 - DNA, 131 bp, Homo sapiens
ttttttttttgagacggagtctcgctctgtcgcccaggctggagtgcagtggtgcgatctcggctcactgcaagctccgcctcccgggttcacgccattctcctgtctcagcctcccgagtagctgggact

SEQ ID NO: 5452 - DNA, 3771 bp, Homo sapiens
tactcaccaacctttattaagtacattttagatactgggattagaagatgatgtcattagacatttctttggttttagcttctgtgggtttgatcaaggagtttattcagtattttaaatcttcccccaaatctggctttaactctttgccttaagagtgctttgtgtttgtttcttttacttagccctttgaggtggacctttctcacgtgtatcttgcctatactgaggagagtctgcgtcagtctttgatgaaactagaaagaccacgaacttcaaaggggaaagcaaggccaaagacagggagaaggtaaggactgtccttgaatctggtaaaacgaaggcattgaggtattctaattagatacatgtacaggaagttaaaatttatttagttaaaacatgatacatattttggctgatttattaaaaatcaaattcctggctgggcacagtggctcacgcctgtaatcccagcattttgggaggccgaggcaggtggatcatttgaggtcaggagtttgagaccagcctggctaacatagtgaaacgctgtctctactaaaaatacaaaagttaaccaggcatggtggcgcatgcctgtaatcccagctactggggaggctgaggcatgagaatcgcttgaacccaggagccggaggttgcagttagccgagatcatgagatcatgccactgaacttcagcctgggtgacagagcaagacttggtctcaaaaaaaaaaaaaaaaaatcaaattccttatgtattagaatttgagtaaataaaatctggccaaagaattaaggtcttccaacttcttaggcttctgagtaatagaatttatttttaattcactctgttatttccaaatgtataatgggtttaattccttaattcttagactaattcttcttatgaaatgctaattaatttgcctgtttggtctcccaaggtattgtattcagctggttagtttttctgtcaggtgccccaagaaccttgatttcctcagtcaccagctaaggagaacttccttggacatttccccctctcctttgggcactggttttgactgttgggtagtctgcgtgtatcatcacataagctcagggaaatcgggatatgggagtcctgggctggagcttatttttttttcctttccctttcctacatcaaggactgttcagtttatttaagctgattttaagactctggggctcctaaaatgtaggaaataataagctgcttttttccctactttgagtgcatggactttcaagttacatgtgggatgaagttgtacggttttgatatctttgtgttacataatctcatagacatgacttaacacttataaatttgggatggttgaactcagggttgggcaaacagttgaatattaaaaatgtacaaatttttacattctttagcatttaggtgaggggttaaaaactttcctataccaacacatgccaagcatattgtagtgaagcaaatcagttctaagaaacatgagtccctttagatgtatctttttttccatttttaataaaatgacagtgcaagtgtgatgataaatggtaagacatttgtccccagcgtaggagaaaaattggcagtggtgagcagtcctgtctaaagtgagtggctgctattctcttcctagttatctatggaaatagagggctcattgtttctggatcttctgttttcttttcttttcttttttttgagatggagtctcactctgttgcccaggctggagtgccctgagtagctgggattactggcacctgccaccatgcccagttaattttagtatttttactagagatggggttttgccctgttggccaggctggtctcgaacccctgacttcaggtgatctgcccacctcagcctcccagagtgttatgattacaggcatgagccaccgtgcctggcctggatcttctcttttctaaggaaaagccagaaattcgaattatttacttgagatctgtcaattttactttttttttttttaactatatggaccctaaagcaaatgaataaataatatgatatttgaatacgttttccagaacatccattttaagatacgtcatttttttagtttaacattaaaaaaatcgtgtggcccaacattatatgagccaaactcaccatctctgtatactggaattggcctgctataaccatggaaaccctaagaaaatggtagccataaacatggacaaatacatgcattaaatggtttattgatgctatgttacattatatgatatgttcaatgtgatgttccttgttagaaacacatagttagatgggctaggcaaaattgcaataaatataatacattaatgtagcatttccataagtccctacatatgcatcaggtattgcctgagatgatttgtttctgatttcctctgaatccacttgcaccttttgagtacctcagaagagataatcaggaagttcaaatctggcaagcatgcagctcacttggcctggccacatgacctagtctagtcttggaaattatcacctgtcctatccttcactatctggcataatggggtgggctgccatcctcttgcatttactttaagttagcttcccgtagcctgaaaaggcgagcattaattgaacacttaccatggtcaaacgtgtcaaattttggcttgtttccagactatacaggccaccccatagtttctatataatgttaaatgtttgcatttcagtcttttaggaaagcattcatgattgctttttttcttctccaaacagaaagcgttctgcaaagcctgaaactgtaattgactctttactgcagtaaatgttacagacttaaagtcacaataaaaattagtgatattctcatgcctggacaaaatctttaattaaaacagtgaagacttctctataatttcaattaatggaagttgtagatcaatgaataagactggaaataataatttgcttaagaacttttagtctacatatattaatataacattaaaattgtacaactggtgattgttcaaattgttgtactactactcttcaattgtactgtgcagggaagttgggggaacagttcatactatagagagttacagtttagatgtatgtgtaaatcgattagctatttatccaactactgtatatttaggtaactagaatttcaaaatagaaaaaaaaaaactgtgtcctgttttgcacatagaaagaagcagatcagattgtcctatgttgcgctgttatatatgaatgtttggactgtacatctaaagaatgattccgtcctaacacccacccagcctgtttgaacacattctaattgtctaacatttgttgcattttaagtatgagatgactgatcttatgaatgttttgtagaaaatgttataatttaacagtctttgcgagtatacatgttttttaacaagttgaaaatgtttcatctgaacctttcctaacttttttttgccagtttgagttcaaatcaaatacaccttaagttctggtttcatgttctcttgaaacattgaattgtacgtaaatataaaggatctactgttgcggaaaattaagaagctaaatactgctcagttatctttgcctgcgtgtatatttttaaaaattcactctgaagtgttatggatgcttttctttgagttctaaattttggtgggaattactttatgtctcccagttaagaagagtctccattttccagaaaatacagctaagcaagaaa

SEQ ID NO: 5453 - DNA, 4461 bp, Homo sapiens
agagggaaagccgcagcttgttgggcgtttccaagtgacttcatccaaggaaccggctgagcctcttcccttgcagccaacatcccccactctctctggttctccaaaaccttcaacccctcagctcacttcagagagctcagatacagaggacagtgctggaggcgggccagagaccagggaagctctggctgagagcgaccgtgcagctgagggtctgggggctggagttgaggaggaaggagatgatgggaaggaaccccaagttgggggcagcccccaacccctgagccatcccagcccagtgtggatgaactactcctacagcagcctgtgtttgagcagcgaggagtcagaaagcagtggggaagatgaggagttctgggctgagctgcagagtcttcggcagaagtgagtctcgggaggatggaggagtgagaggagaacctgggagagcaaggtgtgtggctagccctttcatgccctccgtgcatcctcaggcacttgtcagaggtggaaacactacagacactacagaaaaaagaaattgaagatttgtacagccggctggggaagcagcccccaccgggtattgtggccccagctgctatgctgtccagccgccagcgccgcctctccaagggcagcttccccacctcccgccgcaacagcctacagcgctctgagcccccaggccctggtgagactgcagtcacccagcttccatcttttccctgagacccctttctgtcgactgtttttctccaggccctgggggtctgccccgggggaatagaccccctctccccacctcccctttcctcacttagtgctctccttcccccatcctgctcccaggcatcatgcgaaggaactctctgagtggcagcagcaccggctcccaggagcagcgggcaagcaagggggtgacattcgccggggatgttggcaggatggtgagggcgggcccaagggagggagagcccagggaatggtacctggctgcagcttcgccttcctcccaccttggaggtttcttcatcactttttcttttccctccagtgaattcagaacagaagccatgtatctcccccacaccagggcccaccatggagcttgtgttctcagaatctgatgctttctgatcaacaaaactgagcaaggaagatcccaacactgaaggggtagaaggccaggggggcatggagagtgcagctccattatagtgaagagccaaacatatgtgaactgtttgctgtgtggaggtgttagttctgctgcctaccatcttcatctctagcacctcccctgccaagagtcaaccactaagcaatcccacccaagcctggatgcttctagaggggcccactcccagctgggagagtgtaggggatatgctcacaccacattagcagcaaccaataaaaatgctggaaacaagaacgccgtgaatccatatgccatgccttaggaattgggggagcaaagacttgtggggtgaggcaggggaggatttaaaagggactttcttttcacaatgggaggcaggggtggaagctgcccagccctctggcttcctgccatcagttaatgaggaaactgcaaggtcagtgatccacttgactaagttaggatcccctccagaccccaccctagacctgtataggcaggtaccagggaaagttaaaagaatgaagactgcttgtctttcacccttcatccacctctctctccctccctctctctggggatgggaaaagcagtagagttacagtatgttcttgtgggtagaggacagaagagtgaccttccttcccctaagacgtgggttcagtctcaaactgcccagtgatctctcccttaaatcaggtggaaagatctcatggaaaaagtaattctagttaaacatttacagctccctggggcaatgccaccactgcagctactgcttgtgaagctttccagcatgaagtgccatatgctgcctctcagcctccatactcacttgactccaggagaatgactcagtttattattctcaatttgaccctatgtatcccactgtaggctcaaacactgcacagagctgccacgtctaacctcgtaacaactgcgtccctggaaggtgaagggggtaaaccacaaagtcagaaactttgggaaaagccacggtcgcatgcacacctctcaaacaaggaaacaaactacaagaaagggctcagtcattgtacacagcaagtgtgcagtgggcaaagttctgttcttttgacattggccaaatgcgtaagtccctggtttcttgggctcaatcacggtccaaggttagtaagaaggccaacaatgttgtgagcaggattcaatttctacagggtcatggggcatcatccaccatgtgaaggggctccagcaggttggacatgatcaatacccatccagattaggaccctgacgcccttgccagagctcgggctcgggcagctttggcctcgtcttctagctcatctaggaaacgctcctgggaaatcgagtagaaggtgtaaccatctggggaggtaggttcaggaaaccacacagaatatgcacattcccctttcctagatttgctctaccactcttgttactctcccaaatcagtgattccggcttcccgccgctgctgtttctaaaccctgaaccccaattccgttattattaataaatcaaattaaaagagtaccttaggaataacaaaggaaagtactacccattttaccccaaaattaaacgggtggttcagccctcttgcacactctgttcccctgcccctatatgcggtccccttgagtctacaacacggacggatacaaatagccaacaccagggccccgatgcctaggccggtcacgatgttccgggttcgccgccgtggtaggaccttctgccactgggcaagctccgcctgccgcatggaatgcagttgctcgggtgtcagcttctcccgagtcgggtcgatacgctgagcgaacggggcctctccacgcttagaatccagagggtcaccagctcccgaagacgccatgttgccactcctcccttcgcggtgccgccgcgcgggcctcgctgggaacagtagcccttggccgctgcagtggactctgggagttgtagtccgcgtgccctttgcggggcagagccgcggttcccgggcacaggggatggacgcgggaggtgagaagcggacgtgctttctgattggctgaggagtccgtggccgttggggcgggaaaaagctgtggagggttcgaggctgtggtggtaattgggttttcctcagacttgaggcgacgacacactcattggaaggggacgaggaatccagggtgtggcagaagactggagaggagctaagggggtcggtatgtggatccagtgaacccgtccaggtgccccaagaggctcgtgaatatggacggacccatgaggccacgatcggcctccctcgttgactttcagtttggagttgtcgccacagagacgattgaagacgccctgcttcacttggcccagcagaatgagcaagcagtgagggaggcttcggggcggctgggccgcttcagggagccccagatcgtgggtgcggctgcagggccggggtgctgggttcttgggagactggggcttgtgtctttcaggcaccgaccttgagattccgttgattttattcattcagagaatgtttgctaacacctctctgtggggtgctggggatatagtgatggataagtcacaacagtgccctccccttgatttcttcgacatgtatggaatacttgagtggcaccgcttggctagaaagatgaaatagagggccaggcatggtggcttacacctgtaatcccagcactttgggaggctgaggtgggaggttcacctgaggtcaggagttcgagaccagcctgaccaacatggtgaaatcctgtctctactaaaagtacaaaaattagccaggactggtggcgcgcacctctaatcccagctactcgggaggttgagacaggagaactgtttgaacccaggaggcggaagttgcagtgagccgaaatcgtgccattgcacttcagcctagacgacaagaatgaaactccgtctcaaaaaaaaaaaaaaaaaaaaaaaaaaaaaaaggctgggcgcggtggctcacgcctgtaatcccagcattttgggaggctgaggcgggcagatcacgaggtcaggagatcgagaccatcctggctaacatggtgaaaccccgtctctactaaaaatacaaaaaaaagccgggtgtggtggcgggcgcctgtagtcccagctactccggaggctgagggaggagaatggcatgaacccgggaggcggagcttgcagtgagctgagatggcgccactacactccagcctgagtgacgggtgacagagcgagactctgtctaaaaaaaaaaaaaa

SEQ ID NO: 5454 - DNA, 6534 bp, Homo sapiens
ggcgcagaccccgatcccggctgcgggtcactagtgtaaggatggagtacaggagatagagagtaacctacagggccaggagggaagtgtcagggggaggcgggggaggtcacccagaaaacgggagaagcagtgtatgactagtactcaagaggcggccagtctggtttctaataccagactttagaggtggggtctacttatctccaagtccattgtggctgctgtcacttggctggggtagggtggagacacagcatgatgaagagggcttgaccttctcccctctgctgactttgaatctgaaggtctcagaccagaatgacagagtggttgagtgccagctacagacccataacagcaagatggtgaccttccgatttgatctggatggggacagcccggaagagattgcagctgccatggtgagggggagagagatgaggacagagtgtttggatctggaacaagagtctccttcctgatgtccgctggggctgaaacccactgatccgacagcaagcatttttaaatctctggttgacacttagcacagtaacgctgaagatgtctcagcccttgttttgggggagatttctgtttatccagtgaggtttggcttctcagctggagcaatttgagactcacattgaccgggtacacacaagtgctacgtataagtgcctggtagatgtgcaatactgtggctgtaggtgaaggatggactgggcagcaggggcaatgagcttacccaggatcttggcaaatgggcgagaaaggctgtgaagggtggaaaggccatgaagggtgtccctgtgcagggacagcataagcaaaggcattccaagtagagagtgtcttggaatatggggctgggagggcttcatgaggaaaccactatcactggaagtaaagattcctataggagagttgtggggagtgaagccgggtaggtagagtgggcccagattgtagaatagacaatgttaagagttaggcagaggccaggcgtggtggctcacacctgtaatcccagcactttgggaggccgaggccgaggcaggcagatcacccgaggtcaggagttcaagaccagcttggccaacatggtgaaaccccgtctctactaaaaaatacaaaaattagctgggtgtggtggcgcatgcctgtagtcccagctacttgggaggctgaggcaggagaattgcttgaacccgggaggcggaggttgcagtgagccgagatcacaccattgcactccagcctgggcgacaagagtgagattctgtctaaaaataaataaataaataaataaataaataaatagagaggcagagcaggctaggtccagtggctcacacctgtaatcccagcactttgggtggatgaagtaggaggattgcttgagcccaggggttcaagaccaccctggtaatataatgagaccctatctctacaaaaaatttaaaaaattagccgtgtgtggcggcacatgcctgtcatcccaactacttgggaggctgaggtgggaggatcacttgagcctgggaggtcaaggctgcagtgagctttgatcacgccactgcactccagcctggaagacagagtgaactttgtctcaaaaaaaaacaaaaacaaaaaaacaaaaaggcacagtgtaacgtgacagtaggctttatgaaaatcatctgccatgggatgtggaagggggaagggaaaatacctgggaggtagacccaggaagccatctgtggacaaaggagagagtggcttatgggagggaagaggagaaagggtgaatctgagggttgtttcgggaaaataagttactctgtaatccagtaacctattgacgtagtagagaacatagtacatagtagatgctcaataaatatttgctgagttgatatgattgggagttagggagaagggatgtcaaggacaacttgtaggccaccaaaggagagtaggagagtaggccaccaaaggagagaggaaattagaaatgaaagaaggttttttttaaggaggtcatgatgagcttgagtgaagaagggacagccaagacaagaccctccatagccatggatatgggtcaggcagggctggagagatgtggatggaggagtagtcagtacagagttgagagtgaagggagatgagccggcaaagccagagacacagagggttgcagagtgtgtctcagcgcataccaccagttctggagtgggaagcgggagggtaggtcatcgaaggacacagagacaaagccagagacgtaggaggatgttagtcaaaactgagtgaggagagagtttcaaggaggtggcataggatgaatcctcaggcaagaccacactggcttttgttaggagatctttgtgggagaccagtttcagtggagtgggggtggtggatgccagcccatggggtgaaggagggaaaggaatgggagaaacaccaggcatcaggagccctctctaaagcatctcctccatcatgtcattcaccttgtgtccaggacaaagacacaatatcacctggcacacaaggctcatcaccttccgtcaaaccacttgactctttcagagtcttccatccagccacactggtttcaaaatgggcctctgaaaaggctgggtgccttcctgcctctgcctccacctccttaagggtctctcactcgtagagccttctgtattgggctttcaagtcccctctgatcctgcacagccaaagtgaccccaccccatgcacccagagtcctttgccctcttttctctccttacccagtccaccctccactcctctgcagcagaattctcctgagacttggatctgatctcttgatattcacccgaaattatttagtggctacttgtggttgtagagtaaggtccaaattccaaagcctttaaaattcacagcacattcagctacacttgagtcctcactattttaagaataggctgtgccgggcatggtggctcacgcctgtaatcccagcactttgggaggccgaggcaggcagatgacctgaggtcgggagttcaagaccagcctgaccaacatggagaaaccccgtctctactaaaaaatacaaaattagctgggcgtggtggcgcatgcctgtaatcccagctacttgggaggctgaggcaggagaatcacttgaacccaggaggtggaggttgcggtgagccacggtcataccattgcactccagcctgggcaacaagagcgaaactctgtctcaaaaaaaaaaaaagaagaaagaaagaaagattgaataggccgggcgcagtggctcacacttgtaatcccagcacttttgggaggctgaggcaggtagatcacttgaggtcaggagttcgagaccagcctggccaacatgaagccctgtctctactaaaaatataaaaattagctgggcatggtgccaggcagtcccagctactcaagaggctgatgcaggagaatctcttgaacccagaaggtgaggttgcagtgagccaagattgtgccactgcactccagcctgggtgatagagcaaggctcagtctcaaaaaaaaaaaaaaataataatgtaccatgcctttcatgcttcaaagctactacactgttctctctgcctagactgctcttctcttcctgatgaacagcctggaatagaggaaggggtcgctttcatgtaatacctaagttcaaacttcagctctgttatttactaatccaatgaacttaggcaagtttcttaactctgtaaacttcagttgcatgtaagtaaaatgcagatgatagtatttgttttgcaaagatgttctgatacgacacagtgtaatgtagaagtgtccacacatggtaggtcctcaatagagattgcttttctcatctgtcaatgttcagctccaaagacttactctgtgaaactgctccagcttccccctatccccagggtggtattctgtctttggaatagcattttaaaaaattgtgattaaaaaaccataaatataaaatttaccaccgtaaccatttttaagtgtacagttcagcaatattaagtatattcacattgctgtgaaacagatctccaggggttttcttaccttgcaaatctgaaactctgtacccattaaacaactctgcctctccacacccccatccccccaaccctggaacaacatttctatctatatctcacttgtaagtgccttacgtattacgggctgccttgcagtaagtttaattacgtatttatgtgtctcctccactaagttttgggcttcgttaagcctaggaccttgtttcatgcttccttgtattcccacagtacccagcacaatgccagcacatagtaggtgctcaataagtattcatggatttgaatgtgacatttgccatttattgccttattctgacttaaccgtgtgggatgggtgtatgtgggcctgtgtgttatactttataaacactatggggcagaaattgtgtccaaaacatgggaggcagcagtgaagataactcaggctctggctttaggtagatgtgggtttaaatcctgtgaccttaggcagacggaacttaacctctttgagcattggttatcttaattctaccatagcaatattaatgtgggccccagaaagttactggtggtgttaaatgtgataatatacgcaaagcagctggtatatatacgcatcctatgaatgttagcacctttccttctaggctgtatttctccttacaccacacagtgcctggaacacaataggtatttacttgttttaggttggtggttggcaggagcagtagtgtgaagggtggattttttatttttatttttttgagacggagtctcgctcagtcgtccaggctggagtgcggtggtgtgatcttggctccaccgtttcccaggttcaagtgattctcccgtcttagcctcccaagtagctgggattacaggtgcccgccatcatgcccagctaatttttgtattttagtagagatagggtatcaccatgttggccaggctggtcttaaactcctgacttcaggtgatccgcccgcctcggcctcccaaagtgctaggattacaggcgtgagccaccgcgcccagcctgatgttttaagatcagaagcagggggagagggatgagtgagataacaagctctccctccccatcctgttgaccctcgcaaggtatataacgagttcattctgccttcggagcgagatggatttctcagacggattcgggagattatccagcgagtggagaccctgttgaagagagacactggccccatggaggctgctgaagacaccctaagcccccaggtcagaccccttggtggacacttccaggggaaatggactctctgctccagggtttattactctctgccctcagcggtccccttggatttaactcctcttcatctctgggaccctaaaacagtggcgcttttttttttttttgagatggagtctcactctgtcgcccaggctggagtgcagtggcacgatctcggctcactgcaagctccgcctcccgggttcacgccattctcctgtcccagcctcccgagtagctgggactacaggcgctcgccaccacacccggctaattttttttgtatttttagtagagacagggtttcaccgtgttagccaggctggtctcgatctcctgacctcgtgatccgccctcctcggcctcccaaagtgctgggattacaggtgtgagccaccgtgcctggcctaaaacagtggctcttagcccatttgagaatatgatgaaagccatggactcttgttctagaaaacttgttcaatacatacttttcttttaactcattattttgaaataatttcagacttgtggagagaagttgcaagaattatataaagaaccactggataccctttgcccagatttgccacttgttagtgttttgccaccttagcgtcatcattgtctcttcctctcccctctgtatgtgtgcatacataatatatttttcggaaccacttaagagtaagttgcagacatcatgcccttttacctctatacatttcagcacatatgcttctgaatcccttgaaactcatgtacagactcctataggttcatgggtcctagcttaggaaccccggtctgacaccttccatctcagactgctcttccccactgtgactgcggactcctttttctgcctcaggaggagccagcaccattacctgccctgcccgtccccctcccagacccatccaatggtatgtactgagttgtgtccttgctcatcccaacccctggggttgctcctgggaagggcatagggcatgtgggactgtggtctcaacataccctccttcccagaagagctccagagcagcacctccctggagcacaggagctggacagccttctccacctcctcatcttctcctggaactcctttgtctcctggaaacccattttcccctggaacccccatttccccaggtcccatcttccccatcactt

SEQ ID NO: 5455 - DNA, 1312 bp, Homo sapiens
acacctgtgcagggcccacaaacacggtcctttctctaggttagcggatcagatgcctgatgagtgccatgccctctgtggacacctggggaggggggtcacctccagcgccgccctgggacttccactgcacgtgcaagagacttaccctttcacacagatcacctgcctgccgcaggctgatgaggatgggtgaggagcgcacactgggtgtcatgcactgtgggggttctccaccttctgcccctcctcaggttccttgctgcttctctcctctcccaactgtggcacgctgagggctcaggcacaggaccgctcctctggggcagcctccaataacccttggacaacctccactttttcatcttcagccctgaccactccctgggcccatagccttacatccatctgcccccagcccaaacacttctgcaaacactagaaaaggaggtagcccgtgtgccctcctgcaccgcctcctccactcctgtcttggagaggctttcccgtgggccgagcaacccccttacctttggcacttgccctgattctctggccagcttcctacaacctctccttttcagccacacccaagtccacctgttcacaaacaccctgggctgggcctggcgaaccctggcttctacctacctgtctcaggaagtgcctgagccttgcacctacagaccctcccagagaaagccctgctttgcaaccagctgtcttctcatgagacacagggccacaggagcaccacggtgccaaatgggtcttggagcattagaccagggcttcatgcctgccctggggacaggtggccaaagtggcatgggagatagggagacagtgtgggtgagcaggtgggcaggagctacaggagcctgggcctgtggatcacagacaccgccagcaagtgccagttcacacaggtacaggtggctgcagagtgcccaaaggccaagcagcagagtgcctggtgtggacgggagaggagtggggaggttgggcgcagtggacgcctgtaatcccaacactttgggaggcccaggcaagcagatcatgaggtcaggagatggagaccatcctggccaacatggtgaaaccgtctctaataaaacacaaaaaattagccagacatggtggcatgcatctgtaatcccagctactcaaaaggctgaggcagaggaatcacttgaacctggaagcagaggttgcagtgagccaagactgcgccactgcactccaacctgggcgaaagagcgagactcaagtctcaaaaaaaaaaaaaaaaaaaaaaaaaaaaaaaaaagaa

SEQ ID NO: 5456 - DNA, 671 bp, Homo sapiens
  SITE (30): n equals a,t,g, or c
  SITE (599): n equals a,t,g, or c
cctttctctaggttagcggatgcagatgcntgatgagtgccatgccctctgtggacacctggggaggggggtcacctccagcgccgccctgggacttccactgcacgtgcaagagacttaccctttcacacagatcacctgcctgccgcagggctgatgaggatgggtgaggagcgcagccactgggtgtcatgcactgtgggggttctcccaccttctgcccctcctcaggttccttgctgcttctctcctctcccaactgtggcacgctgagggctcaggcacaggaccgctcctctggggcagcctccaataacccttggacaacctccactttttcatcttcagccctgaccactccctggggcccatagccttacatccatctgcccccagcccaaacacttctgcaaacactagaaaaggaggtagcccgtgtgccctcctgcaccgcctcctccactcctgtcttggagaggctttcccgtgggccgagcaacccccttacctttggcacttgccctgattctctggccagcttcctacaacctctccttttcagccacacccaagtccacctgttcacaaacaccctgggntgggccctggccgaaccctggcttctacctacttgtctcagcccccgcccagccttgcacctacagaccctc

SEQ ID NO: 5457 - DNA, 2704 bp, Homo sapiens
cgcgcggcgctcccggcagaggcagagggcacaccgccagccccaggccaggctgcgagggccgcggacccgagccgggaaggaccttgggcggacgagcccgcgtcccgcagccatggagcaggacgacccggtcgaggcgctgacggagctgcgcgagcggcggctgggcgcgctggagctgctgcaggcggcggccggctcgggcttggcagcctacgcggtgtgggcgctgctgctccagcccggcttccggcgcgtgccgctgcggctgcaggtgcggggcggggccaggccgggcaggggagctcggctgccgctcagggtctcaaggtctgggcgtggccggggtgagctccgccccgccgtgtggtagttcgggccgggctgcgggcggggcgggagcggccagtggactctcgccgccacccggtccaggtgccctacgtcggcgcgagcgcgcggcaggtggagcacgtgttgtcgctgctgcgaggacgccccggaaaaacggtggatctgggctctggcgacggcaggatcgtaagtgcctgcgtctgggtcttcgccgccccacaccgcccacctgctgcgggcgcccctgcccacatcctggttcccacactctcggtgcccacaggtgctggcggcccacaggtgcgctccgccggcgtggctacgagctgaacccctggctggtggctggcgcgctgcacgcctggaggcctgtgccggcagcgtcttatcgccgcaagatctctggaaggtaacctggggatccctggccacccgctgacagcccaaggtgcggctgacacctgcgagggctgggggccgggactcggaagctgcgatgacccggtgccaccagcctctccggcggggcgacttctcttccggcaggtgagcctgagggactgccgcaacgtgtctgtgttcctggcccctagcgtggtaggtgcggggttgccagccccgctgggaagcccagccacaccccagggttttgctgctctgaggcctgggcgcctggtgggtgctaggcttggggctaggggggtgagcgcggctgttttctaccggccccgccccgccccctctactctgctgttctctccctcagtcccgctgctggaggacaagctgcggacagagctgcctgctggggcccgcgtggtgtctgggcgcttcccactccccacctggcagcctgtgaccgggttgggagggctggaccgagtatgggcttatgatgttcctgagggtgggcaggctggggaggcgcctcctcgcggatacccatccaggctgccccggacctagttctgcccccatcccgggggccttatttctcaggccagctgagtattagacacgataaagactctgtgggttctatcctgactcatgttttatggggggctgggtgggagggttctgtgctggctgaggagctctgcctgctctgctccttgggagacggcctagtggctgccggtccttggatgctggggcttggctggaggcacagccccactttccaggggtcccctgcacctgccagcttcctcagcctcaggatttcgtgcttgtacctgctcagaggaaccatgcttaagtgacttgcccagctgtggacaggtctgcttttagcgcctgaggcagccatcatccttcattccaaccagaccagggccctggggtcacacccagctccctctgcccacctgcccaggtgctggtccacgtactcctgtagctcagaaagttgctcttcagccatcgtggcccggaccagcagctgtgcccgctcccgttccagctctgcctggcatggggatgtaagccatgagctggggcatggcgtgaggatgggcctgggcagcccttgcctcctacctgggtgctgcgggagaagtcccggagcttctggtggatctgggcccaggatgcagcgtccaggcccctgtgagggggaggaaaggaggagtggttttgagagctggcatggtgacacagggacagacgtgaccgtgctgagtcaggttcccagagccgggaggggacacctgggagtgagtgagggaggcatggcccccccgtgctcctgtggcgccccccccaggccttggagccatccgtgtatagggacagcccgggcccagggggtctgctggctgctgggggagggctaaaccacaaggccagcccagacagtgactccagcatcaacagggatgccacccccacacgggtgtgccctaaaccccaggaaatggtccttggggagccctgcccattgtacagctgggaacatggaggcccagaggcaaggctggccggtcaccaggcgccctgctcccacccctcgcgtcctccaggtctcagcggaaacctccctcaggtgtgctctccctgatcctccgtgttcaaggccagctccacctgcagcagcccctcttctctttcctgtgattatcagtgtcgccgggacccacggagggaccccagggtggggatgtgccactgagtgcattgctgtgaccagaccctgtcggcgggggcttggtggagcaactgggggccccagggtgcaggcgttgtgctctctgctcatcccccacaggcctcccccacacccatgagggcactcactgtggctctgatgttcccccctggaggctccaccgggtctcttttttgg

SEQ ID NO: 5458 - DNA, 1586 bp, Homo sapiens
tgccgctccatcacactgaacaagcattttattccagggattcccaacatgtgagcagggtggaagcctctgacaaggtgggccagaacctttggatttggtttgggggccaaaatcaactaaggctcagagaacatacaaagcctgcgtgaaggtggtgagctgctcccaccttcacaggtctggggtcctaaacccctggagccatggtcagtcctgtgcccaagcctcttcttttgcaggccctgaaactttcactacagctcagacactgctgcacgggccggggagggagggggtgcttccggcaactgttcacagcccctcactcagcctccctggtgaccaggcacagactagccagggaacggagcaaagccagctggctccagatccagctgagcagcctcccggaaacctcctaacctacgcttaatggggagggtgcacaaggcagctcagaaggtgcatcttcctgggatctgaagcctaaagaaagccacctccagccaggctactgggaggtgttgagggcatgactcctccactgtcggctaaggtcctcaatggtgtcccgaagcatcagcatccagttgtcacctctccgcatcagggtgcagcgtgtctccttgtgctccagggctacgatctccgcgggagtctcaggggtcaggccagcagccaggacagcttccgggaacttggctgcagaggcaggggcgaggcagcaccggggagtgctgtggggatgggggcaggtggcacccggaggacaatgagagaatagagagatgggaaaggagaaggtggaggaggaataagaaacagaggaagtttagggatgggggggtatggaggacagagacacagacagacaattggcaccttgaacttattgctacaatgacgctacctggcaaactgctcctcctggttggaggccagctcagccaccacctctgaccatggctgtccctgggatatctgtcacgctccctcttctgggcccacagtttccaaggcacagttccacacagcacccatcacactccattacagccattttttcgtagtcctgtctctcccactgcttggagaagaagagggcccctgaaattcaaatggtccctcagtggcccaggcccccattgcctgtacctgggctgctgcctgtctatctgctggtaatggtagttcacggccaccgctgagtgggggcacagcaagtactggttctcatcccagcagcggcccatggtctgggtgatggcttcatccgacactgacacggatgtcactgcctctgaaagctgaagggtcccaggtcagaaagatgaggtgtgggggggggatgtagggaaagatgacaaaaccccactctccaccacagatccacacaaaccccagggatccagtgggacattcagaccgaatggctcagatgtggctcacagtaaaaatctggcctcctagttttgagctgactcactcaacttggaggaaagatacgtttgagttttatgtcaatccatttagttgggatttggctcctaatcagcaaatatagatttgttcaacaacttgcc

SEQ ID NO: 5459 - DNA, 466 bp, Homo sapiens
ttttttttcttttcttttttttgagacagagtctctctctgtcactcaggctggagaaccgtgacacgatcttggctcactggaacctccacctcccaggttcaagcaattctcctgcctcagcctcccaagtagctaggatttacaggcatgtgccaccatgcccagctaatttttttttttttttagtagagacggggtttcaccatgttggccaggctggtctcaaactcctgacctcaaatgatccgcctgcctcagcctcccaaagttctgggattagaggcgtgagccatctcacccggctggtatcatagattttcatatagctacctgctgtgaattagggttcccagcagacaatgaatgtattttacttgtctttgtgtttctagcacctagcacagttcctcgctcacagtagatatataacatgaatgcatgaatgccattccagcaagtgaag

SEQ ID NO: 5460 - DNA, 279 bp, Homo sapiens
aagtggtgggcgtgtgtgtgtgtgtgtgtgtgtgggtgtgtgtgtgtattagtctgctcaggactgggtgagatttaaataatagaaatttatttcctcccagttctagaggatggaggtctcagatcgaggtgccctcagcgttgctttaattctggggcccctctccttggcctgcagatagcagccttcttcctctgacttcacgcagtcttccctctgtgccacatgtctatgtcttaatttcctcttataaaataagggacaccagtcctactg

SEQ ID NO: 5461 - DNA, 1186 bp, Homo sapiens
aggtgcaggagctggaccctgtggtagggtggaggcccgccccaagcctggactatcgcgtgtgcctgccctacgccaacgcagtgctgctcgagatccagtgcttcatcagcgtggtgcccctggggctgccgcgcaccctcaccctcgacacccacctgcacagccactgtctgcccaaaggtacccactgagtctggggatcccgtgcgggacccgggtgcatgagatcagccagaatcagcaggtgtgcgctgtgcagaccaaaacacaatcagttacccctggagcaggaaggcagctctgccttcccttaggctttttgttgttgttgtttgagacggagtctggctctgtcattcaggctagaatgcagtggcatgatcttggctcactgcaacctccacttcctgggttcaagcgattgtcctgcctcagcctcctgagtacctggtattacaggcacccaccaccacgcctggctaatttttgtatttttagtagagacaggtttcgccatgttggccaggctggtctcgaacttctgacctcaagtgatctgtcctcagcctcccagagtgctgggattacaggcgtgagctacttgcccggcctattcccttgggcttttaaaaagcgtcttggatggaggtggtgcaggtgctcaccaagcccgcaggtaacccaagttgcatgtatccccagggcacttttgtgattcccctgcttgtgactgcacaccgggaccccactcaattcaaagacccagactgcttcaaccctaccaacttcctggacaagggcaagttccagggcaatgatgctttcatgccctttgcctcaggtgcaggcagaggaggaaggggaccagcctggactggctctggggtacctggtgctcactgtgcacctgtgtacccggcaaagcagatgtgcctgggcacaggcctggcccactcgggtatcttcctattccttacggccaccttacagaggttctgcctgctccctgtggtacgccctggcaccatcaacctcacctgcagtgcactggcctgggcagtgtccccccagacttccagctccagccagtggcctgctgaggtcaggctccactatggtgggctcactggccctcaaacctccataccctcctcggtcaataaaggccctaaattgcagatgg

SEQ ID NO: 5462 - DNA, 1182 bp, Homo sapiens
aggtgcaggagctggaccctgtggtagggtggaggcccgccccaagcctggactatcgcgtgtgcctgccctacgccaacgcagtgctgctcgagatccagtgcttcatcagcgtggtgcccctggggtgccgcgcaccctcaccctcgacacccacctgcacagccactgtctgcccaaaggtacccactgagtctggggatcgtgcgggacccgggtgcatgagatcagccagaatcagcaggtgtgcgctgtgcagaccaaaacacaatcagttacccctggagcaggaaggcagctctgccttcccttaggctttttgttgttgttgtttgagacggagtctggctctgtcattcaggctagaatgcagtggcatgatcttggctcactgcaacctccacttcctgggttcaagcgattgtcctgcctcagcctcctgagtacctggtattacaggcacccaccaccacgcctggctaatttttgtatttttagtagagacaggtttcgccatgttggccaggctggtctcgaacttctgacctcaagtgatctgtcctcagcctcccagagtgctgggattacaggcgtgatgacttgcccggcctattcccttgggcttttaaaaagcgtcttggatggaggtggtgcaggtgctcaccaagcccgcaggtaacccaagttgcatgtatccccagggcacttttgtgattcccctgcttgtgactgcacaccgggaccccactcaattcaaagacccagactgcttcaaccctaccaacttcctggacaagggcaagttccagggcaatgatgctttcatgccctttgcctcaggtgcaggcagaggaggaaggggaccagcctggactggctctggggtacctggtgctcactgtgcacctgtgtacccggcaaagcagatgtgcctgggcacaggcctggcccactcgggtatcttcctattccttacggccaccttacagaggttctgcctgctccctgtggtacgccctggcaccatcaacctcacctgcagtgcactggcctgggcagtgtccccccagacttccagctccagccagtggcctgctgaggtcaggctccactatggtgggctcactggccctcaaacctccataccctcctcggtcaataaaggccctaaattgcagatgg

SEQ ID NO: 5463 - DNA, 8165 bp, Homo sapiens
tcagatgtgtgcagctctgaggtaaacttttatttcttggctgacaggacttccacacccatgctcctcctggcaccttttactctgcccaagcagtggcagcccagtccaaaaggtgcctgccatggccaaaggggttggggagtcacttcacattccaggctggaggagtgagaggacttgggggtactcctcccaccccattgccagcaagaggccatgactcacctcaaccccaagtcctgcatcctggtgggaagtgacaatgcctcctcccagctctccatacctaatggggtcatgaccagacagggtaggacccaggcccccagcttcagttggtaacggtggcctccacggctgccccctgtccaggtgacaaccccagcccccatgatggggcagcaaaggtctcttctcctccttggtcctcagcaacagacagagccctccacaccaggcaggacagaggcaaagtcagaagcagcagcggtggcagggaaggagcagccagcacaggcccagggctctcctgaagtcatttaagctgtctgccatgcggctctgggactggccactaggtgggcgtaggcggctgtgatacaggtacttggacacctttctgtcctgatgctgggggtgagaggggacaggagacagtgagtcatcagaaggacaaagaagccaagggaaacctggggagatggggagaggaccaggaagaaatggggctcctgttggggtaccaggagagtgggctaaggaaggtgggcagagatgaagaaaaatgagtggtgggatttaacaagaggctgatgagggggatggggtggcatcaggcccaagagggcccacagaataggaaggactgaagggagggaagcaggtacctagctgatacttgtctttggctgctgcccgctccttggcatcaaaataccagacagtgatggcgtacctggagaccagggtggttggacattagttttctgcaattccagctaccatatccacacacactaggcggccatccttttgagccacccggttctgctcccacctaggccccctctcaatacttcgtcgctccctagtcactctgaggctctgacaggacattgtcacagggggagcacctgggtgcgtctccagaagtacaggtcatacctggtggcataggctggcttcacctcgtgggggttccgccggtcagaccagaaaatgagcaaccggtcaaagagtggctcgatgttggctaccacgggccggccctcagggaagatctgcagcaggccgccatgcacctgggggcaggccaaaggatgaggctagctggtacggccaggagccgctgcctcccacggtgccccgggagcccactaggaggcgcagcgtctgcctgcatcactccctcccacccctcgggctctcaaagtgaatgacaacccagagactgcatcaccatggagatgggcaggaagctactaaagacaggaaaagggggaaagtgttcattacaaggccgggtggggctgggcagacagcaccattcccggaaagaggggagttcccaccacacagtccgctagagaggaggaggtgccatttcccaggaagagccggcagatcgcactgcccgctgtgtgttgagaagagaaacaggagaatgccagaatctgggctgagagtggaaaatggagtggacgcacgccacccccgccccagccctagccccagcgccaccctcaccctcaccctcacccctaccttaacgtcccagttctgattcaggtaatagatacaggtgatgcagcgcccatcgccgtggggattgtcaacgtgccttacgtacccgagcccgttgcctgggtaacacgccaccatggcctggcagggatggagggaggtaggtttactggggctaggcaggcacatcttagagaagcagccatgaattacctattttcccacccctccttgccccatcttccccatgactccttgggtcaagggttccaagctcctgccccaaaagactttctttttcagccaaaatcccatccccaagtctatcagaaacctcagctcctgggcctcaagagcccactccctcccaacacacatacctggggcctggcacccagctagggctcaattagtaacagagtttgatttgtttcaagataccccaaaccccacctcagccatttcagtagaataataccaatttaaacattttcaggtgtgcaaggaggtggcctcacagccctagaccaggaattcttacccttggctgtggagtggagccccctggggagctctgaggttctgaagtacctggcctaaggaagggcctgaaattggtaaagcttcccaggtaattctaccatgcagcaatgttaagaactgctgccctggactacaaagaatccccactaaattatctgtcccatagacctccgaacaggagccaaaagctacagtctgaatagaaagacctaattccaactccaaggataatttgctgggtaaccctagccagttccaacacctgaatgggcctcaactgcctgatgtgtacagcaggggtaataaacactgctgtttacagcggtagcaattaatctctctgagaacataacttgggaggttctggagccccaactcctggagatctaacaggactcattgcagggcttggtttctctgtctacagggttctttcctctgcctgacagttgccactcccctgacccagccctacaatgctgtggccagggccccgggatgtttgtcatcagggagctggcagaaaggtggctgagaggtaaaggaaatggcccagccacttctgcagacacaattccctggttcaagtctcagtgctgccacatgagctgtggcatcaggcaggtgacttcctggtctcaggttcctcatccatggatccaatggagctcacagctatttcacaggttgttgtggaacaagtgaacaagataacaagtgtctgggaagacagccagcacagtgcctgccacatggagaactggagcacaggctgaaatgccatttaaaaattttaaaaggtccctgtcccaccctctgcccaaagtcactgcagtggcaagatgaggtagcacacaaaaaggggaggactggcacaaggacccttcaacttctccccagcccggaccatctgtcttgacctctctgccctgacctctctgccctggtacaactctgctggcgtccattccccacgaatgctcagctacacctatgggcccggcccagcaagacagtcccaagataaacattcacgatcaaacatcagtggccactgccacaacaggatgcttgccaagcacgcacgccacagcagactgggctgcttcaatcctcaccctccccaggacgcctcccaacacattatcccagggctcaccctctgtggtggatgttaagctgctctgcattaaccatgtgcacctcatccaccagaccttgccctggaaagagagggctgccaccatctactgccacctagcagtgggaagctgacaaccttctctctggcagcaccagagtacaattagtgagaaggccccccagggaaaaccctaatggctacacttcaaggttcaggagggggcaccttctttgcactgctcactccctatggaagggtcggcactctgagcaaccacctcactgggagaagaattgggccatggtccaggaggcttagaaacagtgagttactgactagagatgggcaagacctccccaattaggaatccaatcagagattacactgatgatgcacgtggatgggtggcagggaaggggtccagtgctgcaccctcttcccacaattcatccccacacagcagccagagcccctcctctccaggtcttcactccatcctgagaaaatacaaattcccaaccacagcctcaaaggcccccaacctcatgtgcctctcccatcactctgctccatgcctcaacaggctgagctcatcgccaccacaaggcctcagcactggcctgggacactcttccttctgaccctctttgttattcaggattcagagaccaagggtcaccttgagtactccggctgattgtccgttccactcctagcaacatggcatcagcacaggcacctgtttacctagtactgccctggaaggcagccacagggaagcccctggggccaggttggtctccccagtgcccagtgcagtacctgcagactggagtgcactgctctgggcctcctctgcaccccagccctgctatgtttcctcctgccctgtacattctcacacagcgcctcccaccaagcacatgggactcacacagaaacaggaacctgctctttagggccccacccttcccccacatatacacaccttgggggtgaaagcatcctctggccccaaggaaagtatctacttcctgccctcacaggggaaggcctcaggaaacttgctctccacccctcccacctaggggagggacaggtgggaccagggccaggagaccaaagacttaaaggctattggtgacaatctgcctgccaagagccccacccccactacacacacaccccagtcagaagcctgtgactgtcccacctccaagctgctcttcaaggagcaaaccaagcaagctggactctccctggggtcccctctggtagcccttgctgccagtgggagtcaactctctcccacctacaggtcaacggagcacctgtccccaaccagggagttgggggaaggaaggatgacacaggagctccactcagaacgactaagaagcacgtttctactggctctagccacactggtgatccatgtccccacggcaactgctgcagcccacctgagcaccccacagccttactctggagtacaggagagagtccagatggggcccatctaaaagcgggaaagcctggagttgctgtctcactggggaggggagggctcctcccctatgttctcagtccagcctggcctgtccttacttccctaggacaatcaaggtcacctagggctaaaaaagtccaaacacgccccttccccaatcctcgctggggccctgtccccaaccacatagaaagtgggcaccagaggcaccaaaacacaagagatcttctcctactctcccctccccaaactgccagactcactggggatgtaacctggttttcgtattccgtggatcagcaaattgaggctcagagcagtgtcccatctgggccactcagcccttctggtctccccctgacgaggacgacagccaacctggggtgaagatgctgagccagggaggccactgatcccgcccgcacaggagccaagcccagggaggggccggctctggctcagctatcaagtaacgggagggagagggaagtagaacaagttccagctggggtggggaggaaacaggccttggccccgggggagccctggtccctgagccagctccagcctgagaggaaagccacacagaagcagaacccaagatgggatctgcaggaggaggcagaggacatcaggagctcagcctcacgcctgcagggcacaacactgcccgtgccatcagccagccaggcatcactgtgttgagcagtgggcactccccacagggccttgtccaaaggacaccaagccttggactcaaggccaggcccccacaccacccatgaagacaatgatcctgtcagcagcccggaaaggccctatggaccactgtcctgtgctgggctcctgaccccaggttcctgaacaggcagctggaggccatgaggccttgacaactgcccggaaactccaagcaaatgagcatttgtcttaagagaggatctgtggcctctgacagattctcaaaaagacccaggctccaaaataccattaagaactattgttctaaagcaaaaagaaaaagggactaagaacaaacacataaaggcagaggaagagacagacatgggtagggaggaagtgacacacaggacagggggaatggagggcagggactgggacagtgaagggtgggagacatggggatgagctccacctgggccaacaggcagccacccagtaccacccccaggagactgtcctcgatgcagatgccacagtggggacccagggcacaatgcagtccagggccaagcactcggcccagcgggcagcacccctttccttccctcagcccagggctcactcatcacagccaccctcccccttctgcttctcctgccttggagacaggatggatggactagaaacatgggccagcaaacagggatggacgacaggagcacagggaaggatgtggacagggacagacagcaacagagaacggccaggtgaactgtgtgcctatctacatccccgtgcttggtctggggccacagactgacaccaggaggccatgaaccccaccaaggtccacgctgtgaatgtcagcagctctcatgagtttaagagggttcctggcaaagtcaagaaccactgtggcgatgcttgaaggcagcatgctcgttaagagtcatcaccactccctaatctcaagtacccagggacacaaacacgcagaaggccgcagggtcctctgcctaggaaaaccagagacctctgttcacttgtttatctgctgaccttccctccactattgtcctgtgaccctgccaaatccccctctgcgagaaacacccaagaatgatcaataaaaaaagaaaagaaaaaaaaaaaaaaaaaaaaagaaccactgtggctccaggacaaactcctagcttatcaggtgcacacattaaggcccgtagggaggataaagacccccccaagtccccacaagtaagcatacccactccactgaactgcctaaaccttctgtgacctcccagaagcctgtctccaaacccactgtgctcagagcactgaatgctgcaaaccagggtgctgcaaagcccctccaaagaggcccccacctagccttaccttggtgcgcccgttgatgacatagctgcccagccgccctgcgcagtggcggatgacggcgtccacatgggccatgagggcaccaatgcttcgacagcctggttcatggccttccacccaggcaatctggtccccacggatgctgcgcggcgggatcgccctctggctcactagctgcccgtctcgcaggcgcccaccccgtttgagggcctccacctcggccagcacgcgaccgcccagtgctgcccccaggaagctgtccttgacgcagatgccgtagtaccgcatgcagggcacgatatagtccagggccaggcgctcgggcgcagagggcagcgcctcctccatcagcccagcactggcctcaccactgccactgctgcagctgcagctcatgccaccctcccgctctgcctcctggttctcttgcctggcccagggccgtttgctgggtgaaggggcatccccaccatcctcggcccatttccgtttgggggcctcaggccgtgcgccctgggctgccaatcgctggcaccccttggtgaccagcgctgcagcgccttcactctgcagcggccgcagctcaccaccatcctgcccgccaaaaccgtcccgaagagggctggcagtggtagaggtggctgtggctctgggggtcccactccctgccgaggcctcactaggcactcctggacagtggtaggaggggagcaggggacagggcaggtaactctccactcccatcctggcccggccaggctcaggctccaagggctctgacgaagaccctggtaactgagggagagcctgacttaggggctgcggctggcacgggctgtccatggcagcagtgtcttcatcccccgggcatggagggcaccgcccgggcccatggtgccaccctcctccgcctcctcctccgcctccacttgatgcagctgggggccaccgggcctggcgtggggcagggtgaggcagggcagacagcaagagctcttctcgtgccctgggggttgcttgctggtccccaagtcctctgcggtccctaagggcttgggaagggacccttcagggtggctagagaaaggaaaaaaaaaaagggatgtgagagaaactagagacaggcaggcaggggaaagc

SEQ ID NO: 5464 - DNA, 8159 bp, Homo sapiens
  SITE (835): n equals a,t,g, or c
tcagatgtgtgcagctctgaggtaaacttttatttcttggctgacaggacttccacacccatgctcctcctggcaccttttactctgcccaagcagtggcagcccagtccaaaaggtgcctgccatggccaaaggggttggggagtcacttcacattccaggctggaggagtgagaggacttgggggtactcctcccaccccattgccagcaagaggccatgactcacctcaaccccaagtcctgcatcctggtgggaagtgacaatgcctcctcccagctctccatacctaatggggtcatgaccagacagggtaggacccaggcccccagcttcagttggtaacggtgcctccacggctgccccctgtccaggtgacaacccagcccccatgatggggcagcaaaggtctcttctcctccttggtcctcagcaacagacagagccctccacaccaggcaggacagaggcaaagtcagaagcagcagcggtggcagggaaggagcagccagcacaggcccagggctctcctgaagtcatttaagctgtctgccatgcggctctgggactggccactaggtgggcgtaggcggctgtgatacaggtacttggacacctttctgtcctgatgctgggggtgagaggggacaggagacagtgagtcatcagaaggacaaagaagccaagggaaacctggggagatggggagaggaccaggaagaaatggggctcctgttggggtacccaggagagtgggctaaggaaggtgggcagagatgaagaaaaatgagtgtgggatttaacaagaggctgatgagggggatggggtggcatncacgccaagagggcccacagaataggaaggactgaagggagggaagcaggtacctagctgatacttgtctttggctgctgcccgctccttggcatcaaaataccagacagtgatggcgtacctggagaccagggtggttggacattagttttctgcaattccagctaccatatccacacacactaggcggccatccttttgagccacccggttctgctcccacctaggccccctctcaatacttcgtcgctccctagtcactctgaggctctgacaggacattgtcacagggggagcacctgggtgcgtctccagaagtacaggtcatacctggtggcataggctggcttcacctcgtgggggttccgccggtcagaccagaaaatgagcaaccggtcaaagagtggctcgatgttggctaccacgggccggccctcagggaagatctgcagcaggccgccatgcacctgggggcaggccaaaggatgaggctagctggtacggccaggagccgctgcctcccacggtgccccgggagcccactaggaggcgcagcgtctgcctgcatcactccctcccacccctcgggctctcaaagtgaatgacaacccagagactgcatcaccatggagatgggcaggaagctactaaagacaggaaaagggggaaagtgttcattacaaggccgggtggggctgggcagacagcaccattcccggaaagaggggagttcccaccacacagtccgctagagaggaggaggtgccatttcccaggaagagccggcagatcgcactgcccgctgtgtgttgagaagagaaacaggagaatgccagaatctgggctgagagtggaaaatggagtggacgcacgccacccccgccccagccctagccccagcgccaccctcaccctcaccctcacccctaccttaacgtcccagttctgattcaggtaatagatacaggtgatgcagcgcccatcgccgtggggattgtcaacgtgccttacgtacccgagcccgttgcctgggtaacacgccaccatggcctggcagggatggagggaggtaggtttactggggctaggcaggcacatcttagagaagcagccatgaattacctattttcccacccctccttgccccatcttccccatgactccttgggtcaagggttccaagctcctgccccaaaagactttctttttcagccaaaatcccatccccaagtctatcagaaacctcagctcctgggcctcaagagcccactccctcccaacacacatacctggggcctggcacccagctagggctcaattagtaacagagtttgatttgtttcaagataccccaaaccccacctcagccatttcagtagaataataccaatttaaacattttcaggtgtgcaaggaggtggcctcacagccctagaccaggaattcttacccttggctgtggagtggagccccctggggagctctgaggttctgaagtacctggcctaaggaagggcctgaaattggtaaagcttcccaggtaattctaccatgcagcaatgttaagaactgctgccctggactacaaagaatccccactaaattatctgtcccatagacctccgaacaggagccaaaagctacagtctgaatagaaagacctaattccaactccaaggataatttgctgggtaaccctagccagttccaacacctgaatgggcctcaactgcctgatgtgtacagcaggggtaataaacactgctgtttacagcggtagcaattaatctctctgagaacataacttgggaggttctggagccccaactcctggagatctaacaggactcattgcagggcttggtttctctgtctacagggttctttcctctgcctgacagttgccactcccctgacccagccctacaatgctgtggccagggccccgggatgtttgtcatcagggagctggcagaaaggtggctgagaggtaaaggaaatggcccagccacttctgcagacacaattccctggttcaagtctcagtgctgccacatgagctgtggcatcaggcaggtgacttcctggtctcaggttcctcatccatggatccaatggagctcacagctatttcacaggttgttgtggaacaagtgaacaagataacaagtgtctgggaagacagccagcacagtgcctgccacatggagaactggagcacaggctgaaatgccatttaaaaattttaaaaggtccctgtcccaccctctgcccaaagtcactgcagtggcaagatgaggtagcacacaaaaaggggaggactggcacaaggacccttcaacttctccccagcccggaccatctgtcttgacctctctgccctgacctctctgccctggtacaactctgctggcgtccattccccacgaatgctcagctacacctatggcccggcccagcaagacagtcccaagataaacattcacgatcaaacatcagtggccactgccacaacaggatgcttgccaagcacgcacgccacagcagactgggctgcttcaatcctcaccctccccaggacgcctcccaacacattatcccagggctcaccctctgtggtggatgttaagctgctctgcattaaccatgtgcacctcatccaccagaccttgccctggaaagagagggctgccaccatctactgccacctagcagtgggaagctgacaaccttctctctggcagcaccagagtacaattagtgagaaggccccccagggaaaaccctaatggctacacttcaaggttcaggagggggcaccttctttgcactgctcactccctatggaagggtcggcactctgagcaaccacctcactgggagaagaattgggccatggtccaggaggcttagaaacagtgagttactgactagagatgggcaagacctccccaattaggaatccaatcagagattacactgatgatgcacgtggatgggtggcagggaaggggtccagtgctgcaccctcttcccacaattcatccccacacagcagccagagcccctcctctccaggtcttcactccatcctgagaaaatacaaattcccaaccacagcctcaaaggcccccaacctcatgtgcctctcccatcactctgctccatgcctcaacaggctgagctcatcgccaccacaaggcctcagcactggcctgggacactcttccttctgaccctctttgttattcaggattcagagaccaagggtcaccttgagtactccggctgattgtccgttccactcctagcaacatggcatcagcacaggcacctgtttacctagtactgccctggaaggcagccacagggaagcccctggggccaggttggtctccccagtgcccagtgcagtacctgcagactgagtgcactgctctgggcctcctctgcaccccagccctgctatgtttcctcctgccctgtacattctcacacagcgcctcccaccaagcacatgggactcacacagaaacaggaacctgctctttagggccccacccttcccccacatatacacaccttgggggtgaaagcatcctctggccccaaggaaagtatctacttcctgccctcacaggggaaggcctcaggaaacttgctctccaagcctcccacctaggggagggacaggtgggaccagggccaggagaccaaagacttaaaggctattggtgacaatctgcctgccaagagccccacccccactacacacacaccccagtcagaagcctgtgactgtcccacctccaagctgctcttcaaggagcaaaccaagcaagctggactctccctggggtcccctctggtagcccttgctgccagtgggagtcaactctctcccacctacaggtcaacggagcacctgtccccaaccagggagttgggggaaggaaggatgacacaggagctccactcagaacgactaagaagcacgtttctactggctctagccacactggtgatccatgtccccacggcaactgctgcagcccacctgagcaccccacagccttactctggagtacaggagagagtccagatggggcccatctaaaagcgggaaagcctggagttgctgtctcactggggaggggagggctcctcccctatgttctcagtccagcctggcctgtccttacttccctaggacaatcaaggtcacctagggctaaaaaagtccaaacacgccccttccccaatcctcgctggggccctgtccccaaccacatagaaggtgggcaccagaggcaccaaaacacaagagatcttctcctactctcccctccccaaactgccagactcactggggatgtaacctggttttcgtattccgtggatcagcaaattgaggctcagagcagtgtcccatctgggccactcagcccttctggtctccccctgacgaggacgacagccaacctggggtgaagatgctgagccagggaggccactgatcccgcccgcacaggagccaagcccagggaggggccggctctggctcagctatcaagtaacgggagggagagggaagtagaacaagttccagctggggtggggaggaaacaggccttggccccgggggagccctggtccctgagccagctccagcctgagaggaaagccacacagaagcagaacccaagatgggatctgcaggaggaggcagaggacatcaggagctcagcctcacgcctgcagggcacaacactgcccgtgccatcagccagccaggcatcactgtgttgagcagtgggcactccccacagggccttgtccaaaggacaccaagccttggactcaaggccaggcccccacaccacccatgaagacaatgatcctgtcagcagcccggaaaggccctatggaccactgtcctgtgctgggctcctgaccccaggttcctgaacaggcagctggaggccatgaggccttgacaactgcccggaaactccaagcaaatgagcatttgtcttaagagaggatctgtggcctctgacagattctcaaaaagacccaggctccaaaataccattaagaactattgttctaaagcaaaaagaaaaagggactaagaacaaacacataaaggcagaggaagagacagacatgggtagggaggaagtgacacacaggacagggggaatggagggcagggactgggacagtgaagggtgggagacatggggatgagctccacctgggcaacaggcagccacccagtaccacccccaggagactgtcctcgatgcagatgccacagtggggacccagggcacaatgcagtccagggccaagcactccgcgcagcgggcagcacccctttccttccctcacgccagggctcactcatcacagccaccctcccccttctgcttctcctgccttggagacaggatggatggactagaaacatgggccagcaaacagggatggacgacaggagcacagggaaggatgtggacagggacagacagcaacagagaacggccaggtgaactgtgtgcctatctacatccccgtgcttggtctggggccacagactgacaccaggaggccatgaaccccaccaaggtccacgctgtgaatgtcagcagctctcatgagtttaagagggttcctggcaaagtcaagaaccactgtggcgatgcttgaaggcagcatgctcgttaagagtcatcaccactccctaatctcaagtacccagggacacaaacacgcagaaggccgcagggtcctctgcctaggaaaaccagagacctctgttcacttgtttatctgctgaccttccctccactattgtcctgtgaccctgccaaatccccctctgcgagaaacacccaagaatgatcaataaaaaaagaaaagaaaaaaaaaaaaaaaaaaaaaagaaccactgtggctccaggacaaactcctagcttatcaggtgcacacattaaggcccgtagggaggataaagacccccccaagtccccacaagtaagcatacccactccactgaactgcctaaaccttctgtgacctcccagaagcctgtctccaaacccactgtgctcagagcactgaatgctgcaaaccagggtgctgcaaagcccctccaaagaggcccccacctagccttaccttggtgcgcccgttgatgacatagctgcccagccgccctgcgcagtggcggatgacggcgtccacatgggccatgagggcaccaatgcttcgacagcctggttcatggccttccacccaggcaatctggtccccacggatgctgcgcggtgggatcgccctctggctcactagctgcccgtctcgcaggcgcccaccccgtttgagggcctccacctcggccagcacgcgaccgcccagtgctgcccccaggaagctgtccttgacgcagatgccgtagtaccgcatgcagggcacgatatagtccagggccaggcgctcgggcagtacgggcagcgctcctccatcagcccagcactggcctcaccactgccactgctgcagctgcagctcatgccaccctcccgctctgcctcctggttctcttgcctggcccagggcgtattgctgggtgaaggggcatccccaccatcctcggcccatttccgtttgggggcctcaggcgtgcgccctgggctgccaatcgctggcaccccttggtgaccagcgctgcagcgccttcactctgcagcggccgcagctcaccaccatcctgcccgccaaaaccgtcccgaagagggctggcagtggtagaggtggctgtggctctgggggtcccactccctgccgaggcctcactaggcactcctggacagtggtaggaggggagcaggggacagggcaggtaactctccactcccatcctggcccggccaggctcaggctccaagggctctgacgaagaccctggtaactgagggagagcctgacttaggggctgcggctggcacgggctgtccatggcagcagtgtcttcactcccccgggcatggagggcaccgcccggcccatggtgccaccctcctccgcctcctcctccgcctccacttgatacagctgggggccaccgggcctggcgtggggcagggtgaggcagggcagacagcaagagctcttctcgtgccctgggggttgcttgctggtccccaagtcctctgcggtccctaagggcttgggaagggacccttcagggtggctagagaaaagaaaaaaaaaaagggatgtgagagaaactagagacaggcaggcaggggaaagc

SEQ ID NO: 5465 - DNA, 1001 bp, Homo sapiens
attgcttcggcctggccgggagagcggaagggcctggtgtgggagagtcccttgcactgccaagacggggccactggaaggtatttgggtggaagaaagccagtaagcccatggggctggctgggggcaggaccacgcgttatgaccaccgtcctgttcctacccccaggagccccgtttgaccccgtgcggctactggataatgctgtatccaatgttatctgttcttgtcttcgggaaccgctatcgctatggggacccggagttcctgaggctcctgaacctcttcagtgacaacttctgcatcattagttccagatggggcgaggtgagagggccggccacaatctttccttggtgcgtccagccttatgccaaatcccgagtacacagacctacctacaatggatcattagaatgggacagattcctggaagagttctagaacatccagtatcaaagtcctagtccaatctccctgtagggaaactaaggcctagtggccttgtgcagggcccatgttgagacagaccctgtctctccagatgtacatttgcctgtccctcatggactggctcccgggcccgcaccaccgaatcttccgaaacttttcggagctgcgggtcatctctgagcaaattcaacgacactggcagatgcggcagccagcggagccccgcgatttcattgattgcttgaccagatgggtaaggcatgggtcccagctctctaaactctatccatgccgcccaccaacaggtgcctggcacgcggcagcacatctcctctgcccacagtaacagcaggacccggagagccatttccaggagtagacgtcggtaatgacgacgcattttttttttggcgtcaccgaaaccacgagcaccaccctgtgctatgggctcctcattctgcttaagtacctagaggtggcaggtgtgcaacccggagagacccagaatgggaggctgcagtctggggatggctggagggtcctggaa

SEQ ID NO: 5466 - DNA, 832 bp, Homo sapiens
aggagccccgtttgaccccgtgcggctactggataatgctgtatccaatgttatctgttcttgtcttcgggacaaccatcgctatggggacccggagttcctgaggctcctgaacctcttcagtgacaacttctgcatcattagttccagatggggcgaggtgagagggccggccacaatctttccttggtgcgtccagccttatgccaaatcccgagtacacagacctacctacaatggatcattagaatgggacagattcctggaagagttctagaacatccagtatcaaagtcctagtccaatctccctgtagggaaactaaggcctagtggccttgtgcagggcccatgttgagacagaccctgtctctccagatgtacatttgcctgtccctcatggactggctcccgggcccgcaccaccgaatcttccgaaacttttcggagctgcgggtcatctctgagcaaattcaacgacactggcagatgcggcagcagcggagccccgcgatttcattgattgcttgaccagatgggtaaggcatgggtcccagctctctaaactctatccatgccgcccaccaacaggtgcctggcacgcggcagcacatctcctctgcccacagtaacagcaggacccggagagccatttccaggagtagacgtcggtaatgacgacgcattttttttttggcgtcaccgaaaccacgagcaccaccctgtgctatgggctcctcattctgcttaagtacctagaggtggcaggtgtgcaacccggagagacccagaatgggaggctgcagtctggggatggctggagggtcctggaa

SEQ ID NO: 5467 - DNA, 1670 bp, Homo sapiens
gggcatgaacatcaccggggatgcgttgtgggccctgggtgtgtgcagggacaacgtgagccggaaagacagggtccccaagtgccccgaaaacggcttctgggtggtgcagctgtccaaggggaccaagtacttatccaccttctctgccctaaccccggtcatgctgatggagcctcccagccacatgggcatcttcctggacttcgaagccggggaagtgtccttctacagtgtaagcgatgggtcccacctgcacacctactcccaggccaccttcccaggccccctgcagcctttcttctgcctgggggctccgaagtctggtcagatggtcatctccacagtgaccatgtgggtgaaaggatagacacagaccgggggactcgggcactgctcctggctctgcagaaggtgtgggccttctgcttactgcaggccacctgccagggttctctggcatcacgctggcagccattagacacacaggggggtttctcaaattctaaatataattgtgattagaactgtcaaacattaagagggtatactgacagatgcttcctagaggaaacttttgaaagcccctgcgttctgagtggaccgatttctaaatccatacctacacaccaggaacagcgtggtcacgttttttttagccatgcccccacccccactttggaatgacaggaatctgtggctcccagcccccccaggggtttaggttactctgtcaaagaagtagaaatatcctatggtggggaggagcgggggtggttgctgtgtcagggatggtcccaggctgcccatagaaatgtcctatgcatcctattgggtccttcgatgggggaaaatgggaaaggctgaacccgtaaaaagcctcagagctgcccacccccatcccgttcgatccccaaagttgcacgagcaggggcaaaatcccaaagagattaggatttatgtaggggcctcttttccacagcgcccttaccttttccaaggaaccccccacccacccctgcagggtcaagcactttaacagcctgtgtcagtcactagcaaggcagaattccagagtaagcgtactcctacctcgacaaagccggagtgtctgcgcgaggggctgcctggaacagcatgcccctttggagtggttcccgcagaaagaatgtgggcctcctggagagctggtcctggagggatgcccccgtcccatcccccaactccaatcattctgaccttggcctgccaaggctgtgagggccgggccttccgaggatacccgccctgggaagcacgggctgagggggtgaggacgcactaggggtatggcgaagggctccaatgccccaggctgcggactcccttagtccttgcagttgcttccgtgtgccccgccctgagtccccatccctccttgccctgccccctgctccatccctcccctgcgccccgccccctgtccccatccctcccctgcgccccgccccctgtccccatccctcccctgcgcctgagtcctccccagggcaggggtaaaagacctggccacaagaaccggagcggtggtgacgccaggtcagcaagtgaaagctctccaattccgtcccgcccgcgggccgcgtgactggcagcggccaatcggaggcaaaagcgggttgttccaaaaa

SEQ ID NO: 5468 - DNA, 1670 bp, Homo sapiens
gggcatgaacatcaccggggacgcgttgtgggccctgggtgtgtgcagggacaacgtgagccggaaagacagggtccccaagtgccccgaaaacggcttctgggtggtgcagctgtccaaggggaccaagtacttatccaccttctctgccctaaccccggtcatgctgatggagcctcccagccacatgggcatcttcctggacttcgaagccggggaagtgtccttctacagtgtaagcgatgggtcccacctgcacacctactcccaggccaccttcccaggccccctgcagcctttcttctgcctgggggctccgaagtctggtcagatggtcatctccacagtgaccatgtgggtgaaaggatagacacagaccgggggactcgggcactgctcctggctctgcagaaggtgtgggccttctgcttactgcaggccacctgccagggttctctggcatcacgctggcagccattagacacacaggggggtttctcaaattctaaatataattgtgattagaactgtcaaacattaagagggtatactgacagatgcttcctagaggaaacttttgaaagcccctgcgttctgagtggaccgatttctaaatccatacctacacaccaggaacagcgtggtcacgttttttttagccatgcccccacccccactttggaatgacaggaatctgtggctcccagctcccccaggggtttaggttactctgtcaaagaagtagaaatatcctatggtggggaggagcgggggtggttgctgtgtcagggatggtcccaggctgcccatagaaatgtcctatgcatcctattgggtccttcgatgggggaaaatgggaaaggctgaacccgtaaaaagcctcagagctgcccacccccatcccgttcgatccccaaagttgcacgagcaggggcaaaatcccaaagagattaggatttatgtaggggcctcttttccacagcgcccttaccttttccaaggaaccccccacccacccctgcagggtcaagcactttaacagcctgtgtcagtcactagcaaggcagaattccagagtaagcgtactcctacctcgacaaagccggagtgtctgcgcgaggggctgcctggaacagcatgcccctttggagtggttcccgcagaaagaatgtgggcctcctggagagctggtcctggagggatgcccccgtcccatcccccaactccaatcattctgaccttggcctgccaaggctgtgagggccgggccttccgaggatacccgccctgggaagcacgggctgagggggtgaggacgcactaggggtatggcgaagggctccaatgccccaggctgcggactcccttagtccttgcagttgcttccgtgtgccccgccctgagtccccatccctccttgccctgccccctgctccatccctcccctgcgccccgccccctgtccccatccctcccctgcgccccgccccctgtccccatccctcccctgcgcctgagtcctccccagggcaggggtaaaagacctggccacaagaaccggagcggtggtgacgccaggtcagcaagtgaaagctctccaattccgtcccgcccgcgggccgcgtgactggcagcggccaatcggaggcaaaagcgggttgttccaaaaa

SEQ ID NO: 5469 - DNA, 1477 bp, Homo sapiens
gggcatgaacatcaccggggacgcgttgtgggccctgggtgtgtgcagggacaacgtgagccggaaagacagggtccccaagtgccccgaaaacggcttctgggtggtgcagctgtccaaggggaccaagtacttatccaccttctctgccctaaccccggtcatgctgatggagcctcccagccacatgggcatcttcctggacttcgaagccggggaagtgtccttctacagtgtaagcgatgggtcccacctgcacacctactcccaggccaccttcccaggccccctgcagcctttcttctgcctgggggctccgaagtctggtcagatggtcatctccacagtgaccatgtgggtgaaaggatagacacagaccgggggactcgggcactgctcctggctctgcagaaggtgtgggccttctgcttactgcaggccacctgccagggttctctggcatcacgctggcagccattagacacacaggggggtttctcaaattctaaatataattgtgattagaactgtcaaacattaagagggtatactgacagatgcttcctagaggaaacttttgaaagcccctgcgttctgagtggaccgatttctaaatccatacctacacaccaggaacagcgtggtcacgttttttttagccatgcccccacccccactttggaatgacaggaatctgtggctcccagcccccccaggggtttaggttactctgtcaaagaagtagaaatatcctatggtggggaggagcgggggtggttgctgtgtcagggatggtcccaggctgcccatagaaatgtcctatgcatcctattgggtccttcgatgggggaaaatgggaaaggctgaacccgtaaaaagcctcagagctgcccacccccatcccgttcgatccccaaagttgcacgagcaggggcaaaatcccaaagagattaggatttatgtaggggcctcttttccacagcgcccttaccttttccaaggaaccccccacccacccctgcagggtcaagcactttaacagcctgtgtcagtcactagcaaggcagaattccagagtaagcgtactcctacctcgacaaagccggagtgtctgcgcgaggggctgcctggaacagcatgcccctttggagtggttcccgcagaaagaatgtgggcctcctggagagctggtcctggagggatgcccccgtcccatcccccaactccaatcattctgaccttggcctgcaaggctgtgagggccgggccttccgaggatacccgccctgggaagcacgggctgagggggtgaggacgcactaggggtatggcgaagggctccaatgcccaggctgcggactcccttagtccttgcagttgcttccgtgtgccccgccctgagtccccatccctccttgccctgccccctgctccatccctcccctgcgccccgccccctgtccccatccctcccctg

SEQ ID NO: 5470 - DNA, 440 bp, Homo sapiens
gcgggaatccgggatccctacgtcccgcgtcccccgagcgctcggagcctacgcgcccagcgctaccgaaacccagagtcctgcgccctggagtccccgcgccccggagcccgagcacccgggagtcccgagcctcgcgccccggagtgcccgagcctgcgccgccgcacccggataccccgggtccccgcgagctgccgaggccgcccgccgccgccccgcggacagtaccgccttcctcccctctgtccgcgccatggccgcccccgacctgtccaccaacctccaggaggaggccacctgcgccatctgcctcgactacttcacggatccggtgatgaccgactgcggccacaacttctgccgcgagtgcatccggcgctgctggggccagcccgaggcccgtacgcgtgccccgagtgccgcgagctgtccccgca

SEQ ID NO: 5471 - DNA, 397 bp, Homo sapiens
gctttctaggtaagtgggcacccagggccaggacctctgacccaggatctcttggcgatgccccactgtaccccctagcctcggaagccaccaatggggggggttctacaagtgcactgcctggtgacggtcactggctattcactgtgccttcgtagggcggcgttactggtggttctaattcatgggatgaatcttgttgagttcccagtggtctctctgcccagccccctgtaccttattgccaccaaggcccacacacaattggtgtgtggaagcatcaagtaaccccagattcacagcaggggaggcctctgcggagttaggggaccattggccacatccaccactagggcccggggactcccacctttgaccctgaatgccccacacctct

SEQ ID NO: 5472 - DNA, 396 bp, Homo sapiens
gctttctaggtaagtggcacccagggccaggacctctgacccaggatctcttggcgatgccccactgtaccccctagcctcggaagccaccaatggggggggttctacaagtgcactgcctggtgacggtcactggctattcactgtgccttcgtagggcggcgttactggtggttctaattcatgggatgaatcttgttgagttcccagtggtctctctgcccagccccctgtaccttattgccaccaaggcccacacacaattggtgtgtggaagcatcaagtaaccccagattcacagcaggggaggcctctgcggagttaggggaccattggccacatccaccactagggcccggggactcccacctttgaccctgaatgccccacacctct

SEQ ID NO: 5473 - DNA, 396 bp, Homo sapiens
gctttctaggtaagtgggcacccagggccaggacctctgacccaggatctcttggcgatgcccactgtaccccctagcctcggaagccaccaatggggggggttctacaagtgcactgcctggtgacggtcactggctattcactgtgccttcgtagggcggcgttactggtggttctaattcatgggatgaatcttgttgagttcccagtggtctctctgcccagccccctgtaccttattgccaccaaggcccacacacaattggtgtgtggaagcatcaagtaaccccagattcacagcaggggaggcctctgcggagttaggggaccattggccacatccaccactagggcccggggactcccacctttgaccctgaatgccccacacctct

SEQ ID NO: 5474 - DNA, 4767 bp, Homo sapiens
agaaaatggttctgccccctccacagctcccacagaccagagccggccaccgttggaggtgagtcgcccgcccctcgtgcttcccgatcgtgtcagccttgctcggggccccgagcgccagcctgtccccacctcgcctccccggctctccctgcccgcacggcggaggaaatttttccctccaggggcccgggccagggattggggcggcccacgctgcttggttggtttcttggatgaaagcgaaacttccaccgaggcatctcacaccagcggggcaggctctgcccaattcctgcctccctgtctgcgtctccctcccacccggcacccagcagggcccgtcttgctttctcctttgtctttgtgccctagcgcccccagcagactgcacgggcctgagcccccgaggtcacgcccccctcctctccccagcacgtggaccagcacctgttcacgctgccgcagggctacggacagtttgctttcggcatcttcgatgacagcttcgagatccccacgttccctcctggggcgcaggctgacgacggcagggaccctgagagccggcgggagagagaccatccgtcccggcaccggtacggcgcccgacagccccgcgcccgcctcaccacgcggcgggccaccggccggcacgaaggcgtccccacgctggaagggtgagggggccccgggggtggccgcgagggccccacgccttgaggtcggaagttctggcgcttagaatccagcacgggttccacggaaacgtggcatcatccataggctctctggagaggccgcccggccaggccctccagccccctgtgactccccacacggcccttcggagacagaagtatgccggttcagggtgtgtgggttgaccacagagtggggcaccgtgtgcctgccaggcccacgtgctctggagactgctgtccacacgcgtgtcgtcaaacgctgtccaggccttgggcccagaacagagcctgggggagccgtcgcagggccccactcctggtggaacggagcctgggggagccgtcgcagggccccactcctggtggaacggagcctgggggagccgtcgcagggccccattcctggtggaacagagcctgggggagccgtcgctgggccctgctcctggtggaacagagcctgggggagccgtcgcagggccctactcctggcggttgatgcttttatggttgtgtgtctcacctgctggaaatgtcatctttaaaagtggctaattttgccaggcacggtggctcagtgctgtatttgcagttctctgggaggtcaaagagggaggatctcttgaggacaggagtttaagaccagcctgagcaatgtagggaggccccatctctaatttttaaaaagtagctgaggctgggtgaggtggctcacacctgtaatcctagcactttgggaggccgaggcgggcagatcactgaggtcaggagtttgagaccagcctgaccaatatgatgaaactccgtctctactaagaatacaaaaattagccaggcatggcggtgggcgcctgtaatcccagctactcaggaggctgaggcaggagaatcacttgaacccgggaggcagaggttgcagtcagccgaggtcgtgccattgcactccagcctgggcaacaagagtgaaactctgtctcaaaaaaaaaaaaaaaaaaaaaaaaagtagccgagagtggtggacctcttctgtggtcccagctacttgggaggctgaggcgggaggatcgcttaagcccagcaggttggggctgcagtgaaccaagatcaagctgcttctctcctgcctcggcattagagtgagaccctggctcatagtaaaataaataaatagaagctaatctagaagctgatgctggccctgcccttggtgctcaccacggacctggcaggcctggcgcctctcctgtgcgtggggcggcctcaccccgtgactggcgctctcttttccaggatcatccagcagctcgtcaacggcatcatcacgcccgccaccatccccagcctgggcccctggtgagtgggtgggggtgcctgtccccatccccagcctgggtccctggtgagtgggtgggggtgcctgtccccatccccagccagggtccctggtgagtaggagggggtgcctgtccccatccccagcctgggcccctggtgagtaggagggggtgcctgtccccatccccagcctgggcccctggtgagtgggtgggggtgcctgtccccatccccagcctgggcccctggtgagtgggtgggggtgcctgtccccatccccagccagggtccctggtgagtaggagggggtgcctgttcccatccccagcctgggcccctggtgagtgggtgggggtgcctgtccccatccccagccagggtccctggtgagtaggagggggtgcctgtccccatccccagcctgggcccctggtgagtggggtggatagacgcacctgccccagctgcccgtcagccacttgaaccccaccttccacctccaggggagtcctgcactcaaaccctatggactacgcctggggggccaacggcctggatgccatcatcacacaggtacagcgtggccacggcccagagtgcctgctgggggagggctgggctgcccacccctgggagctgccccactgcctggacccacgaagccccacaaaggtcaaaggggatgcgggcacagcctccacgctctggcgggcacagggggcagctccggccttcctcctgccatttctgagtcttggcaactttgggggttctcctgtgttcacgcggaacgttgtagcaaaaccgcggggaggactcgcccacagtcacatggtcaggaggccacgcggtccctcttcccgagaggtcgcgccctgacctgcttccaagtgccacccgtctcagccttgctgaggagcccttggagcattttgtcactggcaggacccgaccctcacagtagcccaccagccggagcacggcccccccattccgccgtcagggcactcaggagcgcggcccccccccccattccgctgtcagggacccaggagcgcgggcctccgcccattcccccattccaccgtcaggggacccaggagcgggggggccgcgtgggctccacagtgatctccgaccccgggcgggctccaaggggcccagggcccaggacaaacgcggcctcggtgcttttgcaggtcctgcagcctcgcgtttcagagccccgggccgggcccccgaggagctcccggcactctcgcctcttgtctttcagctcctcaatcagtttgaaaacacaggccccccaccggcagataaagagaaaatccaggccctccccaccgtccccgtcactgaggagcacgtaggtatgagagctcagcctcccgagtagtgggaattacaggcacccgccgccacgcctggctcatacttgtattttcagtagagacagggtttcaccatgttggtcaggcaggtctcgaactcctgacctcaggtgatcctcctgcctcggcctcccaaagtgctgggatgacaggcgtgagccaccgcacccggcctcgagcatttccctgaaggtgggctgggaggagagggttctgtccaggtcccctctggcagcccgggggacacacacacggcttttctcccctcgctgggctcaggggcggcctccggctgaggctgtggagtagcctgcccttgaaggctcggcaggccccccacgcccgctgtgaccgcagctgcacactcccgcaggctccgggctcgagtgccctgtgtgcaaggacgactacgcgctgggtgagcgtgtgcggcagctgccctgcaaccacctgttccacgacggctgcatcgtgccctggctggagcaggtgagtgccccgcccacccgcccccccaccccgaccgcggccctcccgcctctaacctgccccttctcccgtccctgcctctgtccccacaaagcacgacagctgccccgtctgccgaaaaagcctcacgggacagaacacggccacgaacccccctggcctcactggggtgagcttctcctcctcgtcgtcatcgtcctcctccagctcgcccagcaacgagaacgccacaagcaactcgtgagcccacgtcggccgtcgggaaagcacggggcctttcccacccaccctcagccagcgccacacggcacccacagactgggtgccccggcggcgccacgcttggctggtcagcgctgcaggtcccgcctgttccagggcaggacccgggcccggcccaccggccccctggcttgggaaggcgtgggccacatggtcccctctggggcgtccccagcctccccgtcctctgtctaacctcaccctctaaacgttcagcggtggaaagatttttataattttaaattattactgctttgaaataaacggacgtttgagctcacgtggcggccatgcatggtttgtggcggaagacggggcccagcggctcccccagcgctgaagcacggggttcagcggctcccccagtgctgcaggtgccgccaggacgggccacgtgggcccccagcctccccctcggccgcctccacgacccggagtaggggggctcgggaccatgaggatgaccagcaaaattcaagaacaaaactgctccaacagacttttttaaaggaaaaaatatgtgtatcttgaaagctatttaaaatacactacttacaaagagaagc

SEQ ID NO: 5475 - DNA, 275 bp, Homo sapiens
tttcttttttttttttttttttgagacggagtctcgctctgtcgcccaggctggagtgcagtggcgcgatctcagctcactgcaacctccgcctcccggattcaagcgattccccgcctcagcctctcaagtagctggaattacaggcgcccgccaccacgcccggctaattttttgtatttttagtagacacggggtttcaccatgttgaccaagatggccttgatctcctgacctcgtgatccacccgcctcggcctcccaaagtgctgggat

SEQ ID NO: 5476 - DNA, 1122 bp, Homo sapiens
  SITE (117): n equals a,t,g, or c
  SITE (173): n equals a,t,g, or c
  SITE (174): n equals a,t,g, or c
  SITE (176): n equals a,t,g, or c
  SITE (177): n equals a,t,g, or c
  SITE (178): n equals a,t,g, or c
  SITE (832): n equals a,t,g, or c
aatccccccgcccctccatagagagccgcctttctcggaactgaactgaactcttttgcctggagcccctcgacacagcggaggtccctcctcacccactcctgcccaagacagggngcgcaggcttcggggacccggaccccccatttcgcgtctcccctttccctccccanngnnncgcctggaggggcctctggttcaaaccttcgcgtggcattttcacattatttaaaaaagacaaaaacaactttttggaggaacacggggcctgtgcgtatttcgcgaggtgaggaggggaggatgcagggagcgagtgcgaccctgagaagtcccatcctcacagcctggcccgcatggcagatgggacatcggatgctcagagaagcggaaactcccgcacagtggcggaggcccggcttctctgcttctccagatcccggctctgcgcctggggtttgcatcgcccaaccttggccgtgcagcagcagcactgctggctcaagaggccataaggatgaagcaagagaatcgctcgaacccaggagacggaggttgcagtgagccaagatcgtgccactgcattccagcctgggcgacagagtgagactccatctcaaaaaaaaaaaacaaaaaacaaacaaacaaaaaaccataaggagcccactggggttgggtgggaaggtgcaggctgcggtcagagccacgtttctgcaaggtggcccgcggtggtggccagacgctatcccagggccaggggctagtggggcaggggctcagaaatgagctgctcatgcccacactggatcacgatcacatcccacccacctcaggntcgcactgcctgttccttgaagttcagggtctacctccccacccagcgtggtgctgcctcagtttacctgtttttccatgcgaccgcccacctcgctgacattctcatcccttgtctttaccctaaccgcacctatctgtgtggctctctctcatttccaacattctggctccctgtctcaccctgccccagttttggtctccaactgatctggagttttcctgtctccccatctgagtctcttgctcttggcctcctcctccctgtctaattctatttcgatgtttttg

SEQ ID NO: 5477 - DNA, 13862 bp, Homo sapiens
cagagagccccaggcatcgaggagaaggcggcggagaatggggccctggggtcccccgagagagaagagaaagtgctggagaatggggagctgacacccccaaggagggaggagaaagcgctggagaatggggagctgaggtccccagaggccggggagaaggtgctggtgaatgggggcctgacacccccaaagagcgaggacaaggtgtcagagaatgggggcctgagattccccaggaacacggagaggccaccagagactgggccttggagagccccagggccctgggagaagacgcccgagagttggggtccagcccccacgatcggggagccagccccagagacctctctggagagagcccctgcacccagcgcagtggtctcctcccggaacggcggggagacagcccctggcccccttggcccagcccccaagaacgggacgctggaacccgggaccgagaggagagcccccgagactgggggggcgccgagagccccaggggctgggaggctggacctcgggagtgggggccgagccccagtgggcacggggacggcccccggcggcggccccggaagcggcgtggacgcaaaggccggatgggtagacaacacgaggccgcagccaccgccgccaccgctgccaccgccaccggaggcacagccgaggaggctggagccagcgcccccgagagccaggccggaggtggcccccgagggagagcccggggccccagacagcagggccggcggagacacggcactcagcggagacggggacccccccaagcccgagaggaagggccccgagatgccacgactattcttggacttgggaccccctcaggggaacagcgagcagatcaaaggtgaggaggctgcggggcacagtcagggctgaggtccggctgtttccgaggcgtgcggagggtgagtgtgggtaaacatgtcgggtcgggctggcagtgatgaatgcaggtcctgaagcctgcaccacctgggctcacatcgtggctcagccccctctctagctctttggccttgggcaaatgtccttgctgcacggtgcctcagtttacccatctgccaaaaacggatggcagggatagaacctacgtcatagggttgctgtgaaggttaaatgaattaggacatccaaggcacttaatcagagcaagggattcagtaagcacctgcttttattattgcaactcacttagaccaggggtctcaaactcatgcccacaggggccagacgacatagggaaacggatgaagcatgctagggaggcagagtggggcttcagaagaaaatgccctgtgtagaaggggcagccacttctcaggaatgtgcacctggtgttggcgaatctgctacttttcccttttaaactagagctctggtttttatttcttttgtttttatggttgcagccagttcaaaggaagcctgtctgtggatggctcaagggccccaggctgccagcgtgtgctgatttaaacttaataagctggctgggctctgtggctcatgcctgtgatcccagcactttgggaggctgaggcaggaggatcacttgaggtcaggagtttgagaccagcctggccaacatggcgaaaccccatctctactaaaaatacaaaagttagccaggcatgggccgggcatggtgggtggctcatgcctgtaatcccagcactttgggaggccgaggtgggcggatcacctgaggtcaggagttcaagaccagcctggacaacatggcaaaaccctgtctctattaaaaatacaaaaattagccaggctttatggtaggcgcctataatcccagctactcggaaggctgaggcaggagaatcgtttgaagccaggaggcggagtttgcaccgagccgagattgtgccactgcactccagcctgggcgataaagcgagactctgtctcagaaaaaaaaaaaaagaaaagaaaaagaaaaaaagaaaaaattagccagcgtggtggcatgcacctgtagtcctagctacttgggaggctgaggcacaagaatcacttgatcctgtgagtcagagattgcagtgagccgagatcacgtcactgcactccagcctgggtgacagagcaagactctgtctcaaacaaaacaaaacaaaacaaaacaaacagaaacaaacaaacaacaactttccagtaagctaaggcatctatccagtgtgccaggcctcctgtgttcgaggccctgagctgcccaaggctgggacccagggagcttcagatcttgccctgacaactccaccaccataggactagtgagctggaaggcacagatatgcctttctgaaaattaagttttggtaggaatgcaggaagtattttgccacagagaaaactctttaagataaatgaagggtaaaaataaatagcccttgtttagatgtggacataggaaatacagttccagcagaatctctgggaggcgcaacttctttaaatacgggtatgaaagttataagtggctgggtcctgttttatattggcaacctcacagccacacttgaggaaacagttatcatctccatagaggagcctgtggctcagtgggcaagggtcaggaagtgggctggacagaggacgtttcttcctcatagcctgtggtgttcgaacactgtcacttccttgagattgttgtagggagtttgtgaacagctgtatcaggaaacagcccaggctgcatgaaaatgttgggagatgagcagctaagatgcgtcagaggatctgggttggattaggattggggggtgaaaagaggcagagaatggcccgctttttcccaagtgaactactcatccttcaagaccccaaatttcccctttccaggaagccttccctaatttttaaaggttgtcaacctgaccttcatctgggtactcataactccagaaaaaccccctctaggctgggtgcggtggctcacacctgtaatcccagcactttgggaggccgaggtgggaggatcgcctgaggtcaggagttcgagaccagcctggccaacatggtgaaaccctgtctctactaaaaatacaaaaattagctgagcgtgggggcaggcacctgtaatcccagctactcgggaggctgaggcaggagaatcgcttgaactcaggaggcggaggttgcaatgcgccgagatcgtaccactgcactccagcctgggcgacgagagcaagacttcatttcaaaaaaaaaaacaaaaaaaacactccctctatgaagcatcgcccataaccccatcaccctgagatgtctggtcaacaaaagtgtgacttttgagcagatgtgaaggaaaggagggagtgaggcaggtggacatcggtgggagagtgttctagagagggcactgagatgtgcactggctcaccatgtttagagaatagcaaaaggtagtaaaacttgagtagagagaacgaggacctgagagggaccgtctgcattcatctttctccctgccccacctccaccctcctcttgcccctgccatcagctcagaaagggcagttcacttatgcagtaatggagggctaagtgacccttgttcatttgccagtgaggaaacagaggctcagagaggtggatctggccgggtgtggtggctcatgcctgtaatcccagcactttgggaggccaaagagggcagatcataaggtcaggagttcaagaccagcctggccagcatggtgaaaccccgtctctactaaaaatacaaaaaattagccgggcatggtggcacgtgcgcctgtagtcccagctattcggtgggaggaatggtggggtggcccatgtggctagatggaggtcaggccagaggaggtggggacagaggccagagaaatcaggtaggccagggcatgagggcctggtgggctgtgggaagttgcggcttaaagccgttggcactggggagctctggggaggttgagcactggagaggacctttcccaccctgcctggagaagccctggtgcagcccttccgttcacaaagtgggtgctgaggcccagattgtgcgggggtcttatctgaggccacacagctaggtgggagggcctgcctcagtttcaccgggacaggggctcaccaggtctctcccctcgcagccaggctctcccggctctcgctggcgctgccgccgctcacgctcacgccattcccggggccgggcccgcggcggcccccgtgggagggcgcggacgccggggcggctggcggggaggccggcggggcgggagcgccggggccggcggaggaggacggggaggacgaggacgaggacgaggaggaggacgaggaggcggcggcgccgggcgcggcggcggggccgcggggccccgggagggcgcgagcagccccggtgcccgtcgtggtgagcagcgccgacgcggacgcggcccgcccgctgcgggggctgctcaagtctccgcgcggggccgacgagccagaggacagcgagctggagaggaagcgcaagatggtctccttccacggggacgtgaccgtctacctcttcgaccaggtgcggaacccgagagggcgcggtttcggggtcgcggcctggagggagcaggagcctagagccgggaagggcctggcgggaggccgagcttagagttgggcggggcctggagggaggcggagctggagtggggcggggcctgaagggaggccgagctagggtggggcggggcctggagggaggccgagttagagtggggcgtggcctgaagggaggccgagctggagtgatgcggggcctggagggagggcaagctgaattggggtgggacctaaggggagccccaatctagagtggggcggggcctggggcggggccgagctagagtggggcggggcccagggagagggcgggctggggggcggagcccagggcggggcctggagggaggtcgagcctagaggtgcagggcctggggcggggcctagacgaaggctgagcttagggtggggcggggtctacagcagggtttgaaggcaggctgagcctagagcgggggcggggcctggaaggagaccgcgcctaggatcgggacagagtctggatccgggcctgagggaggccaagtctgtggcgcggcaagaggaggcctggagaaaatccaaggctggaatgggggcggagcctagggcggggcggatggagcagggcgcgggaagggcctgaggggtgaaggcggggtctggggagagactggtcagggaaatggggcgggactaggaagatgggaggaggctttgagtgtgagggcagggcctggcaatggggcagggccaggagtatgggccgagcctagagctggggcgggacctagggtgagggcagggcttgtgacgggggcgtggtctagagggcgaggagaggtctggagagagagtgtgggtctggaaggaaagagggggtactgggtagtcaagtatgggatcctggagaggctagggaggaagtgttgagaagaggcctggatggtgaaggggcctagtgagagtttgggcatggtttgttgactagagttctagtgtctgtaggctggttcgggttggagcagatcttacccactagggaagggccatggctaggctgcaggtgggcttcagagatggagcaggcagtcttaacgtattctggggtgaggtcagggatgagcgaacctaacgactgggacgggtctttagagagatgggttgaggaatgtgttaagagttaggcctgtcccgggtggctcacgcctgtaatcccagcactttgggaggccgaggcgggaggatcacttgaggtcaagagttcgagaccagcctagccaaaatggcgagacctcgtctcttaaaaagaaaaaaattatcttggtgtggtggtgcgcatctgtagtcccagctacttaggaggctcaggtgggaggatcgcttgagcccaggaggttgaggctgcattgagccatgatcacaacactgctctccagcctgggcgacagtgagactctgtctaaaacaaaaagaaaaacacaggatatggtgttgaagagaaaaagggagggcgagtggtgctgaggaactgggaccttgtctagatgaacctggggcgggcatactgggctgagattatgaaaggaatggaaacaaggccaagaactggggcctgggccactgaaatgttttcagaggggtgggacttggagggcgggagcaggtctacttctgagggagggctcaggggcagggtcacagcatccagcacggcatgcgctcaggatggggcaggggttgggagggccactggagcaggtcaagatctcagaggtgggtgggactgacgtggacggggtggggcttatggagatcgctttgggttaggggatccggtggaggcctcacgttaatgagccaggagagaatccctgcgttgggctacttagctgtgcgcggggctccgctgtcaggaaaggagcctctggccaggttgaggttaaggctggcccaaggcttcgaagccagattaggggctccagccacctctccagagcgtgcgagtcagtgattacaaattgggattcctagagccccagaaatattagccggttttgttgcttttgggggatgcggtaaatgggacgtgaaggtttgtcccctctggcttccccctaatctgccttcacaggagacgccaaccaacgagctgagcgtccaggccccccccgagggggacacggacccgtcaacgcctccagcgcccccgacacctccccaccccgccacccccggagatgggtttcccagcaacgacagcggctttggtgaggacgggccctatggggcgggagggggcgggagccatggggcggacggggcggggtctatggggtgggaggggcttggtcgggaggggcgggaccagagggcgggagtgccgcaggtgtctgcagcctgaccgcggtctttccttctgccgcaggaggcagtttcgagtgggcggaggatttccccctcctcccccctccaggccccccgctgtgcttctcccgcttctccgtctcgcctgcgctggagaccccggggccacccgcccgggcccccgacgcccggcccgcaggtaccatatcctcggccctgccccctcctctgcccatctctgtccccctatgttccactgccaacttcttgtgaccatctttcaatgtccctgcctctctcttcccagtctcttctctctcccctctcagtcaacagacaccccacccagctctggaaccagctcagaccaggcgacgtccatcagacggtcgtaggcaggcaggccggccgtccccaacccccgagcctcagttttaccttctgtggggattacccccacccccgactcttgcccatctttgtcccatctctgggctcagactccggcctggcacttgccggatcctgatcccacctccgtttggggaacacggtgctcaggggcagacaaggagagagaaacccagagtgctcaaagccggttggtgtgaaccagagcagggaggacacagctgggggttagagagcagtcacagcggcaccgctgctctcgcgtggaccctgcagtgcctcaccacagtttaacccatttaatgttcattgcgatcccatggggtggattctagcctcgtcctcatttttttttttttttttttttttttgagacggagtctcgctctgtcgcccaggctggagggagtggtggaatctacgctcagtgcaacctctgcctcctgggttcaaacgattctcgtgtctcagccgcccaagtagctgggttcacaggagtgcaccaccacgcccagctactttttttgtatttttactacagacagggtttcaccatgttggccaggctggtctccaactcctgacctggaatgatccacccacctcggcctcccaaagtgctgggattacaggcgtgagccaccgggcctggccagtctggtcccaattttacaaaagagaacactgaggcacggagagaagtgaggagctgggattcaaacccacagttgcgcggcctctgagtctgtgccctctccagtagtgaacattggtcaggtttctttcctggcgtttcacatgcgccatatcgctaatcctcgtggccaccttgggagaggggtcatgccgcccctagtttccaacttttagcgatgctaaggccactctgggagagcagggcacacgggcaggtcccagcgcaggactggaacgggactgggctctctgctgccctctgctgccgagccagggaacacccccaggacccagggcttgtgcccagctcggcaggacaggtggtgctccccggtatcagagctaaggtagaagacgccactggagggtttcactcctacttccccaatcttgcctgagtccagatattgtccctgccatttcttagctgtgtgacctggggcaagtcgctttccctctctgtgcttcagttccctcatctgtagagtgggaatgataacaggatctaactcatgagattgctgagggaattaaatggcttaatcctcccgagtatgcagcacagcgcctgtgcagcagcagtctctaaccattagctattattattatttagttagttagtatttttgagacggagttttgctcgtcgcccaagccgaagtgcaatggtgtgatctcggctcattgcaacctccacctcccgggttcaagcgattctcctgcctcagcctcctgagtagctggaattacaggcacccaccaccacacctggctaacttttgtatttttagtagagacggggtttcaccatgttggacaggctggtcttgaactccagacctcaggcgatctgcccgccttggcctcccagctgggattacaggcatgagccaccatgcccggccccattagctattattattattattagctattactgcacttaattaagtcaatgttttctgatcatcttctgcgtgcaggcgccatgctgggcacaggggattcaatgtggagcaagacgggtgagcctgcctggccctccccgcagacactgaccacacactgctatgacaaatgaagaactgcaaactcaggcttgcagagaaagcagatgacaagaggaaagggctttgttttccccttagaagtgtcatttaaggccaggcacagtggcttacgcctgtaagcccagcactttgggaggccaaggcaggcagatcacctgaggtcaggagttcaagaccagcctgaccaacatggagaaaccctgtctctactaaaagtacaaaattagttgggtatggtggcgcatgcctgtaatcccagctacttgggagggtgaggcaggagaatcgcttaaacctgggaggtggaggttgcggtgagccgagatcaagccattgcactccagcctgggcaacaagagcaaaactccatctcaaaaaaaaaaaaaaaaaagtgtaatttaactgggaactggaagggttggttgtcattaactaggtgaaggggaaggggatggcgtgctggcagaggggacagcttgcacacagggcctgaggcaggagagagcttggcccgctcaaggaacagaaggacactggtgtggcttcagggttacttagagtgcatggagggctgaggagagatggcagggggtgcactgaggagctgggactttgtcctgggggtgccagggagccacggacgactataagcaagggagggaagtcaatgttgggtgtaggaagactgctctggggtctcttgggggcagaagggcaagagtgggagctgggaggctggggaaaggctgaggagaggatagtgagccagggctgtgggaatggagaggttggacagggcagagagtcaagggcaggtgggacaggtctgggggctgactcttccttcacttggctgcatcctcaggcttcactctgaatgtcactttctcccttaggccatcatcgcagggcctctgtgaggacagggtgggggtgcattccagggtatggggacactgccaagtggtgagtcagggctgagctggcagggctggcaagcgagaatggcttcacctttaatcaccaggagaggagacggagggtgcaattgtgccaaaccccaaatcctttcgctcagttgacaaatattcctgcggcagcgtgggctgcgagctgctgagcctgtctggctcccaagaccatggtgtgggggcctgaggcgggtcctctcctctgccctgctcaatgtggctctgtccacttagcaaacatttactgggtaccaagagatgccacataccccaaagtctccatgaagcatgaaggtcatgcttcccattaaaagagcgaaactcaagctcagggactgggagtgagggcagtgacttgacccaggcctcccaggtacaaagtacagggtggagcatgagggagcctgatatgaggcccccaacgagaacctgcacctcctggaccttagctttctggtctgtacaatggatggggctttcattctgctcgcccagggaagtcagagctagagtcataggaaagtttggtcggagttcctggggagagctctttccacagggaaaaggtgtgctttgtgccagacgggatgctggggacacagcagtgaccgcagctcctgtcatcattgagcttacattttataggaacaagcagacaggaagcttttccacaaggacagggtaggccaggcatggtggctcacacctgtaattccagcactttgtgagaccaaggcgggcagatcatttgaggtcaggagttcgagaccagccggccaacatggtgaaaccccgtctgtatgaaaaatacaaaaattagccaggtgggctgggcgcgtggctcacacttgtaatcccagtactttgggaggccgaggcaggtggatcacaaggtcaggagttcgagaccagcttggccaatatggtgaaaccccatctctcctaaaaatacaaaaattagctgggtgtggtggcacacctctgtaatctcagctacttgggaggctgaggcaggagaattgcttgaacctgggaggtggaggttgcattgagccaagatcgtgccactgtactccagcctgggcgacagaataagactctgtcttaaaaaaaaaaaaaaaaaaaaatagccgggtgtggtggcaggcacctgcaatcccagctactcaggaagctgaagcaggagaattgcttgaatccaggaggcgaaggtttcagcaagtcaagattgcgccactgcatgccagcctgggcaacagagtgagactccatctcaaaacaaacaagcaaaacccccccaaaaaacaaacaaggacaggttcggccgggctcagtggctcacgcctgtaatcctagcactttgggaggctgaggtgggtggatcacgaggttgggagattgagaccatcctggctaacacagtaaaaacccgtctctactaaaactacaaaaaattagccgggcgtagtcgtgggcacctgtagtcccagctactcgggaagctgaggcaggagaatggcgtgaacccaggaggcagagtttgcagtgagctgagatcatgccactgcactccagtctgggcaacagagcaagactccatctcaaaacaaagcagcaacaacaacaacaaaaccaaggacagggtcatcccagagtgacaaatgcaaaccagtcagagggaaatgagtgagaaagatgagcgtgcaggggtgactgcttgattcagtatggttggggaaggactctgtggaggggacgttgcaggtggggcctgagtcacgtaggaagaatgttccaaaaggccgggcgcggtggctcacgcctgtaatcccagcactttgggaggccgaggcgggtggatcacgaggtcaggaggtcgagaccatcccggctaaaacggtgaaaccccgtctctactaaaaatacaaaaaattagccgggcgtagtggcgggcgcctgtagtcccagctacttgggaggctgaggcaggagaatggcgtgaacccgggaggcggagcttgcagtgagccgagatcgcgccactgcactccagcctgggcgacagagcgagactccgtctcaaaaaaaaaaaaaaaaaaaaaaaaaaaaaaggaagaatgttccaggcagcgggaacagcatgtgcaaagacccaggggtcggaccgtgctgggagcactggaggaacagcaggaggcccagtggctggagcagaggggagaagaggggtaggtgaggacagagagggaacagagcagatcttttgggccatggtgggtgagggctttgcttttccgctgagtgacctagaagccatgaggctgtccccctagtaatttcatttctctgtctcctctgtccatcctcaggccccgtggagaattgattccccgaagacccgaccccgctgcaccctcagaagaggggttgagaatggaatcctctgtggatgacggcgccactgccaccaccgcagacgccgcctctggggaggcccccgaggctgggccctccccctcccactcccctaccatgtgccaaacgggaggccccgggcccccgccccccagccccccagatggctcccctgacccccctgaccccctcggagccaaatgaggcaggaatccccccgcccctccatagagagccgcctttctcggaactgaactgaactcttttgggcctggagcccctcgacacagcggaggtccctcctcacccactcctggcccaagacaggggccgcaggcttcggggacccggaccccccatttcgcgtctcccctttccctccccagcccggcccctggaggggcctctggttcaaaccttcgcgtggcattttcacattatttaaaaaagacaaaaacaactttttggaggaacacggggcctgtgcgtatttcgcgaggtgaggaggggaggatgcagggagcgagtgcgaccctgagaagtcccatcctcacagcctggcccgcatggcagatgggacatcggatgctcagagaagcggaaactcccgcacagtggcggaggcccggcttctctgcttctccagatcccggctctgcgcctggggtttgcatcgcccaaccttggccgctgcagcagcagcactgctggctcaagaggccataaggatgaagcaagagaatcgctcgaacccaggagacggaggttgcagtgagccaagatcgtgccactgcattccagcctgggcgacagagtgagactccatctcaaaaaaaaaaaacaaaaaacaaacaaacaaaaaaccataaggagcccactggggttgggtgggaaggtgcaggctgcggtcagagccacgtttctgcaaggtggcccgcggtggtggccagacgctatcccagggccaggggctagtggggcaggggctcagaaatgagctgctcatgcccacactggatcacgatcacatcccacccacctcaggtcggcactgcctgttccttgaagttcagggtctacctccccacccagcgtggtgctgcctcagtttacctgtttttccatgcgaccgcccacctcgctgacattctcatcccttgtctttaccctaaccgcacctatctgtgtggctctctctcatttccaacattctggctccctgtctcaccctgccccagttttggtctccaactgatctggagttttcctgtctccccatctgagtctcttgctcttggcctcctcctccctgtctaattctatttcgatgtttttg

SEQ ID NO: 5478 - DNA, 14040 bp, Homo sapiens
ggggctgggtcgcctgcgccgagtgttgctgaggctgcgtcttgggtgcgcagctccggcccagcctcacccaggggaacgcctcgcaggtgctcacggacgatggagaggtccgcgcccagggtgggagtccgcgcttccgggtgtgtctgcagctcggggcgctggagggtgggatgtgaccccgagacggcggcggcctggcacgtgatgtatgtgtgtccttgtctgatgtgtcggtgtccccgatggaccgggttccagtcccagctttgccactccccggcttgtgtgccttggggcaggtgactaccccgcgctgtgcctcagttgcctcatctgtacaatgggcatgattaaaaaatacctgtctcagagggcggttgtgaggattgagaggtaattctgtacgtgtaaaacgctgcggacgatacctggcacagactaaatactcataagaataaatacattaaataaactatgatcatgtatcttttgtatgaggcaagtgctgtggttgtgtaatgtctgcgtaaccgcacgggaaacgtgggtatttgcgacccgtgtgtctgtgcgcgtgtctgtgtctgtgttgtgggtgtgtgactctttgtatgtgttatgtgtgccagtgtgtgtttatgtatgtgatgtgtgactgtggtggggttctgtgtctttgtaaccttgtgtgaaaggtgtgtgtatttgtgatgtgtgtgtccatgtctgtttaggtatgtgatgtgtgcaactctgtgtgtctgtgtatttgatctgtgtgcctatgtctgtgcttatgtatgtgtgactgtgtatatgtgcatgttatatgtgtctgtatgtatcagtgtgtggtgtatttatgtgtatttttgcatgtgatttatgtagccctgtatgtatgagttgtgtgtgcccgcatgcatgtgtatgtagtgtgtctgtgtgtatccatgtgagtgaagcttgtgtccgtgtgagtgatgcatgttacgtgtccgtatacatgcatgtattatgtttctgtgtactcatgtatgtgatgtgcctgtctctgtgtagctgctgtgtccgtgtctatgttagttcatgtgatgtgtgtgtctgcgtgtgtctgtgcaattgctgtctgtgcatgtctgtgtgacgtgcatgtatgtgatacttgtgtctgtgggtattctttgttgcccatttgtctagggactgtctgcgtggctgtgactatgagtgtcagcatgtcacagtggtgtccgtggggatctttgtctgtggcgtgtgcgtctgtggatctggggctttactttgtccggggcatgtgtgggtctttgtgatgctttgacgttcctgcgtggccgggtgcatctgtgctggaagctggcctgcctgtgcgtttccagtgcggtccctgcgtctttgtgtgtgacgtgtacgtgtccccgtctgctgatggctgtccacctttgtatgtgatgcgcttgtctatgagggtccctgcgacgtgtgtcagctgtgtgtgggctgcgcgtgcctgacatctgcatcttagcgtgtagcacatgtgtccatgctggtggcatgtcacagcggtgtccgggccaggcacccgtgggccctgcccccccacccccgctgcaagtgtgtgccggtccctgtctgtccctccccctcccatttcctcccctccctcctggcagccaatgctacgggggagccagttgccatgacgacgctccatcctccctcctcccacccttcctgtgacaggctctctgctcccccaatcctggctgccctcgggggcggggccctctttctcgccccccccatcctaccctctcccccccaccccagcaaccccggctccccagcatctctcctctgtccgcctctccatcccttcatccgtctgtcccttcaaagagggggaggggggtacctgagccagcaagcagcccctccctccccctgtcctgcgtctcctgcccctctcctgggccgggaggaggccagggtcgcgcgggtccccatggctgggggctgagggcccgcccccccctcctccccagccgccaccacctccacctccctgccatcctcgacaagatgcctgcccccggcgccctcatcctccttgcggccgtctccgcctccggctgcctggcgtccccggcccaccccggtgagtctgtcgggccatcagtctgtccggtggcccccacccccgcggcggcctcgctgtctgcccaggggtctgtctgcgggtcctgccccgtcacctggtgcgcgtcttcccgcagcccagcagggcccggagcggcggggacggtgcctctgtcagcagggcctgtgggagggaggctgggggctgggtggggagggggctccgtttgggcaacatgtgtgtatgcgtgcacgcatgtgtttgtgctggtgtgtgcaggaagaaggggaaggacagggcctctgggagaattgggggcagaggacaggaatactatttctaagggggacacaacacgggaggctgtctctggcttctggagagacccagggcttgcggagttcccttctctgggtcttgggctggggatagagaacatcggtgtgcgccaagcgtccctaaaagagacagatctcaaccccacaaactggggggttccagcatggggcaagaatcttctcccagcctgcagctgagagctagtcctcctccccaacgaggggtaatgaggctgtccacgggagcgtattttaaattctgcaagctccagacttcactatcactcctctttccttcaaccctcattggaattcatccaagcctggggtgaggggatggggtgggatgaggtggcgggggtcccagtttgggacgagaagagagaccccacccccaatccaaccacttgggaaggccccaaactacaactcccacaatgccttgggccactctgcacctctgccaagggaccctggtcgcagagcatcacgggagttgtagtccaagacgtgccgggacgggagggggcatgattccggtatccagggacttgaagctgggaccccagcccagccctgtgcccacagatggattcgccctgggccgggctcctctggctcctccctacgctgtggtcctcatttcctgctccggcctgctggccttcatcttcctcctcctcacctgtctgtgctgcaaacggggcgatgtcggcttcaaggtgaggtgcatgaggggattcaacttggggaggaagactccagcaaggcctttaccccctacacaggtggttggtggggagaagggggcagtaaatccgagagcaccttccagcttgaagctatggcaagatctggagccttgggatggggaaatgggggatggaaattgggctgggactgggagacagttacaaaaatgaaggggagacaaacttaagagaaagacgatggcgtgtctctcagccctgcgttctcccacccctcttctcctctcctggccccaggaatttgagaaccctgaaggggaggactgctccggggagtacactccccctgcggaggagacctcctcctcacagtcgctgcctgatgtctacattctcccgctggctgaggtctccctgccaatgcctgccccgcagccttcacactcaggtactgccccacgccatgaccagcatcccatggtgtcccgggaaaggccagaagatgttgagtgtgttccttcaggggctggggcggttgagaccagcggcagccaatgggaaaggcataggtgggagcgctggaatcttggaagcagcctatggggaggcagacaaagatcatcttggtggaagccattgcttaatccaaaaccagatttggggatttttaaggggcaagcggtggtgagattaccatagagcacagtctcagaggcagccaatgggaggctgaaatcacatcataggagcttgggatgccaaaaggaaggactgattggatgctggagccttgtgagcagccaatgaggaagctgagattctgacatggaatgtgggtggcagccaatgaaaagagagtgatgtctgctctgtctcagtccccactgacctggggtgtgttggtagcactcaggaagggggagagactcaggggctttcccctcttgccctccccagacatgaccacccccctgggccttagccggcagcacctgagctacctgcaggagattgggagtggctggtttgggaaggtgagtgggctggggaggggaggcagggctccatggatcccgagctgtcctcctgttctgtgtccacacccctgctctcaccacttctcatctgtccctcgcctcctccccatgccccctcagcctcccatcccccctccgtccacctctcaccggctcccacccgccccatccccgacatctgtcagtcagcgcctccctcctcactccattgaccactccgccgcgccacccggctctccacgcgtccgtccgtctgtccatccttccatccgtccctgcgtccatcggattctgggcccgtgagtgtctcaccccatgtctggtgggggtcaagggtggtgggatgtggagggagaagctgggaaggagccgggggttgggagctgtgtggtggagtggagctggtcccaggggacggggctggggaaacggcactcgctgactcctgggtgccccttgaccaggtgatcctgggagagattttctccgactacacccccgcccaggtggtggtgaaggagctccgagccagcgcggggcccctggagcaacgcaagttcatctcggaagcacagccgtacaggtactgagggtttctcagtgggtgtgtgccttgttgaggtgacattcaggagtggaaggagtgctgtatggggtcacacctggaatctacctcttccggttgtgcagctctggcaggagaacttccctccctgaacctcaggttcttcctctggaccgagctaagggtgggaagtgagaggcaggatggtggaggaggcgggagcacagaagctgagctagaggcctgctcctctcccctctgaacctccggatcttcatctggaaagtgagtccaggaagccctagtgtcctcatgaagagggcagctgagaggatgtgagattcccatgtccaatgttgggtaccagctggtacttcccttccccaggccacagactaggtccctgagcaggtgcccgagcaggccactgtggagctccatccctgcccttcttggtctctactccactctcagtgcttctaggatggggtctaggtatccatttgccagataaattccttgtgaggtagtgagttccctgttttggaaagggtgtgttcgcagagaccccttatcagaacagttgtaaaggtgggctttaccctgagaaacacattgggttttggcactccctcactccaaaacctcccatggctccctactgcctacaggacacatctggtcctcctgacagcccacaggccctgcgcagtctgacactgtcccttccttccaatgtccccctcaccccagccacgctggcctcttcactgaccctccccacggaagccaattccctgccgcagcgcatcggaccttgctatatcctctctagaatatcactccttgctcatccccaggtgtggatggggccccttcccttcctcaggcctcagctcagagacatcttcccttactcctcccctccttccaaagagggtcctggggtgcttcaccccgtcatggcatgtgttttcttcataacccataccccaggttgtcactatatcatttgcttacttgcttattgcctgtctctccctaaacctgtgccagcaaacactggccacatatgcctattacatttaagctaagatgggcacggtggtatactcgtgtagtcccggcactttgggaggccaaggtgggaggatcacttgaggccagaaattggaggatggagtgagctatgactgcaccactgcactcccacctgggcaacagagcgagaccctgtctctattatataaataaataaataaaatgtaagctaattaaaatgcaatcaaattaaaaacacatttcctcagccaccctcatcatatctcaagtgctcaatagccacctgtggccagtggctcccctggtaggcagggctggtccagaagattcccaccttcgcaaagctctgttggacagtgcaggtctctactagcagcagctcagggtctgtctcgttacccgagcacaagtgctgctggctctcagtagacgtttgctgggcgagccacagacctgagatcaaatcccaatgttcccatcattaccagctgtgtgaccctaggcaagtcgcttcacctctgttccatctggatcaaatggggatcatcatcctgcctagcacgttgctgggaggatttgagagcagagcggccggccttggccagattcgtgggtgtgcagtgaatcctggcttccttctacaccagccaccccaagtctcccatgctgggaactccagccactgttgaagccccacacatggcaggagcttcatgaacactttgtcgggctcctgcctgtaatcctagcactttgggaggccaaggcgggcagactgcctgagctcaggacttggagaccagcctgggctaaaccctatctctacaaaaatacaaaaaaattggccaggcacggtggctcacaccagtaatcccagcactttgggagactgaggtgggcagatcatgaggtcaggagttcgagaccagcctggccaacatggtgaaaccccatctctactaaaaatgcaaacattagccaggtgtggtgggcaggcgcctgtaatcccagctactcaggaggctgaggcaggagaattgtttgaaccccagaggcagaggttgcagtgagccaagatcacaccactgtactccagcctgggagacagcgtgagaaaacaacaacaataacaacactttgttacacgattcttccaccaaacagaagcaagagaccctgttctcctgaggacacacagcataaacagcagagccgcggttacacacaggcaatagaaggctgggtactggcagtggccccacagcacacaagtggctctgcctcccgccaggccccagtaggaaaataactagtaagttactgtgcacctactcctggccagaccctgggctgcaagcctgaaatgttctcatcctcctgcagacctccaagccagtccttctctccacctgtgtttattgagcatctactactagtctaggcactgaggacacaggcaggaagacacaccaaattcttatcctaggagagctcaccccctagtggagaagacacacaatagataaataaatactttttttttttttttcaaggctcacttcagccttgagctcctgggctcaagtgatcctcctgcctcagcctcctgcatagccaccatgcctggctaacttttatttttatttatttatctttttttttttttcagatgaagtcttgctctgttgtcaggctggagtgcagtggcgcaatctcaactctctgcaacctctgcctcctgggttcaagcgattctcctgcctcagcctccagagtagctgcgattacaggcgcccaccaccacatctggctaatttttggtatttttagtagagacggggtttcaccatgttggccaggctggtctcgaactcctgacctcaggtgattcacccaccttggcctcccaaagtattcggattacagacttttttttttttttttttagacagagtttcaatcttgttgcccaggctggagtgcaatggcggggcctcagctcactgcaatctccgcctcccgggtgcaagcaattctcctgcctcagcctcccaagtagctgggattacaggcatgtgccaccaagcccagcttattttgtatttttagtaaagacagggtttcactatgttggccaggctggtctcgaactcctgacatcaggtgatccacccatctcggcctcccaaagtgcagggattacaggcatgagccactgcacccagactatatattttttttaattgtagagatggagtttcactatgctgctccagctggtctcaaacttctaggttcaagccatcctcctgcctcggcctcccagagtgctgagatttcaggtgagagccaccagaccaagccagaaatgcattttaaaaagagaaactgtcagctgggcgtggtggctcacacctgtaatctcagtactttgagaggcccaggcaggcggattacctgaggtcaggagttcaaggccagcctggccaacatggtgaaatcccgtctctaataaaaatataaaaattagccaggcatggtggcacatgcctgtaatcccagctactcaggaggatgaggcaggagaattgctggagcccgggagatggaggttgcagtgagccaagattgcaccactgcactccagcctgggcgacagagcaagactctgtctcataaaaaaaaaaaaaaaaaaaaaaaaaagagagagagagagagagagagaaactgtcagagaatgacaaataccatgagaaaatgaggcagtatgtgacagagacaggggccaccttggataggaccatcagggaggccgggttgacttggagaagtcagccatgcaaagcaccatgggaagtacattccaggcagaaggaacagcaggtacaaaggatgtaggacaggaagaagctcatggagagtgagcagccctggaaatacatttagaatgcagggtgaagcctgggcacggtggctcatgcctgtaatcccagcacttcgggaggccgaagtgggtggatcacttgaggtcaggagttcaagagcagcctggccaacatggtgaaacccattatctactaaaaatacaaaaattagccgagtgtggtagtgtgtacctataatcccaactactcggagttgaggcaggagaatcacttgaacccgggaggtggaggttgcagtgagccgagattgcaccactgtactccagactgggcgaaagagcaagactctgtcttaaaaaaaagaatgcagggtgaaaataaaatcaaataatatgttgccattaaaacagcagtaattgctaggatctcagcacataccagcttctctcagatctcatgtaattcctcagaggaagttgttatcgctgtcccatttttacagatgaggaaaactgaggcagggagcagcgaagtggcttgcctgagatgacacacctaggaaagtgggagtcagggttcaaacccccgagtctgactctttcccacagcgtgagggtaaaggggagggtatccaacctggcattgggggggcagcaaagcttcccggggagatgatgttgaggcagaggcccggaggggccaagagaactctgatgagaggagggcgttctgcagagagagaaccgtaggtgcaggcagggtgcggtggttcacgcctgtaatcccagcactttgggaggctgaggcgggcgtatcaccggaggtctggagtttgagaccagcctggccaacatggtgaaaccctgtctctactaaaaatacaaaaattagccaggcttggtgtcgggcatctgtaatcccagctactcgggaggctgaggcaggagaatcgcttgaacccgggaggtggaggttgcagtgagctgagatcactccattgcactccagcctgagtgataagaatgaaactccctctcaaagaggaaggaagggagggagggagggaggaaggaaggaaggaagggagggaggaagcaaggaaggaaaaaaaagagagagagagagagagagaaaactgtaggtgcaaaggcccgggcctaagcaagggcctgcaggtttgggaaaacccacatgggataaagctgactcttgggccagccggaggagcaggaggaatcaaagagccggcgctctatcctggggtgctggggatcgacagagggctgtgtgtggtgaaaagcaggtgaggcaaagggaaggggagagactagagccagggaggctgggaggaggctgtggggacgaggaggagaagactgagaagagtctggggcaggaatgaaggtggaggtgaggtgtaaggaggaaggagaggtaaaggggtccctggggacctgctcccccaggagcaggccagtgagggccatccagagatggggacctggggaaggagtggggtgtggtcgaggagagagactccgaggtgaggaaactgagatcaaaaaggtagagtgggccgggtgcggtggttcacgcctgtaatcccagcactttgggagcctgaggagggtggatcacttgaggtcaggagttcgagaccagcctggccaacatggtgaaaccccatctttactaaaaatacaaaaattagccaggcgtggtggcgcatgcctgtaatcctggctactcaggaggctgaggcaggactcccgcctgggcgacagagcgagactccgtctcaaaacaaacaaacaaacaaaaacaacaaaaaagggtggaggcagcagtttggttctgctgggggttggggcaggatgaagaggaaggggctgccttcccaactcagccacctcctcactccacaggagcctgcagcaccccaatgtcctccagtgcctgggtctgtgcgtggagacgctgccgtttctgctgattatggagttctgtcaactggtgagggtcttggggggttggggaagggcagagggggcagctggacaaggccggggccaagcctggtgcccctgggcttcgtcgtcatcatcatcatcatcgtagatgatgtgtggcatgcgctaacatttcatgagtgctgcctgtcctgggggctggcctgaacaagcaggcaagatgggctgtgttattacctgctgcaagcagcagaggaaactaaggctcagaggggctacccagtgacagcagaagccattccagcctccgggccgactagctggagacctgagcggctggtggtgctgaccttctttgcctccctcccagggggacctgaagcgttacctccgagcccagcggccccccgagggcctgtcccctgagctaccccctcgagacctgcggacgctgcagaggatgggcctggagatcgcccgcgggctggcgcacctgcattcccacaactacgtgcacaggtgggcgggccggggagccgcgggaggagctactaaggggaagggggaaggaggtgaggcctcaggggaggggctagagggggggcggacccatgactggctgacacaaaatagggacgaaccgaggagggtatggaggagaaggggccaggagaggaggcgggaccaggaggggaatgagaggaaccaagtgagagggaggcggggtcaggtgatgaggggaagggccaggagaggaaaaggggtcaggagaggaggaggaggaaccaggggagggggaggggtcaggggaggaggaggaagaaccaggataaggggaggagccaggagagggggaggaggagccaggagagggggaggaggagccaggggaggggaggggccaggagagaaggaggaggagccaggataggggagggtccaggagagaaggaggagccaggagagggaagaggagccaggggaggggggcaggggagggggaggagtcaggagaggaggagggtccaggagaggaacggaaggagccaggtgagggggaagcagggtcacgtgatgaggagaggtggctgggagaggagggggaggagtcaacagagaagcaggagaagccagaagggtcagatgaataagaggaggagccagtgcagaggaaaaggagaggagacttggaggaaccaggggtggggagaagacaagacagcaggggagagtgaaagcagtcagaggggagagacagatcagagggaaggggcagagtcagtgtggcggggcagggtcatgggaggggtggagtcagtgtgaaagggcggggtcagggcgtggctggagggctgcccctgcgctcacctcctcgcgttcttcccgcagcgacctggccctgcgcaactgcctgctgacctctgacctgaccgtgcgcatcggagactacgggctggcccacagcaactacaaggtagggcttccttccgtcgggatgggggctgtggggtgccctgacccgcctgacaccgccctggttccctcaggaggactactacctgaccccagagcgcctgtggatcccactgcgctgggcggcgcccgagctcctcggggagctccacgggaccttcatggtggtggaccagagccgcgagagcaacatctggtgaggaccacgggccgcgggggccgaggcaggccaggaaggtggaagggttactagatgccaccggttctacagatggggaaaatgaggcccgggtgggtcagggctgggctctgacctctctctgctctctgcaggtccctgggggtgaccctgtgggagctgtttgagtttggggcccagccctaccgccacctgtcagacgaggaggtcctcgccttcgtggtccgccagcagcatgtgaagctggcccggccgaggctcaagctgccttacgcggactactggtgagggctagcccacccggggctcctggcctgccgcaccccacccaggatggtcccagcatcccccctcgtttcccacatcacccacatcccgtttgccctccatacccctcaagagtgaagaggggctgtccccaccctttctgccagcatctgctacttgcagggggacacaggcaggggatggcagagctgtgatttgaacccacttcaccctaagaggtccctgcttcttacctgtctgattccagagctcacagcgcaaacagggacaccactaccctcaccagccgttcccatctgctgctgtgtcccctctgcctccaggtcccgtcagcctctctctatgggcatcttccccccacccctgcttctttgggtctcaatacccagctccccagcccagttacctcctctgaatctctaccgtctgctgtcccctcttctccctggatctctgccccactttttgggtctatgtttccctctctctctaggtctctgtccccctctctctgggtctctgtccctctctctctgggtctctgtccctctctctctttctttttttttggcagatttttgcttttgttgcccaggctggagtgcgatggcacgatcttggctcactgcaacctccgcctcccgggttcaagcggttctcctgcctcagcctcccaggtagctgggattacaggcaggtgccaccacgctaggctaattttttgtatttttagtagaaacggggtttcaccatgttagccaggctggtcttgaactcctgacctcaggtgatccaccggcctcagcctcccaaagtgctgggattacaggcgtgagccaccacgcctggatctctgtccctctctctctgggtctctgtccctctgtctctggatctctgtccctctgtctctgggtctctgtccccctctctctgggtctctgtccccctctctctgggtctctgttaccctctgggtctctgtccccctctctctggttgtctgtcccctccctgggtctctttcccctccctgggtctctgccctgctcactctgccccacctctccccaggtatgacattcttcagtcctgctggcggccacctgcccagcgcccttcagcctctgatctccaattgcagctcacctacttgctctccgagcggcctccccggcccccaccgccgccacccccaccccgagacggtcccttcccctggccctggccccctgcacacagtgcgccccgcccggggaccctctcctcaccgttccccctactggatggcttccctggagccgaccccgacgatgtgctcacggtcaccgagagtagccgcg

SEQ ID NO: 5479 - DNA, 2232 bp, Homo sapiens
tctttttccctctgaccgggtttgtctttgtggctctgatctcttggccttgacctgtcccccatcaccttggtaccaggttcactggtgtatttgcgggatgtagtctggatgcggggagagggaaggagcaaggggtgggaacccagccccttccctctgttagggaggctgtagtgtagactctggcctcggagttaaggtgatggcggcattagggtcacatgtgagtcctgggggattggggaaagggagagagaggataaggttttagcttcttcccaataagtcctgctgggagacttggtggtgcttgaagtgatcctgagacacctgccacagggtgggtgggtgctgcatgaaccaaggcagcggggggaaggtgagagctggactttctgggtctgagggaggaagggctggtgactgggggcaggacttctgggtctgagggaggagggggctgggcctgaactcctggatctgagggaggaggggctgggggcctggactcctgggccttagggaggaaagaccagggcctagactcctgggtctgagggaggaggggctgggggcctggactcctgggtctcagggaggaggggctgggggcctggactcccgggtgtgagggaggaggggctgaagcctggactcccgggtctgagggaggaggggctgggggcctggactcccgggtctgagggaggaggggctgggggcctggactcccgggtctgagggaggaggggctgggggcctggactcccgggtctgagggaggaggggctgggggcctggactcccgggtctgagggaggaggggctgggggcctggactcccgggtctgagggaggaggggatgggggcctggactcccgggtctgagggaggaggggatgggggcctggactcccgggtctgagggaggaggggatgggggtctggactcctgggtctcaaggaggaggagatgggggcctggactcctgggtctgagggaggaggggatgggggcctggactcctgggtctgagggaggaggggatgggggtctggactcctgggtctcagggaggaggagatgggggcctggactcctgggtctgagggaggaggggatgggggcctggactcctgggtctgagggaggaagggctggggcctggacttctgggtctgagggaggaggggccggggtccccaactcctgggtctgagggaagaaggggctgggcctggactcctgggtctgagggaggagtggttagttatctagggctgacataacaaagtacctcaaaattagtggcttaaatcacaaaaactgaaggtctcccagtgctggaggtcagaagtctgagatgagggtgtcagccctggctgctcctgaggctgtgagggaggatgagtccccggtctctggcttctgagggtgtgccggcagctttggttttcctcggtttgtagaggcgtcaccccaatctctgccttcacctccacatggtgtcatttctgtgtgtctgggtctctgtacaaacttttataagacacacatcctattggattagggcccacatgaatgacctcatctgaactaattatatctgcaatgaccttatttcctaatcagatcacattctgagatgctgggggttaggattttaatataaagttttttgtgggggtgggggagacacaatttgatccgtgctgagtccattttgtgttgctctgacagaagacctgaggctgggtctttataaaggaagaggttgatttggctcagattctgatggctggaaggttcaagactgggcaggtgcactcactgaggacctccctcatccctgaggctgctgctgcttctgggggagggcagaaggatgcagctgtgtgcacagagatcacatggtgctgaaggaagcaagggagagaaaaccaaattcccaaattcccaagggtgagcactcactcaccccttaaggcaggcattaatctatccatgaggactccacctccaagaccacacagctccttatgaggccccacatcccaacacctgccacactggggctcgaatctcaacatgaattttagtgaggacaaacgatatccaaaccattgccacccaaaagaagtgggctgaggcctggcgcggtggctcacacctgtaatcccagcactttgggaggctgagacagatggatcgcctgaggtcaggagtt

SEQ ID NO: 5480 - DNA, 4463 bp, Homo sapiens
tggtcctgtgcaccctgtgttacctgctggtgggcgctgctgtcttcgacgcgctcgagtccgaggcggaaagcggccgccagcgactgctggtccagaagcggggcgctctccggaggaagttcggcttctcggccgaggactaccgcgagctggagcgcctggcgctccaggctgagccccaccgcgccggccgccagtggaagttccccggctccttctacttcgccatcaccgtcatcactaccatcggtgagccgcccggagcctccctccgcgcccgctccagccccagccgtcccggggcgcctctgggtttcggtcccacctctgcccccgcccagctgagctactttggacgggtcatttcggctcaccgagcctccctcatctccttcgcctccctcgtctccctggtctcctttgcccccctctgctgaatggagctgtcagcccacgcaggcagggacgggaggaatcagtaaatcgagtttgccaaaaggctgacccaggagtgctcagaaaacgtccaaggggcttggagataggtgaagcggggctgggagaccaagtggctggatttgcttttccttgcctggttgcctcacacttgctgtgtgaccttagacgagttgctcaacctctctgagccagagttttctcttctgtaaaacagtgtcgctaatcggccttatctcagggctgtggtgagagttattattcaggagacagactatgcacagacaaggcctgtgctaaaacatgacacatacagagcactacaaagaaaagatcatttttttattattgcaattgttattgttaccccatgagaatggggacccagtctgtcttagggactgctgtatgacccgtgcctagcatgcagtagatgatcaataaatacttgttaaaggaatgactgataaccacaggctctggactctgccctcagggatgcagagcagttcctttggagcatctggaccaccagctgttgccatgactaccatctggctggtacctgctgagcctaaacctgggggaacaggaaggagagaagtgggctctgcagggctccaggcttggtgccagccactccccaggctccagctgtgaacgtcccggcaccccccctggggcttggatcaccagtccgaaagccagtgccttggagaaagtttccccataatgctcttgcaagtgaatatgagctgtggtttttgcagtggagttaaaagtatgagttctggaatcacagagactggagttctggtctcatctctattgccacctgccttctctggcaattgattccacctgtccaagccctggtttccccaaaggcaaaatgcaattgttcctacctcactgggtgactgccaggtttcagtgaggtcaagcatgtaacatgcttggcacagtgcctgaagccaagtaggcactattcatttgtaataattcattatttgccaacgtggctccagctcttattcagctcttttgccccctcctgtccacatggacacccctgcttcctatcttggtacacctgagaccctcctggttaccgtgcccactggtctgggatgccatcaacttgttctctctgcctttatctacattctttggaggcttgccatgtggttttggcctcttaccctggttctttacctctgaggtacgtctgggaggctgatgtaagagactcaagtggaaacaggaggaattttgccttttctggccacttgggggcaccaccaccctctgtggtctagtccgctgaagccagccttgcagagagccaggtgccaggccccaggaatttgggctttgcttggatgggagagaggcactgaagcaatggagggtgctggttaatagctcaggcctgtggagggtgctggttaatagctcaggcccgtggagggtgctggttaatagttcaggcccatggagggtgctggttaatagctcaggcctgtggagggtgctggttaatagctcaggcctgtggcctttgggcagttttgtccctctgaacctagttttcttatctataaaatgggaataacaacatgtcatatagtcattgggagggttaaatctgataatccatgcagagtacatacatgggttagttactgtcattattagttattatcattattcatttcactctctgccaaaacctggcacagtcccaaacagctggaagccttttattcctaaagagactcttctgtttctcaccagcacccccttcagcttggtttgattcaataaactctcattgagcttctggtctacgtcaggctctgtgcaggaccttggtgatggggactacaccaccatcgtccccgccctcaaagagctcaaagtctagtgatgagcagaccccctttctcccaaaagtaacagagaggcaaagtgatagggctatgcaacagaaatgtggaagtgcagccacaggcctttaaatgtatgtagtgctgatattctgaataagttatatatgcacacagtacacacttcacagggcacaaaagggtatggaatgaaaaggaattctccctcccaccctgtctctcagctcataaattcctcttcctgggtcaaatacagttgccagtttcttgtgtgtccttctggatatattctctgcctatatattcctttaaaacacacacattgtatagacgttatacacacagttttgtctcttacttttttcacttatagaatatatgttgatgtttttatgtcagtctctaaagagctgcgtcatcttgtttgtagggtttctcagcattggaactactgacatttggggctgtggggactgtcctgtgcattgcaagatgtttagcagtgtccctggcctctactctctagatgccagtagcacacagccatccccactcctcacccccatttgtgacaaccagaatgtctccagatgttgccaagtgtcccctcaaaggcaaaaccaccctcgattgagaactgctactctgtagtatcccatggtttggatggcactataatttatttaaccaggcccctttggatggacacttacattgtttctcattttcgctatgaccgacaatgctgcaatgacgacccaagtgcacacatatttttgctcatgtgtgtatattgaagggctaacttcctaactgtggaactaccttggtcaaaggatttgtattttttactttttggcaggtagggccaatctgttagaggaggcgcattcttcttggcctcctgactcttcctggcgtacaggctcctttgagaataccatgaaagcaactgctcctctttccaggaaaagacacacaatgagatacccattcattcccctgcaatggcgcggtgttccaggactcaagattgcccagtcgtgtttagattccctatagtagttgaagggacccagtaagaatcgccacgccagacaatcagaaccaaaaggtgttcagtgcgggcaggctgagcagtggagggggaggtagtcaggagaaaaggcatgtggagaggacatgctgactggggaagcagctcggggtgtagctggaaagtggggaaagttttgcttttttttcatcaaggcataatttacatacagtagaactcaccattttcctgtgtacactcctgacagatgaacacctgccgcgtaactgcagccacggtcaagacggaacattgccatcaacccccaaaattctaccatgccttctgtagttaagcctgcccccaaccccagctactggcaagcaaccacagatctgttctctgttgccacagttttgtcatttccagagtgtcatttatagggaaccatgcggtctgtaggctttcgagctcgtcttcctctactcagcttagacatttgagatccatccttggttgccgcaagttacaggagttcattcagttgctgaaaaaaattggtgtttggatgccccacaggttgtttatccattccccagtcgagggacacttgggttgtctgaagtttggggtgatgaatgacctagttaggactagtatttggagatgcccttccagccccggggacggggagggacacgccgggcaggcaggctgcgggcgggactgttgtcagctggagctgggcgctcacagccctcccctccgctctccctgcatagagtacggccacgccgcgccgggtacggactccggcaaggtcttctgcatgttctacgcgctcctgggcatcccgctgacgctggtcactttccagagcctgggcgaacggctgaacgcggtggtgcggcgcctcctgttggcggccaagtgctgcctgggcctgcggtggacgtgcgtgtccacggagaacctggtggtggccgggctgctggcgtgtgccgccaccctggccctcggggccgtcgccttctcgcacttcgagggctggaccttct

SEQ ID NO: 5481 - DNA, 1160 bp, Homo sapiens
atcaccctcaccaccatcggcttcggcgacttcgtggcactgcagagcggcgaggcgctgcagaggaagctcccctacgtggccttcagcttcctctacatcctcctggggctcacggtcattggcgccttcctcaacctggtggtcctgcgcttcctcgttgccagcgccgactggcccgagcgcgctgcccgcacccccagcccgcgccccccgggggcgcccgagagccgtggcctctggctgccccgccgcccggcccgctccgtgggctccgcctctgtcttctgccacgtgcacaagctggagaggtgcgcccgcgacaacctgggcttttcgcccccctcgagcccgggggtcgtgcgtggcgggcaggctcccaggcttggggcccggtggaagtccatctgacaaccccacccaggccagggtcgaatctggaatgggagggtctggcttcagctatcagggcaccctccccagggattggaaacggatgacgggcctctaggcggtcttctgccacgagcagtttctcattactgtctgtggctaagtcccctccctcctttccaaaaatatattacagtcacaccataagcacaaaccaggctccagggtcaccctgtaggagcaaattccttgtagtccaaattgtatgagggcgtggccacatcagcacttaggagaggctctgcacaggtccacctcagagccgaccctccagagcaacttttctgttgtgaagaggctggttttctgagtaacggttgaaatgtgcaactttcaacactggaatcttcgctgcaattagtgaggtcagatgctcacactacgagaagcatggggaacaaaggtggaccaaatgggaccgtgtacagtccagtgttgacaagggggtcaatctcttgcgctaaacgatctcattctctgcccagtgtatagagtggaatcagcccatgtgtgaatgatggcctctttcccccagacagctgatgctctttgtccctggccagccccacttcaggatgagggaggccttgctgtcacccacccaccatgtcactggggccacttggacacagcagaatgccatgggacgagctctcttccgggtcctgtcaatcaccagcaatatgaccttggagaatcgcatcctc

SEQ ID NO: 5482 - DNA, 1670 bp, Homo sapiens; identical to SEQ ID NO: 5467

SEQ ID NO: 5483 - DNA, 1670 bp, Homo sapiens; identical to SEQ ID NO: 5468

SEQ ID NO: 5484 - DNA, 1477 bp, Homo sapiens; identical to SEQ ID NO: 5469

SEQ ID NO: 5485 - DNA, 440 bp, Homo sapiens; identical to SEQ ID NO: 5470

SEQ ID NO: 5486 - DNA, 397 bp, Homo sapiens; identical to SEQ ID NO: 5471

SEQ ID NO: 5487 - DNA, 396 bp, Homo sapiens; identical to SEQ ID NO: 5472

SEQ ID NO: 5488 - DNA, 396 bp, Homo sapiens; identical to SEQ ID NO: 5473

SEQ ID NO: 5489 - DNA, 895 bp, Homo sapiens
tggggactgattatattgccaaagggttcaacttctttaacaagcccccccgtttcccctgaccttcacgaaagccgaaggaggcggggaaagggggtgagggtcttttccaaagggtactgacctcttcccaacgtctccccctgctcgccagtccgccacacgtacccagcttttgagttcagcttttcaaaataaccacaatcatgataaacttctacaaaacgtgattctcctcccctcccaccccatcccccaagtcaatagtgtgggattcggggagggagagagcgagctaaagggactctttccaagtccggctcccccttttccccccggccgccagggtgcctgcacctacacgcatgcgctgcatgacgcgccccccacacgcatgtcgcacccctcctgcgctccgggaacgcacggacacgggccagggggcggggcgattggggaggaatgaatggcggggggtcttcctgagctccgcggctcaccctccccaacacacacacacacacacacagagcaataagtttctctcactcaaatgtgtggcggggcgggcctagcctgtcgctgtggggggagtggtgagggggcgctctcagggattggggcggggttcggagacagtgtggggaggggaggtctgcaaatcgtccaactctggtgctaatggcgggtcttctcagcccacccgcagggcagggagggaggggtcggcgtggccccttccccaagcctcccccacgcccaccctgggtgcatgaaccgcccaatgcagaagctgccgcatgtcacccccctctccccaaagaaaaagtgtcatgcccccttcccacccaccctcactccccaccaaaataaacgtttccttttcatttaaaaa

SEQ ID NO: 5490 - DNA, 1013 bp, Homo sapiens
accaaattccctgaactgcgtcccagcacttctcaaacctccaagacttgacccagctcttttcagctcaaattcagcctttgggatgctccaaatccttcccacaactgacatttcttggacacccccaaagcctcaggcctgttccgcacccatatccccaaagccctaacagacttgtccagcccaggttcccttgatgctagaacttccaagataggcgcaacctgtctgcaattccagggaaccagaccctccccaagcaccctctttgtcttacgcctaaccctgagtctcttccctgagatggtgccccaaaggtaccctcttcacagacaccagtgtttcccagagggttgtatttgtacctttggtggtgtgctaaggtttgaggcagtatgaggacaaacacttgttttaaaagttttgtctctaatacgcattttgtacagaagccgataagtgcaggcatcgctgcttggctaggacacggtttatttaggttaagagtgtttccatttaaagtagtccacagatgatcacagaggctgttcccgaagggaggaacactggagtatcagaagattgggaaccgacaacacccagctcggctgggatcccagccccccttccccagcggtcctcaccgcgtcacgctcgcgggtggaaaatcatttcccacctcctatcctggctcaaggatgcgctacctcccccaagcccagagaccacaccggtcccagactctttagcggaccccccttttggagccggggtcccacggaattagccacctccctccctctgctcccacggcctcaggaaccccccacccgagggtggatgggggcgtcactgagcacgattctcgatgcaacgattcctatgcaaggggcattttgagtcccccccatccttccctcggaccctaaaccctggtgaagcaggggtgaggggtggggcgggttttggtgggggcggggcaaagggctaggggctccagacaccagggt

SEQ ID NO: 5491 - DNA, 10085 bp, Homo sapiens
gatggtccagtcgggttggagtttatttctgccagagcctggaggctgggagggtaaaggacactcctttagtcccagagggaagctccgaaccctcagagcaaccagaagggagggcagagcatgggcagcagcaggagtgagaggggtccccttgtcctgcccctttgcaagggttcaaggctggtggaggcctggggcttctgtcgctcaggagttccaggggtggacgcagaaatgggggaaggagagtggctacgtagagagtgagagcgagattcctaaaaagatgcacagagagaccctcagagaggccaagaaagatggtgagagggtagggaaggagagggagggagagagagagagagagagagaagcagagggaatgggttgcactggctgaggatggtggaggagccgtctcactcccttcctaatgtctatagatcaataacgagggaagaaaggaggacagggagctgatggaaacacagcttgccaactgtacccagtcccccaacaagcaaggtagctccagtcattgcctccctgcctgccccgctcctctgtgtttaggggtcatcctttgatgggaggttgcaggggacccaggtgggggtgataaatgccagagtgctgcaccatttccaaagggcaagaagtcagagggcggggttcctgggacagggtgcccgtggggtccagggaggaagggggctgggccccatctgttagtgcatctggggacagggtagggtcactgggggtgggctggtggggacccctcaggctccggggatggcccagacccaggctgtgcttcctctgcctcctcgtcggatgccacgccctcctctagtcggaagacctggcgcaccgtgcgggtggtgaaggtgagggggccgcgtctgtggggaggagagaccaggatacagagatgaaatgaggggaggggaggggaggagaaagggggaggagagagagagatgagggggagagagagagagataggaagagagagaacaaaataagggggaagagagggatgagatcaagagaaatggagggagacgggcagaagcaatggggggcagagagagatgaaggacacacagagaggaggaaaggagagaaaggtggtggtgcacggtgggaaaggagggcacagagatgacagggagaaatgggtgtgggaagaaagaagttacctggatttggctctcccgcaacacagccgctgctcccacagccccacacccccgtggatcccatttccccctgttgttgcccctggcacggcctcgcgtccctggggtttatggagttagggtgctccccacccgtcaggcctgtacgtgggatgaccataccgaagccggttcctcagtgtggtcacttcacggttcatggactcggccgactctgtgacatcttccagctcacgctgcagcctccggcggccggcctgagcccgggatgcctcctcctcggcctcctccagctgccgcttcagctgcttgactcgaaggtttcccttctccagcttgatggaagcagggggactgggttatatctccaggtactgtcatcactccctccctctccaacagcccactactgccccatccctactgcccctgactctctctgccccatcctctgctctctgtttaggccttgttcttttctcctaaatccctcatgccagcctctaccctgacctccagtctctcccctccaggttgtctcctacatggcctcagaaaggtcttcctatacccagagctgacccagaccctcctgctcacaatcctttcatggctccccagtacccccgggacaaggttccagcccctcagcctggcattccaggccccacagggtctttttcttgtccagttctctcttcccataaacccactgtccagaccaacttcactgagatcctccccagaccctaccacctctctcttcagggagggaacatacatgatctgacctcatttcttatcgttcagccttcctatcccacattttctggagtcaatgagctcccatcacaagaagcaacgtgcaggtgctggactggaagtgagtgcagataccatcctggcacttggcacatcagcagagggttggaatcaatgacttcgcaatttataaattctggcatctaggaagggcccttgtagggagctgaggcagccaaagtgagggaagaagttaaactctaccaagaagctagaccaggactaaaataacaacagatgtttatctagaccatactaatctgctttttgttctgaactcaccaaacgtatttctattcttcaaggcctttatacttgctgttccctctgactggctctttttcacccttcaggtatcaatttaaatgtcaccttctcaaagagttcttcctgatctcccaacctgaagaggattccccaatcctctgtgtcttcctctctcttcactttttttcttcatagcccttgtcacaatctgtaattatctgcttgtttacaggtttattacgtctcatcctatgcagaaaatgtgagctccatgagggcagggacttcctctgtttcgttcacatccatatccctaatgcctaccacagtgtctggcacatagcaggtgctcaataattgtttgtggaatgaatggcgaataaagcacagctgagcttttaagggcagagggactctgtccagacagacctgggatctgatccaggctctatctctgtgactctgatgcaaaatatatcctcttaaagtttcagtttcttcatctgtgaaatgggactagtgaggaaatgcaaatatgtattttttaaaaagcagttgcttatgacacagtaactgctcagtaagtaatcaagaacacacactctggggctagagtgctgaggtttgaatactgaccccacctcttaccagctaaataattttgagcaagttacttcacctttctgtacctcagtttcctcacataaataagagggtaaataatagcaccttccttctaccattctgataagaattaaacacagtaaatgttatgtctttagcacagtgcctggtacatagaagctagtcctggtctagcttctgggtagggtttaacttcttcccttgccctggcttcctcagctccctacagggccctttctagatgccagcatttatgaattgcaaactcactgattccaaccctctgctgatgtgccaagtgccaagatggtatctgcattcagttccagtccagcacctgcacattgcttcttgtgatgggagctcattgcctctggagacagcctgtgcaatttctcagccagtggtcacactctccactgctccctaatgatgccagctgcttacctggtcccggagctggtcagccaccctccgctcctcctccacctggagcaccacctctttaagccgcttctcagctctgcgcaccagctttccagagaggatgcgctctctgaagagagggatgaggaggagtctcagtagaggggctcaacctaggattttgtccccatagactcatgcagtggctgtcaccttgttcttggattggcttcttccctctttcctaacccctaagtggttcccacagtttactgaggccaaacactgacatgcaggctgccttctcctcggcatccatgtccttggcttctactaggacacctcacatacctgtttcctatgatgttgtgagttataataagtatatgtttggtcctattcagtttccaaagaggatcatttacaaactacagtttactctttgggcccattcattttcccctgaaaatcatttactatctctcacaattgaatacatcctttttgtctctctcccctataaagaggatacttaagcctcaaccatctgaccctgtataaaaagtcttatattttgcatggctcctgtgttcatgcacattaatatatttgtagccttttattttgttaatctatttattgtcagtttatttcagcagacttgaatcttcagagcgggagggaacactctttctgcccttacacctgtcctctcctgcatggaccatcacatctggggtgaagtccatgtgatgggacctctagcaatcgggattgcttgacagccaccctggatacaacagccccagatgtgctgagaggaaggcacagggctgggggcgagtgggaaggcactaagcagtggaaaaggatgaaggagagagacttctttttttttgagacagagtttcactcttgttgcccaggctggagtgcaaaggcacgatctccagctcaccgcaacctctgcatcctgggttcaagcaattgttcctgcctcagcctcccgagcagctgggattacaggcatgtgccaccacacctggctaattttgtatttttagtagagacagggtttctccatgttggtcaggctggtctcgaactcccaacctcagatgatccgcccgcctcggcctcccaaagtgctgggattacaggcgtgagccactgcgcccggctgagacttcttcagctaagaatcatctggtcattctttgctcccagggtgactttattattcttctgagaaagggccttgctctgttgcccagacaggagtgcaatggtgtgatcatggctcactgcagcctcaatgtcctgggctcaagcgatcctcccacctcagtgtcccgagtagctaggactacaggtgtgtgccatcatgctgggctaatttttaatttttatttttgtagagatggggtctcgccatgttgcccaggctggtcttgaactcctgggttcaagtgatcctcctgcctcagcctcccaaagtgtggggattacaggcatgagccactgcacctggtgcagggtgactttaagcaactcatctactccctcggaacctcagtttcctcatttgtataatggagcaggggtccccatagacctcaagctacagttcccataagccctggggcccctgggtgaccctgtggactgagaaccacttgtctcatgcacctctggggccgtttccttctgcctgtccctgaggcctttcactctcatcaagttccacaacgaatttagcatcttcctccaaaaagccaatattccctcagtcaccaggccttagctccaaacagtgtcttcttcccctgccaccacccatagcctccgcttcattccttctgccccctgctttctcttcttcatcctctcttgttcatcttcacagccccagccccagctcaggcctcatcttgttctgcttggaccatcattccagactccttccaaacctcccagcttccagtctccctcctctgatccattcccaccttagccccagagagatctttctatacctagagctggccgtgtccctccccagcccacagccttcccatggctccccattgcccccagggctccccactgcccacagaacagagttccgtggcccagtattcaaggctctgtgtgcttcaagcctcatttacctccctgtctccctgatccctctcctgggtcccagactctcagaaccaaccacactcctcctccaaatgccctgatgtctcccagactttcccacaaagctgccaactgacttgggactctaagccctggaaatcccattcttgtcagctccagctcaagtgcctcctcctctagatacccttcccaaaccactacatctcagggtattccagcttcttcttcatctgtgtcccttcaacccttctagttcataggccttcattgccatgtccagctcatgagtctttcaccttggggaatcccaccagacatggtattagacataccatggaggtaattagacatacttccatggtacgtctaattttttcagtgaccagcacatgggaaggtaaacagtacactcctctttttttggagtcggagtcttgctctgttgcccaggctagagtgcagtggtgtgatctcggctcactgcaacctccacttcccaggttcaagtgattctcctacctcagcctcctgagtagctgggattacaggtgtccattactactcccggctaatttttgtatttttggtagagacggggtttcatcaggttggctaggttggtcttgaattcctgatctcaagtgatctgcccgccttggcctcccaaagtgctgggattacaggcgtgagccaccatgcctggccccaacagtacactcttaatatttgtttgttgaatgaatgaatacaaaagggaaccttatataaatttgatgtataatataataacattcctccccatgagataatgtgcagatgatgaatagcaagtcaagtatcctacatttatagcccatctcagcctcagtttttctacatgcaaaataggataacaatggtctttctctcacagggattatgtggtatcatacaggtatatacaagtagtccaacacctgatatatagtaaatcctcaataaataggaactattagtattgttgtaattattgttgctgaatagtactgagcaataggaaaatctattgtattggaagagtgaaaggtattaggcttagtaataaatattctgttcattttattagcacagcagttctcaactaggaatgttatgggggcattcttggtcattccagcaactggagatggaaactctttcagccccatactactgctgcttcctgtctctgaacatggatgtctgtgggtatggttcttggtgcaattgcagccattttatgaccatgaggaaaagactaaaaaacaacacagatgttgatccagagccctaccatcttttggctgcctagctctagacttcttatcacttgaaaaaaagacattcctctttgtgctagactgatacaacagatggtcccagttctcacccctttctgtatccatacccttggcaatatgactttgcagttgctcctatcaaacagtcatatctatttccccattcctttgaatctgagcgggctgagtgacttgctttggttaataggatatggcagaagtgacacagtaccagttccaagtgcaggcctcaaggagtctttagcactttcccttgctcttagaaccttgactctgtcatatgaacaatcctgggctagcctcctggaggatgagaggccacatagagcagagacaagttagcttagttgtcctaggcaaagccttaagagttatgcaagcccagccaataccactcatgctgttcttgaaaagaaaaaagaaaaaaaaaatgaaagcccagccaagattagcaaatccatctagctgaccctcaactgagcggatgatgagtgaagcccaccaagcccaaatgagcagaacttactagccaaagactcataagcaataataaatggttgttgttttaagccactaagtttcagagtagtttgtaattcagctataactaactggcacgttattacgtaaataatactcgtagtgagactgcagttacttgcagcccaaagcatcctaaatgatacagaaaatcagcaatcatttaaatatttacatatatttacacactttgtttgttttttctttttctttttctttttttttctttttgaggcggagtttcactcttgttgctaagctggagtgcaatggcgtgatcttggctcaccacaacctccgcctcctgggttcaagcgattctcctgcctcagcctcccgagtagctgggattacaggcacgtgccaccacgcccggctaattttttgtatttttagtagagacgcagtttctccatgttggtcaggctggtcttgaactcccgacctcaggtgatctgcccgcctcagcctcccaaagtgctgggattacaggcgtgagccaccgtgcctggcatctttttcttttctttttttctttcttttttttttttaaatggagtctggctctgtcacccaggctggagggcagtggcgcaatctcggctcactgcaacctctatctcctgagttcaagcaatactcctgcctcagcctccccagtaactgggactacaggcatgagccaccacacccagctaattttggtgttttttggtagagatggggtttcaccatgttggctaggctggtctcaaactcctgccttcaaatgatctgcccgccttggcctcccaaagtgctgggattacaggtgtgagccactgtgcctggctgttttttttttttttagagacaaggtcttccactgttactcaggctggagtgcagtgttgtgatcacagctcactgcagcctcaaactcctgggcttaagctatcttcttatctcaggctcttgagcagctgggactacaggcacacgctaacacacctggcttttttttttttttttttttttttagagatgaggtcttgctatgttgcccagactggtctgaaaactcctggcctcaagggatcctcccgcttctgcctcccaaagtgctgggattacaggcgtgagccaccatgccaggccagcagtcattactatgatgatgtcttttggatgtttctaaaccacgtgtttgtaacacagcctccttcctctcaccaaccagaatgtggaggtcacctttctcctgtggcctccgctctcacctacctggtctcttgctctagctgctcctcagcctgggccaacttagactcaagggcagcaatggtcatcttgtggcgggcacgggccccagcatcctcctcacccaggcgtccccgtagctcctggatctgccgttccagctgctgccgcccgctctctgccttggctgagaaactgcgctcagctgacagctctgtggtcagtgactctacctgtagcaggaggggaaggaaggatgtcatggtggagtctcagagggaaggtggtaggtaaatccaggcacctctgagaattaagtgcactgatgattgtcacacgcatagcacagagcctgaaacatactaaatactcaacagatgttagcttgtatttttattaatagtttattgacttgtcacccacagcactgccagccctgggtcttaacattttggatagttttctgcttactttaataagtccacgagaccatcacaaacttgtttaaatgtcataaattctacttctgactgtgaatgagtccattctaagggttatcacacttttgtttgcaccaggatcatctgggggagcttgggaaaaaaatgcagacatctgggtctcacccttcagagattctgactcagcaataccaaagtggagtctgggaatctgcacttataacgggcatctcaggtgttatatgcaggagcattttgagaaacacggcctcaataaacagtagctgctacgtggaaaatgtgtaaacacacccctaataatagttcccgtttatttattcagctcgtactctgagcgaggccttctgctgggtacatggaagtgagtcagacccagtctgattcatactttattttaccctcgcagggacacaatgactgggtaattagcatattctcctttgtggggttttttttttttaacttaaaaaactttttttgagacagttttgttctgttgcccaggctggagcacagccgttgcccagctggtgaaatcccagctcactgcagcctcaaactcccaagcttaagtgatcctcccacttcagcctcctgagtagatgagatcacaggcgtacaccatcacccctgctaattttattttattttattatttatttagaaaccatgtcttgctctgtcgcccaggctggagtgcagtggcacgatctcagctcactgcaacctctgcctcccaggttcaagcgattctcctgcctcagcctcttgagtagctggaattacaggtgcctgccaccacaactggctaatttttgtattttttgtagagatggggtttctccatgttggtcaggctggtctcgaactcctgacctcaagtgatccacccacctcagcctcccaaagtgctgggattacaggtgtgagccaccacgcccggcctcaaa

SEQ ID NO: 5492 - DNA, 492 bp, Homo sapiens
caaattgtggtcttttgtggatgaagttcatatgctgtgtggttggtgactatctgattctatggaggctaaccaaagcctagactgagtgtggatgagaccctcaactggggagtgatggggatatcaaaggacatgctgggtgagaggagctgactgtcatgtagggagtgaaccactgcccccagcagagatacagttcggttttaagaaaaaaggcaaggccaggcgcggtggctcacgcctgcaatcccaacacttttggaggtcaagaggtcgacaccatccttgacaacatggtgaacccggtctctactaaaaatacaaaaattagttgggcatcgtgcctgtagtcccagcttctcggaaggctgacgcaggagaatcacttgaacccggaaggtggaggttgcagtgagccgagatcacatcactgcactccagcctggtgacagtgagactccacctcaaaaaaaaaaaaaaaaaaaaaaa

SEQ ID NO: 5493 - DNA, 6058 bp, Homo sapiens
cactcttgcactcctgtaatgagcctggcactgtgatgaaacacttttcccgtgtcgtttgagtgcatcttctcaacaaccctaggaggtaggtactgttgtcactgttgttcccatgaggcttcaggatgttaaattgctcgtccatggggctgtgctcatggcatttggtgccaggaagaagttttcttttctgacagtgtgctttgatttgcacagaaacaagagcgttttcatttttgccttggctgccctgtaggtgggctaccttgagccttagcttgacctttcctatatcacgttggtgcccctccctcacatggcccttttctgtcttcccttttgtgttatctttattttattctctggaatatgactcattctgagccaccgaaaatttgggcaagttttgaagaatgaatgaaatattacacatttcctcttgatataatttcatagctatctctgaatataaaacttagaaaagaagatgggtagatgaaaaactttttgaaaaatgcaatgattaaagtagaatattgattgtatgacttttttgggctgagaaaggtcatggatagtattcaggtttttaagttaagaatctggctgttaatagaagtcagatactgtactttaacattttaattcttcattttactcttaaaattatgaaaacatacactgctaaggtgagctttctaacttttttatgtagataatgatgcttgaattgaacaattaaattaaggtaaaatttatgacctatgtaatatgcttttcttatatagatttctttctttctttttttttttttttagatagagtctagctctgtcccccaggctagagtgcagtggtgcaatcttggctcactgcaacctccacctctcaggttcaagtaattctcatgcctccgcctcctgagtagctgggattacaggcatgtgctaccacgcccggctaatttttgtatttttagcagagatgagatgaggtctcaccatgttggccaggctggtctcgaactcctgacctcaagtgatctgtccgccccagcctcccaaagtgctgggattacaggcatgagccactgtgcctggccccttattcagatttctttatagaatttagcagaattactaatgtttaaccttggtgaaaattgcctttggacagtcattttaaactgtgaagtataagagacttcacgttacctttttaggcaaattttgaaaataacgtagtaggatccctttatttatttaacttatactaaagaaatttcaaaggattttactgtttttaaagaaaaaataatatttttaatgtccataagctgattgtggttatattaatgtatagatcaaatgaaactggcttttgttagatgtcactggtaaataagatggtgtgtacaatgatttatatcaccatgtgtgtttttatacaactctagagttagagagatattcatgtagaaattaattattttagcaaatgcaaatatattcccaaataggaatatctggtaggcctcaaactgtagatgggaaatgtaaaaaattgtaccctatactctgtttcctggtgggctggcataccccaaattcatttggtcagaatgagacaaactaagaagtcccacattattatgaaaaaagaactgtcaaagtgtcttggaaaaattacaaattaccactttcaaggaatttctacaacttaatttagtagatatatgcaaccaatagtctgggtggggtttgttagattgcatgatctggcttataatttgatataaagatgctaaaaattcagtgatgtacagtaaaactttgtgtctggtaaggctgttagatcagtagagacttattaaaatactggaataaattatgtctgttgtactctcataacacaacatggaaattgtgtgaaaggaacaacattgggagagttgctggggcagggttcccagtggaggtgaccatgctaagcagttctgaaggcacagcggttcattgggggggtcaccagcaaggagcagcatatgccagggtggaggcaagagggtgtggggtgtgctgagtgagtggaattgaattttagttccgggtgatggtgcattcagaatgactgaagcagagactgtgaggggaaggtggctagagtgaggctggccaagagcaggggccaggtgtcttgccttagaagttggacttagtcctggatctctgggaaacaacccgctgaagaattctgaggagacattagatagatggttcccctatgtcaaaatagttggtttgcttttatggttttcaatcttttctttttaagttgttgaagcaagatgccaaagaattaaagcagccaatttagcacattgttacctatgtcaggaaagtaaggggcttgggactgttgcagtttcctctttaacattaatagtctggatattgagcaatacatttgaaattgaaaaagtctctcaaaaggtatgcaccttaactgccacacacttgtgttggacagtttaaattgtattaatattaattatagtagtaattactgtagtattaatttgttttgttttttgagatggagtcttgctttgtcacctaggctggagtgcagtggtgcaatctcagctcacggcaacctacgcctcccaggttcaagggattctcctgcctcagcctagtacctgggactacaggcgcttgccaccacgtccagctaattttttttttttttttgtatttttagtagagacggggtttcaccatgttggccaggctggtctcgaactcctgacctcaagtgacctgcccgcctcagcctccccaagtgctgggattacaggtgtgagccatcgtgcctggcctgtagtagtaatttgaaagaaccagtaagaggtagggactaaggtatgtcccatcattttttaatagtatttcccattcacttgatttctcactatacaagccactacaaggtttttatcagaacagtggagcatgtggctagaagtgcagaattcctacatgttacagtaagtgttcagttacactatagttgctcacattgcatataaccaggagacagccagataatgtttactgcagtgattttacaaattcatcctggtcaatataacaattattgttcatgtctttattgccttcccatggagggattcataatacctactttcctattaaggttattgaccaaatttgctctagatctgtgctctccaattggctcattaaatgtggctatttatttaaaattgaataaaatttaaaatgcggtttttcacttccatcagcctcatgtcaagtgttccacagtcacatgcggctaagtggctgctatattggacatttccattgttgcataaaattctcttgtacagtgctgctctaatagttatcttcttatatacattttagtatacttaaaaaccatttaatactaaagtacagattaaatgatataatctgattcgaaataactggggagaagggagagttggaggggttatggaggaaacaagatttgccataagttgataattgtgaagctgggtttagagttcatgggagctcattgtattgtactcattatatagaaattttgtacatgttttacatttttcacaataaaaatgtaagcagaaggattaaccaggaactgtgctcccaccagcacctagaagtagctgtctgtcaacgggcatctgaaatctcaccccccacaggctggctcttgtagtgtagtaaagtttttaatcctgccacaggacttctaaagaacacatatagtaccacattttcatttaaggtttatttcattctacctgaaaacacacaagtagcagcagtctcatgttccttaagtgtttgaactgcccaagtgaatcttgtggatagaatgtgctagattatattaaaaattccattgctgctgacattaatttgaacaaattcaaaataatgttcttaatgaagagaataaagtccatttactcagtggttggttcatactttatttcacagccaggtaagtcagtttctgtctctggctttcctggttaacagcacctgtgtctgaagagaggtggagggagtagtagagaaagtccctggtaggagagaggccttaagtgaacaccatcactgtgcactgaagggctgtttgaagttgttaagagaaacatgtgggctgggcatggtgtctcacgcctgtagtcccagcactttgggaggccaagacaggtggattgcttgggcccaggagtttgaagccagcctgggcaacgtggttgagaccctgtctctacaaaaaaatagaaaaattagcaaggcatggtggtgtgcacctgtgatttcagctacttgggaggctgaggtgggaggattgcttgagcctgggagttcaaggctgcagtaagccaagatggtcccatgcactccaacctgggtgacagcgagatcctgtctcaaaaaaaaaaacaaaaccaaaacaacaacaacaacaacatgcgaactttggtctcctacccatctctaacaaatggtggggcttactatgagcagagaggggcttatcatagagtaacggttcagagcaagggctttggggtcagacttgggcttgagtgccagcttcacagtcaactgtgacctgagaaaagggaagagtgagcccttcccagctgtttcagagaataatggtagaatagtagcctgcacatggctaagtgctcagtaaacaacaagtcttattattaggtattccctggggccatatgttttatttcagctaaatgctgatattcgtagaatcatgtagaagaatgtgtaggtataaaggaatgtaatggtgcctttttattttacagggttcttgaagcttttgagattaacaatggcaggaaaatcatcactttttaaagtaattctccttggagatggtggagttgggaagagttcacttatgaacagatatgtaactaataagtttgatacccagctcttccatacaataggtgtggaatttttaaataaagatttggaagtggatggacattttgttaccatgcagatttgggacacggcaggtcaggagcgattccgaagcctgaggacaccattttacagaggttctgactgctgcctgcttacttttagtgtcgatgattcacaaagcttccagaacttaagtaactggaagaaagaattcatatattatgcagatgtgaaagagcctgagagctttccttttgtgattctgggtaacaagattgacataagcgaacggcaggtgtctacagaagaagcccaagcttggtgcagggacaacggcgactatccttattttgaaacaagtgcaaaagatgccacaaatgtggcagcagcctttgaggaagcggttcgaagagttcttgctaccgaggataggtcagatcatttgattcagacagacacagtcaatcttcaccgaaagcccaagcctagctcatcttgctgttgattgttagattgttgatgcattctaaccaactcacacatatacacaaaatcaacatggggatggagaagagaattagcgtttgcagcagtgtatcatctactaataaaattaaactaatgttgctgcttcattagttggtgggagaagggacacatccactcttggaggaatatatttactcaataatggcaccttacatttataaattgtaacagttgtctaataacgtttctttaatttaaatatgtaagttgcagagctaataaatgaaatgaccaagactttaattataataaaaataagaaacttgactattctagaagttatacttggattttttcctgggaaaatggagaactactttttatatgtgtatgtttttatgcaattagcattgtattcttggttcagggaaatactttcctaaagcaataatgttagatattaaagattaaaatctaatgtatttgcaatgcattgttaatttacttcttcattctcttcaaaatgatttaaccat

SEQ ID NO: 5494 - DNA, 8835 bp, Homo sapiens
gaaaacctttttatatttctgtacaaacttttcattttaatattgtgacaccaccatgcaagttctcacacaatatccgtgtcttgtagagtagtgaagtgtttgttaagtagaaaaacacaccagtgtggtacccagtgaaaggtggtgtctggagagtcagtggtttctggaactctggactgtcaaccaggaagtgttgaagtgactgaaaaattaaagcacatgggtaatagcatgggcagagcagagactgagacgatctatgtccatgccaaaggaagcatcctagtaagtttctggctatggcaagatgacaaaactcggtgtacgttttatctggatcacttttggagcactaaagcagataaccaactttgtgctaacatacatgtgctcaggagagcctgattttaagactgacttcaccccattgctcttgtgttccagaaccttcaaggaacatcacctaccagatccaagctttgccagcttagctttcctcatgatcagctcctatctatctatcaatcaatcagctgtcagttccacccatgtgcccaagtgctcttcacaccttcacacctgcaatgctttcctgtgcagcctaccttggaggtcccactcaatgctccacttcccttccagctcctttgaagactcagtcacacatgaaatttggcatttaactttagtaatatactcacaagtgtgttactagtgcctacctcaccttcaccagcctggagaaaaggctattttcagggtaccactgttgtgcagctgagccaagtcttcctgctctcaatcaatcaccctgctgctcttggctgccctgcatcacagccctctggatgatatgctcattgagggaggggccaactatatacaaaaaaatacacgtttgctgaaattactcctagatttctagatgagtatgtaaatttttctgctcccaaagctctggcatctagtttgagtcaatctgagctctataacaggtgaagacatcatattagtttgcagactagactatcaataggagaaataggacgaaagcagcactttaaaaatggatattaaactaccacgatcttgagcaaacatctttatttaagaaatcaaatagggtaaaaattatgcaatttcacacaaggatacaagacaaagcttagaattacttgctcaaaagttactcagaatggaacaaaattgttcaagtgctcccaattagcacaggctgtattacttgcttttcaatggacatttactattttacattaagatctacttataggaacaaagagacaattcccagccccctctggtgtatcacctaaaagactgaatacaaatgttaatgtaatccaagcttttctttgacaacaatactaaaaattgccttacaattttttacaagtacgagtatcaacagtttactgtctgagggaaaggaaatataagaatataaagtgacagaagcaacacacttcactgtggcctgcaactgctcccagcgtcctattttataaacatgatttgggttctcacattatagcaggatcactattcctagcctctggtggaagcagacatgtgacacttagcactgcacaagtgtttctttggcttcttgagtagtgctgtgtatactgcctatacatttttataacatctctaaatgcataatgtcaacgtatgtgctatcacatttcactcccaactgcagaatattttaattttaaatttatctaccaaatcttgactatgacatttatttttgggttgttacattaagatcaacctatctgggccgggcacggtggctcacacctgtaatcccagcactttgggaggctgaggcaggagaattgcttgaagtcaggaggcagaggttacggtgaaacaactgccattgcactccagcctggacaacagagcgaaactccatctcaaaaaaaaaaaaaaaaccccaaagatcaacctatctgaattgggtaagtcaaaagcttattcctggccgggcacggtggttcatgcctgtaatcctagcactttgggaggctgaggcgggtggatcaactgaggtcaggagtttgaaaccagcccggccaaaatagcgaaaccccgtctctactaaaaacacaaaaattagccaggtgtggtggtgcatgcctgtaatcccagctactcgggaggctgaagaaggagaattgcttgaacccaggaggtggaggttgcagtgagccaagactgtgccactgcactccagcctgcacaacaggagcaagactccatctcaaaaaaacaaaaaacaaaaaacaaaaacaaaaacccacaaaaaaccaaaaagcttattcccaatttttaagtaaaaatatttcatggccgggcgtggtggctcacacgcctgtaatcccagcacttcctgaggtgggtggatcacgaggtcaggagttcaagaccagcctgaccaatatggtgaaaccctgtctctactaaaaatacaaaaattagccaggtgtggtggtgcacgcctataatctcagctactcgggaggctgaagaaggagaattgcttgaacccgggaggtggaggttgcagtgagccaagatcgtgccactgcactacagcctgcacaacaggagcaagactccatctcaaaaaaaaaaaaagcgagcttattcccaatttttaagtaaaaatatttcatggttgggcacggtggctcacgcctgtaatcccagtactttgggaggccaaggcgggcagatcacgaggtcaggagttcaagaccagcctgaccaatatggtgaaaccctgtctctactaaaaatacaaaaattagccgggcgtggtggcacgcgcctgtagtcccagctacttggaggctgaggcaggagaatcgcctgaacctgggaggcggaggttgcagtgagccaagattgcgccactgcactccagcctggcaacagagtgagactctgtatcagaaaaaaaaaaaaaaaaaaaacatgattattgataatgaactctttataaataacactgttcacaaggaaataccaattgatctattgatacgtgacatgagacagaatgtactatttttaaatataaaaggaatttcattaggtttagataagctgagaatacacaaaagttttccaggctatttaatcaagtaacttacaatgtacacattcctgagtatacaccattgtggtgacatcatttattttggaattttctgcattcagcttaaaaggtgtttcttcccaagaaactgaacttttctgtcaaatgcacttgatcgaataggagaattgggttcataaaatggattcattgaaaactaggaaagaagaaagtattagtgaagcaaaaaagctgacaaatcttaagtttctgaaaggaaatcattttaaagttttaaattaaaaaccaaagacattccaaagtctaaagaccacatttttaagttttattgaaaatgctgcattgttaataacatcctcttaaggaaatttttattttggtgttttggttttgagaagtatctgtggcaaaactaatggcagtatgataaatgttgcctgtgtcagttaactttcagaatttaccgtgtgtgtgaaatactcatattcattataaataaatggattaatctctatggccctttggctacataaaacaaaaaaatctgccatgtgctcagagttcagaaaaagctattcttgtgtggtaatcttttaacaatcaggtttttaatactctcctttaacacaagactgctaaatgatcagcttctcaaattagtgtatcataacgcatgacagaaaatcattaaatggaatcactaatgaggaaaggcattgctgatttttataccttaatcacttgacattgttcatctttataagagggctaaatattacttactacctctgactaggaatactgttaaattgtattactgtgctgatatgcaagaaattctgtccaaatacagaacttatttaaattattaaaaacatatgggccaggcatggtggctcacgcctgtaatcccagcactttgggaggccaaggcgggtggatcacttgaggtcaggagtttgagaccagcctggccaacatggcaaaacctcgtctctactgaaaatacaaaaattagctgggtgtggtggtgcacacttgtggtcccagctacttgggaggctgaggcaggagaatcgcttgaacctggaaggcagaggttgcagtgagctgagatcacgccactgcactccagcctgggtgacagagcaagactgtctccaaaacaaaacatactattgttatcactgcagtgtaaccatgacgtcctattattattttatttttcaaaatcaagaaatgcaagtggcgccattcttcttgagtggctatttgatcatataaaaatcacttcctgccagtttatgatctctattgcactgtaacttatttgtaaagtagatggaaacattttagattaaattatgaagtaattttcccttatataggctgctttcttgctgtctttagggatccctaataaaatcagctatgaggacaacaaggtgaagaatgaaaccaatttaccttcacaatcatctaaaggtaactaccatgaagttgtgttcctaaatacatattcacctggctgtgaagacttacctgcggagggagttgccagagatagttctgatgggggaaagctagtctgaaaggtaaactgcagcctaagggagttacttcaataggccagtttcctgacaaaggtcgaatcctttctcatcagaatttaaaaattatagaacataccatacctttatatataaatcataaacatcagtaaagaagttctttattccatcttcttgtcttatgtcatgaagcataataaacctcatatgtgaaataattaaggcataatctttcttagaaatgaaaaacaaaaagcaaccagttcgttgatacagtattcttcaaattagtcacatgcagtgtatttgtgatggaaaagttgaatatataaactgggtttaaaattagcttagttttatcataaagagaacataagctttcaaagttagaaaataactgtaaaataaagtaaaatcacccttgatagggtccagataaactctttttgtgtatgagacttagttttaaaattagctattaaacaaaatgtttttcccccctaaaaaaagaaaagtagccccataaatggaaacttacattttcacctgactgtgaagtctacagactcagagcctggcatctatgttccatgttcttctggtttgtgagcccaaactttagttagttacctttactaagaaggtaaggatatgccccgcagtgacaaatgccgacacaaaccactcgttgaacttgtccacagttttcaagtacatgttgttcgatagccacatgttctcatctacgaggtcgagagcagcatgagctatgaactggttcagatgacgatggtcgtcctagatgacagtgtgagcaaccacagattaacatttgcatatggcatcgagaatgctgacatttcattctgtaaattctatagatggttttcttgtggggaaaaaacagtttgcttttatactttgttattgtcatgagacttataaaagatctgttttcatattatattctatttttaaatttgatatctacatctcaacagaaacagccaattaataaatgaaatgtgtatatagaggatttatacaaaatcatttattgaaaatctttttcatataaattttttttcatgtttcaagaaggaagttaccgaattctgtaaccatctaaacatgtaaaaaaaggatactatgttaaaaaaaaaaaaaaaaaaaaaaaaaaaaaacaagatcctgtggagaagaggtgccattcacactaggcctcaaggtctgggaggaaactgagagggcggggcttcctgcacagtggcaccaggtaagcagtagagacagttgaaatggcgcttataacggcctgccagaggcctctttccagtgcatggagcttacatgacagcgggacctaggagtagtgggaggtgatgctcagccccagctgtgagcagtcgcctgtgtcaatagcaggacacagtcctgtcagagctgggagtgtccttttcctgggctgaaatggcttaagtgaacagaaggtgggactgtctgaccataatgtgaagacggaattcagaacttggaatgcagtcttactccaatgtagttctttgaaaatacattttttggccaggcgcggtggcttatgcttgtaatcctagcactttgggaggctgaggcaggtggatcacctgaggtcaggagttcaagaccagcctgtccaatatggtgaaatcccatctctactaatacaaaaattggccggctgtggtggtgcatgcctgtaatcccagctactcgggaggctgaggcaggagaattgcttgaacctgggaggcggaggctgcagtgagccgagatcacgccattgcactccagcctgggggacaagagcaaaactccgtctcaaaaaaacccaagccatttttcaaagaatacctgttatgggttgaagtgtttcctctctaaaattcctttgttgaagtcctaagcaacagtacctcagaatgtggccttatatggaaagagggttgttgcagatgtggttagctaagatgaggtcacactggagtagggtgggcccctaatccaatggactggtgtatttagaaaaagggaacatttagagatgcacacagggagaaaaatgccacatgaagactggagttatgctgccacaagccaaggaactcccagaagctgggagagaggcctggacagacccttgtctttgtgccttcatagggagcatggccccactgacaccttgatttcagatggtggccctcagaactgagacaataaatttctgctgtcccaagccactcagtttttcgtactttgttacaacagccataggaaactgagacggcttccttgccaaggaggctgttctcatgcctgggctggaggagggcggcccgttgccgtggaatcccatgcatagttaaagcatgttttacttcactcatgttgccatgacaaagctaagtgaatccttagagaaatggatgtttttgtgtctggctcacagcagtgttttcttttacaatgatgatcaatcctgaagaattaggagcaaactgaaaacgctttaagaaagtgagtggtagcaggagaaagaactaaaatcaagttatgcaacaaagtatttttatgtgtgctttgtccaacacaagggcagtggagtgcacagaaattacatacaagtagctgcatcccacaaagcagtactggtacagagatacctcaaaaacaagttttaatgagtagtgttctcataatatgagaaaataatgtcacaactccacctcatagagaatcccgtaaacaaatgcctatcttattttggtggcaaggcctgaatagttgaaaaataccatatattatgcattacaattaacttaaaacatcaattccttaaaggacattaaagccaatttttggaggttgggagaaacatagcaaacttgtcagcaatttattagaaacagaaattggaaagaactgggctcttctcgtgtcaaaactctacaggtctgggccaggtgtagtggctcatgtctgcaatcccagcactttgggaggccgagggcaggcagaccacctgaggtcaggagttcgagaccagcctgggcaacatggcgaaaccctgtctctactaaaaatacaaaaattagcctggcacagtggtgcgcacctataatcccagctacctgggaggctaatacaggagaattgcttgaacccaggaggcagaagttgcagtgagctgagatcgtgtcactgcactccagtctgggcgacagagcaagactctgtctcaaaaagaataaataaataagatccaaatggttttattttaagcatttgggatggtaatctttcttaaaatatatggtccatttccttgtctcaaaaaaaaaaaatactctatgggtctgaatggcaatatgtcctcgagctaagcttggtttttggaaccattcttgacaagcaagttgggtggtatcacctctggtgctgcttttgagcttcctgtgtatggccaaggtgtcactggggaggggagcatacaggctcaacccagccaggaagtgctgcagaaggcccctgaagtgaggtgctgcagacccagtggcagcaggaagacagggaagtaagggtcttttctaacccagtaggtcctgatgaaaaacatgattcatgaaaacagcctggactttcatggtatttcaaggcggcaatccactacaggtgaactatgtctttatgtgcttaagcaacagcaattcatggtgggtgacatagtgaactgagtatgatgggaatgccagagcgtcatgctagtctgtgctgaactaaaggatgaataaacatctccaaggacataccctggctggcttctatcagtctgtgggctcctgagcaagcctcatttaattgtggtggatttcagttaccttatctgtccagatcttccagttctaaaatcatattataccatatcattacaatagcataaaaattcttacgtactttggattctgccttcccagctggcaaaaactccatttcaaaaactggattatcatggtggccaacaattacaaagtagaagctcccagacatggtcttcaatatatggctcct

SEQ ID NO: 5495 - DNA, 712 bp, Homo sapiens
ggcactatgtagtctgaactactaaccccgaagtgctttggtttgaaacttggccagttaggtggagaaagtggatgttgtgttgctgagcccttggcatttggcagccctgtagacttgaaccatgtcccagccaggctggatgactggcagactatacccttgggggacttgttaattccaggggaggatccgggtggagctccagccttatggggtcctagccctttgtgtgtatctgtctcccatgaggtcacctggctgccttgttggtgacttaagatgctctgtggattcctcaagagatgggctctgtctgcctctgcatgactcgtgatgagtggcggtgggacctggacccatctgctgatgatcaggtggtgttgcagcaaggttcctccagagctccagctctgcgtctgttacgggagctgtgaaggctgcacggtgctcatttcagatggttcttcctggctctctggctgcatccacagaagtctgatgaaacactgtgaaagccggcgtcaggtattgaaggcacctggctgagagcctcttttgctgcatgaagacctctggctgagtggggttcacaacacctcgtttttatttcccattcttgaagctgagctctggggctcaagcacttccagcaaagcagtttgactttctagcaagaggatgtggttgcattttcctttctcccttaaaa

SEQ ID NO: 5496 - DNA, 712 bp, Homo sapiens; identical to SEQ ID NO: 5495

SEQ ID NO: 5497 - DNA, 601 bp, Homo sapiens
aaaacttcactgttttctggcatcttcaggaatttttgctgttggagtgaggtgcagccttgtccaggggaaggatgttttggctaatgcttatttcagagcgcgtggaggtgggtctgggttgtaaaatctcttaacgatggactaaacatattttagttgaaaggcccaccaaggctcccaaataaaaacacatccgtaatcctgtttgtaggcatgggatacaggtgattttgccctcagtcttgttttaaaacactagcttgtcagaagagaacagtttttttcccccaatttttgttttgtacattgagaggtttattcccccctcccttcacccccaaatcactagagtttaaggaagcattgctgattgttccagatttatctgatcaggtttctgggatgtcctatggggcatggcatgctgtgaaatgtagccacacagctgtgtcgtctctggagcctccgcagccaccatgcccagaaatgagcctgagagccatctcgcctccagtctgaacagcgtgtgttagtttcccctctggttctccttagaaaagtccatcgggggttgatggcattgaggtagatgaattaa

SEQ ID NO: 5498 - DNA, 592 bp, Homo sapiens
  SITE (431): n equals a,t,g, or c
ttcaccgggatccagttattgtcgaggttataaaccccctgaccggaaagaatataggcaccgtgttcctgaacgtgtgtttcgatataaccgtggctggcacctggtgcaaaagagaggatatgcatgttcatatcaaaacctaactctttgggcagaaaatccagcagaataacatcgtccatgccttcataatgaatgcgttccagttcgctggcattgccagaaaccagccacggtgcatagccttctaccggaacatagcggcgcttatataaaaagatttggctgtcttcggcctgggcgttaacaaacgtcattaaggagcctggcgggcaataaagatagccaccttcgcttaaggcaaatgttttgccttcggctttggcagtgatatttccagagatcacatacaggaacgtttcaatgcntttcgccaccgaagccctgttggttgccaccgttttgatgcagtgtgaccagataatcaacaaagaggcacccagctttggcgtggagaggattgtccgccgttcacattttcaaagcccggaataataattttttaccagaccatccggggttaacagtg

SEQ ID NO: 5499 - DNA, 1759 bp, Homo sapiens
aggaactgggcttggcctcatcctgcttgactcagtctcttacagacacctggggctcttgatcctggcactgctggccctcctcaccctactgggtgttgttctggccctcacctgccggcgcccacagtcaggtaagctcacctggggtaacctgggaagtcagacctgcccagctcggagactagctgccccctcaccctcccctgtctgagctctcagcactgcacccaatctctgttacccaggcagggagcctcaggcccccaagtgagcaggaatggttaaggcaaggcaaagggccctctgagcatattgtcactgtactgagtctctgtacaaaaggctagtggggcagaaatccagcctgcgctgtactcgcccagcctggagccctgaccctctcttcagaaggggtgcctttatctaattagcccataagcaccctataggctagggctgttttcggtaccaacccccagagcaaataaggggcgggggcgggggcggagaggcgagcaccctacggtatcccgagagggtggggagaagagggctgagcagtctctcagccgcccagccttcatctgttgcttcccgccaccaggcccgggcccagcgcggccagtgctcctcctgcacgcggcggactcggaggcgcagcggcgcctggtgggagcgctggctgaactgctacgggcagcgctgggcggcgggcgcgacgtgatcgtggacctgtgggaggggaggcacgtggcgcgcgtgggcccgctgccgtggctctgggcggcgcggacgcgcgtagcgcgggagcagggcactgtgctgctgctgtggagcggcgccgaccttcgcccggtcagcggccccgacccccgcgccgcgcccctgctcgccctgctccacgctgccccgcgcccgctgctgctgctcgcttacttcagtcgcctctgcgccaagggcgacatccccccgccgctgcgcgccctgccgcgctaccgcctgctgcgcgacctgccgcgtctgctgcgggcgctggacgcgcggcctttcgcagaggccaccagctggggccgccttggggcgcggcagcgcaggcagagccgcctagagctgtgcagccggcttgaacgagaggccgcccgacttgcagacctaggttgagcagagctccaccgcagtcccgggtgtctgcggccgcaacgcaacggacactggctggaaccccggaatgagccttcgaccctgaaatccttggggtgcctcgaggacgactggccgaaaagccgcattccctgcctcacaggccggaagtcccagcccagtccccgcgcgcgtccctcttcctcctcatactttcccttgactgagagctcctctaacccctgttctgatgggggagggcggtcttcccacttcctctccagaactccagaaagagcagtgtgcttatgcttcagtccaggctggagaggttggggccggggtagggaggcaggagccatgtcagttctgaaggagggtgaggcggtgggggattgcagggggcggctgagagaaaacctccttgagggccagggattccctttcccactctgaggctctggccagagggagagaggactctggacctaggaaaagaggcttttggctccaggtggtcaggacagtgggggttgggggtggggtgggtgggtgctggcggtggggaccaagatccggaaagatgaataaagacaaacatgacaaactaagaaaa

SEQ ID NO: 5500 - DNA, 555 bp, Homo sapiens
gcaacggtcaatgactggaaacccggaataagccttcgcacctgaaatccatggggtgcatcgagatcgactggccgttaagccgctttccctgcctcacaggccggtagttccagcccagtccccgcgcgcgtccctcttcctcatcattctttccattggttgagagctcctataacccctgttctgatgggggagggcggtcttcccacttcctctccagaactccagaaagagcagtgtgcttatgcttcagtccaggctggagaggttggggccggggtagggaggcaggagccatgtcagttctgaaggagggtgaggcggtgggggattgcagggggcggctgagagaaaacctccttgagggccagggattccctttcccactctgaggctctggccagagggagagaggactctggacctaggaaaagaggcttttggctccaggtggtcaggacagtgggggttgggggtggggtgggtgggtgctggcggtggggaccaagatccggaaagatgaataaagacaaacatgacaaactaagaaaa

SEQ ID NO: 5501 - DNA, 867 bp, Homo sapiens
tcgccctgctccacgctgccccgcgcccgctgctgctgctcgcttacttcagtcgcctctgcgccaagggcgacatccccccgccgctgcgcgccctgccgcgctaccgcctgctgcgcgacctgccgcgtctgctgcgggcgctggacgcgcggcctttcgcagaggccaccagctggggccgccttggggcgcggcagcgcaggcagagccgcctagagctgtgcagccggctcgaacgagaggccgcccgacttgcagacctaggttgagcagagctccaccgcagtcccgggtgtctgcggccgcaacgcaacggacactggctggaaccccggaatgagccttcgaccctgaaatccttggggtgcctcgaggacgactggccgaaaagccgcattccctgcctcacaggccggaagtcccagcccagtccccgcgcgcgtccctcttcctcctcatactttcccttgactgagagctcctctaacccctgttctgatgggggagggcggtcttcccacttcctctccagaactccagaaagagcagtgtgcttatgcttcagtccaggctggagaggttggggccggggtagggaggcaggagccatgtcagttctgaaggagggtgaggcggtgggggattgcagggggcggctgagagaaaacctccttgggggccagggattccctttcccactctgaggctctggccagagggagagaggactctggacctaggaaaagaggcttttggctccaggtggtcaggacagtgggggttgggggtggggtgggtgggtgctggcggtggggaccaagatccggaaagatgaataaagacaaacatgacaaactaagaaaa

SEQ ID NO: 5502 - DNA, 534 bp, Homo sapiens
gcattgtatgagggctcccaagcagacaggtgatagcaacacagtatgaaagaccaagtcacgcttaagatggccacatgcagtgtctcacacttgtagtcccagctgaggtgggagaaccgtgtgagctcaggagtccaaggctgcaatgagctatgatcatgccacagcactccagcctgggtgacagcataagactctgactctaaaaaaaatgtttttaattaaaattctgtccaatttagtatgctttgtgcccaccctgtagcaggctctgggagatacaagaaaagtatataacacagttaaggagttcatagactaataatagctgttaccaataaatgaatatacattgtagtttatttaaaaagacattcatgtgcatatacccatttgatgctctcaataacccagtaaaataaagattattatcccccatataaaaatgaagaaagtaggccaggcgcagtggctcaagcctgtaattccagcattttgggaggctgaggagggcagatcacctgaggtcag

SEQ ID NO: 5503 - DNA, 3470 bp, Homo sapiens
actccgtgctggaagtaggaggagagtcaggactcccaggacagagagtgcacaaactacccagcacagccccctccgccccctctggaggctgaagagggattccagcccctgccacccacagacacgggctgactggggtgtctgccccccttgggggggggcagcacagggcctcaggcctgggtgccacctggcacctagaagatgcctgtgccctggttcttgctgtccttggcactgggccgaagcccagtggtcctttctctggagaggcttgtggggcctcaggacgctacccactgctctccggtgagtctggaaccctggggagacgaggaaaggctcagggttcagtttttggctcagcaaagccttagcctggctcctgtcactgctgccactgccagaactgccctgtctggtctgtctggtgctgatggtagaagagaagaacggggaaggggcaagagctgggtctgtctttctctgggagggtctgggaatacggagccccagaaaaaggtaggtggaggtcttaggcagagaacagtgcctagatggtgggggcacaaattctgactctcctttctttccttcccagggcctctcctgccgcctctggggtaagtatccctacttttaaaaagaatttcccaggttggccgaagggagcagagctgtcccaggcccatgccctccatgcccacctcagcctaggacagccaagttctttggctctctgggtatgtcaggtgccaccaaattctgggcttggaacagcttcagctcccacccgctcctccacacacagacagtgacatactctgcctgcctggggacatcgtgcctgctccgggccccgtgctggcgcctacgcacctgcagacagagctggtgctgaggtgccagaaggagaccgactgtgacctctgtctgcgtgtggctgtccacttggccgtgcatggtgagcaagtcatcctgtgacagtgcatgtgtacacgtgagtgtgtctggggtgggcatgagggccaggggatctctcaagcagtgctaggcatcctcagtgttctcctggaggacaccagcagaaggacccccaggccagtgtggtctccccagcccctgcttcccagcactgggctttccagaaggaagccaacgccaaagccagccagcccagagcagggggcctcacccagggccttgctcttgggtccttctagggcactgggaagagcctgaagatgaggaaaagtttggaggagcagctgacttaggggtggaggagcctaggaatggtgaggagaacctggctggcccaactgccccatgccaaggcctggcctgccgctcctgggcctgactgacccctgccctgttgcccacagcctctctccaggcccaagtcgtgctctccttccaggcctaccctactgcccgctgcgtcctgctggaggtgcaagtgcctgctgcccttgtgcagtttggtcagtctgtggtatgcaaaataataataatcaccttctaaacctaaaatctataaaactttttcacatgcattatctctttgaggattacaaaagaattaaatttattgaaacccttcagtaccaggcattacagccagtgttttacaggtatcaacttatttaattctcacaacagccatgtgaggtgggactattcttttgattctgatcagcgctgtgggcaagtcccttcagcctgttatgcctcagcttttatgtctgtaaaatggggatgagaatagttctacttcatatgcttgactgcgagaaatcaccaagcgtttttcagggtgcttctactattttcccctcctaccagcagtgtatgggagtcctagttgcttcccatctttgccaacacttgatggtgtaattttattttatttttaaattaaatatatttgaattttaaatatatgggaccctccatgaatttgcatgtcatcctcaggcacgggccttgctaatcttttctgtattgttccagttgtagtatatgtggtgccaaaacaagcataagtgttgtaattgtcataatttttctgcatatgtagtggtttgccattgtggttttaatttgtatcttccaatgactgatgaagttgagcacttttttcacatgcttattggctatttgtgtaacttccttgtgaaatatctcttaaagtttttttgtttttgtttttgtttttgtttttgccacataaaaaacaatagttctggccgggcacagtggttcacacctgtaatcccagcactttgggaggctgaggcgggcagatcacgaagtcaggagattgagaccatcctggctaacactgtgaaaccctgcctccactaaaaaaatacaaaaaattagccaggcatggtggtgggcgcctgtagacccagctactcgggaggcagaggcaggagaatggcgtgaacccgggaggtggagcttgcagtgagccgagatcgcgccactgcactccagcctgggcgacagagcgagattccgtctcaaaaaaaaagaatagtcccacctcacatgactgttgtgagaattaaattaagttggtacctgtaaaacactggatgtaatgcctggcactgaataatttcaataaatttaattcttttgtaatcctcaaaactacctgatgaggcattattagtatcctcattttccagatagataaaatgaggcttggagaggggaggtctgtgggctggatgcacttctctgtactcttggaccaaagaaagagtcctaccatacataccatggtatacttaccatggtgtaagtaccatggtgcagggtgttggggcttctccctgccttaggaggccacatgtacctggaaggtctatttccactggggtcaaatcactcaaaccctttgactttccctccaacctccagcccccagccaatatcctatctggagaattgtagactgggagaacatctgcttggtccatgtcacaagcagttgtaaggaacactgaggcactgggttgagtgtgagaaccacttctgtggggaggggtgtgccatattgtgttggggtgtctcatctccttagctttggccaggtgatctagcacagcagggtgggtgcagggatttaaatgtctagggcttttcccgccctggtgacactcttactgaggacatttgctttagaattgaggccccttgaaagaaaggtgaatagtagatttcaggctatacagtataaatacagtcattagttgggggaggagggcagtgagcagagtggtccctgcagatgatcccacagcccttggcctggattctgagccctgcaccgccagccttccccacccctctcctcacagggctctgtggtatatgactgcttcgaggctgccctagggagtgaggtacgaatctggtcctatactcagcccaggtacgagaaggaactc

SEQ ID NO: 5504 - DNA, 279 bp, Homo sapiens
ggccgggcgcggtggctcacgcctgtaatcccagcactttgggaggctgaggcaggcagatcacgaggtcaggagatcaagaccatcctggctaacacggtgaaaccccgtctctactaaaaatacaaaaaaattagccaggcgtggtggcaggcacctgtagtcccagctactggggaggctgaggcaggaaaatggcgtgaacccgggaggcggagcttgcagtgaggcgagatcgtgccactgcactccagcctgagtgacagagcaatgctctgt

SEQ ID NO: 5505 - DNA, 16491 bp, Homo sapiens
actccgtgctggaagtaggaggagagtcaggactcccaggacagagagtgcacaaactacccagcacagccccctccgccccctctggaggctgaagagggattccagcccctgccacccacagacacgggctgactggggtgtctgccccccttgggggggggcagcacagggcctcaggcctgggtgccacctggcacctagaagatgcctgtgccctggttcttgctgtccttggcactgggccgaagcccagtggtcctttctctggagaggcttgtggggcctcaggacgctacccactgctctccggtgagtctggaaccctggggagacgaggaaaggctcagggttcagtttttggctcagcaaagccttagcctggctcctgtcactgctgccactgccagaactgccctgtctggtctgtctggtgctgatggtagaagagaagaacggggaaggggcaagagctgggtctgtctttctctgggagggtctgggaatacggagccccagaaaaaggtaggtggaggtcttaggcagagaacagtgcctagatggtgggggcacaaattctgactctcctttctttccttcccagggcctctcctgccgcctctggggtaagtatccctacttttaaaaagaatttcccaggttggccgaagggagcagagctgtcccaggcccatgccctccatgcccacctcagcctaggacagccaagttctttggctctctgggtatgtcatgtgccaccaaattctgggcttggaacagcttcagctcccacccgctcctccacacacagacagtgacatactctgcctgcctggggacatcgtgcctgctccgggccccgtgctggcgcctacgcacctgcagacagagctggtgctgaggtgccagaaggagaccgactgtgacctctgtctgcgtgtggctgtccacttggccgtgcatggtgagcaagtcatcctgtgacagtgcatgtgtacacgtgagtgtgtctggggtgggcatgagggccaggggatctctcaagcagtgctaggcatcctcagtgttctcctggaggacaccagcagaaggacccccaggccagtgtggtctccccagcccctgcttcccagcactgggctttccagaaggaagccaacgccaaagccagccagcccagagcagggggcctcacccagggccttgctcttgggtccttctagggcactgggaagagcctgaagatgaggaaaagtttggaggagcagctgacttaggggtggaggagcctaggaatggtgaggagaacctggctggcccaactgccccatgccaaggcctggcctgccgctcctgggcctgactgacccctgccctgttgcccacagcctctctccaggcccaagtcgtgctctccttccaggcctaccctactgcccgctgcgtcctgctggaggtgcaagtgcctgctgcccttgtgcagtttggtcagtctgtggtatgcaaaataataataatcaccttctaaacctaaaatctataaaactttttcacatgcattatctctttgaggattacaaaagaattaaatttattgaaacccttcagtaccaggcattacagccagtgttttacaggtatcaacttatttaattctcacaacagccatgtgaggtgggactattcttttgattctgatcagcgctgtgggcaagtcccttcagcctgttatgcctcagcttttatgtctgtaaaatggggatgagaatagttctacttcatatgcttgactgcgagaaatcaccaagcgtttttcagggtgcttctactattttcccctcctaccagcagtgtatgggagtcctagttgcttcccatctttgccaacacttgatggtgtaattttattttatttttaaattaaatatatttgaattttaaatatatgggaccctccatgaatttgcatgtcatcctcaggcacgggccttgctaatcttttctgtattgttccagttgtagtatatgtggtgccaaaacaagcataagtgttgtaattgtcataatttttctgcatatgtagtggtttgccattgtggttttaatttgtatcttccaatgactgatgaagttgagcacttttttcacatgcttattggctatttgtgtaacttccttgtgaaatatctcttaaagtttttttgtttttgtttttgtttttgtttttgccacataaaaaacaatagttctggccgggcacagtggttcacacctgtaatcccagcactttgggaggctgaggcgggcagatcacgaagtcaggagattgagaccatcctggctaacactgtgaaaccctgcctccactaaaaaaatacaaaaaattagccaggcatggtggtgggcgcctgtagacccagctactcgggaggcagaggcaggagaatggcgtgaacccgggaggtggagcttgcagtgagccgagatcgcgccactgcactccagcctgggcgacagagcgagattccgtctcaaaaaaaaagaatagtcccacctcacatgactgttgtgagaattaaattaagttggtacctgtaaaacactggatgtaatgcctggcactgaataatttcaataaatttaattcttttgtaatcctcaaaactacctgatgaggcattattagtatcctcattttccagatagataaaatgaggcttggagaggggaggtctgtgggctggatgcacttctctgtactcttggaccaaagaaagagtcctaccatacataccatggtatacttaccatggtgtaagtaccatggtgcagggtgttggggcttctccctgccttaggaggccacatgtacctggaaggtctatttccactggggtcaaatcactcaaaccctttgactttccctccaacctccagcccccagccaatatcctatctggagaattgtagactgggagaacatctgcttggtccatgtcacaagcagttgtaaggaacactgaggcactgggttgagtgtgagaaccacttctgtggggaggggtgtgccatattgtgttggggtgtctcatctccttagctttggccaggtgatctagcacagcagggtgggtgcagggatttaaatgtctagggcttttcccgccctggtgacactcttactgaggacatttgctttagaattgaggccccttgaaagaaaggtgaatagtagatttcaggctatacagtataaatacagtcattagttgggggaggagggcagtgagcagagtggtccctgcagatgatcccacagcccttggcctggattctgagccctgcaccgccagccttccccacccctctcctcacagggctctgtggtatatgactgcttcgaggctgccctagggagtgaggtacgaatctggtcctatactcagcccaggtacgagaaggaactcaaccacacacagcagctgcctggtaagtggacccccaagtcctggccccctagcctctgtcccctctggccattccccctcctgatttcaccctcttctagctccatccactctccggcaggggtctgagctgctatcctccccagagtcagtccctcggaccttctctctctgggtgatatggctttccagcccctggggaaggttctttgagcattggatagatgtgggtggtatgtaggggatggggagccattcctaatgcccccctgggagccaaattgcccccacttctttccttggcccccagccccactggaggctcttctgtgatctctcctcagactgcagggggctcgaagtctggaacagcatcccgagctgctggggtaggggctagggccagtgggccgggggtagggaggggcagggtctggagtataagaaacccttggagtccacttcagatatgggctaccacatctcagaagctcacagaacatattcattcattcattcattcatttgttcataacacattaattgcagtatctgtgctaagcactggaaatagaaagatgaatcttgggtcaggctcagtggctcatgcctgtaatcccagaactttgggaggccgaggtagaaggatcacttgagctcaaaagttcaagacgagcctgggcaacatggcaaatccccgtctctaccaaaaatacaaaaattaacaggacatggtggtgtgcatttgtggtcccagctactcaggaggctgaggcaggagaatcacttgagcctgggaggcaggggctacagtaagctgagactgcaccattgcacaccagcctgggtgacagagcaagactccgtctcaaaaaacaaaacaaaacaaaacaaaaacaaaaaacttgaaataaaagctaagaaagtcaagggtctaacttttttcccacgtactatttggattttgttttcgttttgtattttcttttttattgtgtataacatacatacataaaagtatgtaaagggtactgattttcttttttttttcttttttgagacagagtctcgctctgtcgctcaggctggagtgcagtggtgcaatctcggctcactgcaagctccgcctcccaggttcacgccattctcctgcctcagcctcccgagtagctgggactacaggcacccgccaccacgcctggctaatttttttttttttttagtagagacagggtttcaccgtgttagccaggatggtcttgatctcctgaccttgtgatccgcctgcctcagcctcccaaagtgctgggattacaggcgtgagccaccacgcccagccaaagggtactgatttccatgtccagttctttttttttttttttttttttggcggaatcttgctctgtcgcctaggctggactgcagtggtgtgatctcagctcactgcaacctctgccttctgggttcaagcgattctcctgcctcagcctcccaagcagctgggattacagacgtgcaccaccacgcacagctaatttttgtatttttagtagacatggagtttcaccatgctggccaggctggtcttgaactcctgacctcgtgatcctcccacctcggcctcccaaagtgctgggattacaggcatgagccgccacgtccggccaatttgtttttatatatgtatacacttgcataactagcacccagatcaatacataaatactgtgaatacatcacatactgtgatgttttctgaactactaaatgttttcaacttcattttctttttgccttcttaaaattaaagttggcctgcctctttggcaactcattaaagactattcaacaccagagttttgaaaacacagatgtgtatatcatggatttcatttcttccttcattaagtagacattgattcatttattcaacagatatttattaatttctgtgtaccaggcaaatccctggacactggaaatattaataaatcaataaatgaagatgacaaaaaacccgaccccacggagctggtgtcagggtcagggtgggggtgaggaaggacacaacaaacacatggagatgtgaagaatgcagtaagttagacagtgattagcactaaggagaacatttgtggaagggctggggaaggttgggagttgtagaggtcaggggtggtctcattctggtgagcagagacctgaaagaggtgagggaggagccatatatttgagggaagagagaatagccagcaaaaagggcctggggtgggagtatgtcaggggtgtttaagaaatagtaaggagggggccgggcgcggtggctcacgcctgtaatcccagcactttgggaggccgaggctggcggatcacgaggtcaggagatcgagaccatcctggctaacacggtgaaaccccatctctacaaaaaatacaaaaaaatcagctgggcatggtggcaggcgcctgtagtcccagctactcgggagcctgaggcaggagaatggcttgaaccccatgaggcagagcttgcagtgagccgagatcacaccactgcactccagcctgggcgacagagccagactccatctcaaaaaaaaaaaaaggaaaaaaaaaagagagagaaacagtaaggaggtccttaataactctgcagcagagttattaaggacacaaatgccataggctgtgcgcgatggctcacgtctgcaatcccagcactttgggaagctgaggcaggaggattgcttgaggttaggagctcaagaccagcctggccaacatgagcgaaatcccatctctactaaaaatacaaaaactagccgggggtggtgacacacgcctgtaatcccagctactcgggtggctgaggcaagagaatcgcttgaacccaggaggtggaggttgcagtgagctatcgtgccaatgcactccagcctgggcaacagagcaagactccctctcaaaaaaaaaaaaggacacaagtatcaagaggtaaggtcagaaaggtcacagttctgaacagaggaaaatgacttgttttaaagaggttacaagatctttctgcagagggagaagcagggagaatagctcttctccgaccacacactagggtctccacgggcttggctttgggcagctgctaggagcaaagtctggtctgaaatgatgacacacgctctgccctccgagagcctcccagtctagggggtttgaaggaaactccaaagggtcagtcggggatgcagaagaggtgaggaagtctaagctgcgctctctttgcctctcccaccagccctgccctggctcaacgtgtcagcagatggtgacaacgtgcatctggttctgaatgtctctgaggagcagcacttcggcctctccctgtactggaatcaggtccagggccccccaaaaccccggtggcacaaaaacctggtgaggcctcccccttcccaagtccattcccactgtaggccgatgcctgtgcaaaggacgcagtgccatatcagagaggatccttgaagaggactcaccccaagcaagggaaaattggtgggggaacttctgccttcctggtttccttgactttggcctcctcctcttcctccttatcttctccaacctccttcctttatttgttccacagactggaccgcagatcattaccttgaaccacacagacctggttccctgcctctgtattcaggtaggagcagagtctagctgggtgccagaagaggagtgggaagatgatgatgggggtgatccctgccttcctggtctcaccattcttcaaacccttcattgaggtggagactgtggctccctggggtggctggccctcccttgacccttgctgtcctatgccttctgtctattacattccactgaatgctctccctgatcctccacagaactcctgcttattcttcatggccccattcaaatgtcaccttctccttgaaacctttccctactcctccagttctgtctttgtgttcccctggcgggcagagcatgtgctacgaacttggactggtttgaatcttggctcttgccatttgctagctgtgtaaccttgggcaagtcacttcacctctgtgagcctgtttctcatctgtaaaatgggaataataatagtaacagcctcatggggctgttataagaatgtgtgccacacccaggcttaaatatgctggctctttcctcttcctctgtacatttatttatttttttagacaaggtctcactctgttgcccaggctggagtgcagtggcacaatcatggcacactgcagcctcagccccatgggctcaagtgatcctcctgtctcagcctcccaagtagctggaactactggtgagcactaccatactcagctagtttttttttgttttgtgtagagacggggtcttgctatgttacccaggctgttctgaattcctgggcttatgctatcctcccacctcagcctcccaccaagtgctgggattataagcatgagccactgtggcttgccctgattgcactttttttttttttttttttaagacagagtctttctctgtcgcccaggctggagcaccgtggcgtgatctcggctcactgcaagctgcttctcctgggttcacgccattctcctgcctcagcctcctgagtagctgggactacaggtgcctgcaaccacgcccagctaattttttgtattttcagtaaagacagggtttcaccgtgttagccaggatggtctcgatctcctgaccttatgatccacaagcctcgtcctcccaaagtgctgggattacaggcatgacccactgtgcccagccgctgattgcacatttaattggtcatcaggtctcatccatcttacctctgacattaatgtctctcattttctttccccctcctctccatctcagtccagcttagggctctatcatctgttttctagactgtttcaacacctccaagctcccctcccttcccatcactttcctggcattctgggcccatattctgcccccaacggtgccttttcactctattttccccatgattccccttcatgagaacattgttacatccagtggagctacttaccaagatacagctagctccctgccttttctcaggtggttcccattacctcaaatgccctcacctccttcccaaagcttttccccaaccacccggcctctcctagctccaaatccccttgcacttctatctttccttgtccatttatcacttcatttcttttattttcttaaattttttttttttttttagagacagcattttgctctgtcacccatggtagagtgcagtggcatgaacacgtctcattgcagccccaagctcccaggttcaagggatcctcctgcctcagcctctgcagctgggactgcaggcatgcgccaccatgcctggctaattgtttcctttttttttttttttttttttaatggagtttcactcttttgcccaggatggagtgcagtggcgtgatctcggctcactgcaacttccgcctcccaggttcaagccattctcctgcctcagcctcccaagtagctgagattacaggcacacaccaccatgcccagctaatttttgtatttttagtagagacagggtttcaccatgttggtcaggctggtcccaaattcctgacctcgtgatccacccgcctcggccgcccaaagtgctgggattacaggcgtgagccactgtgcccagcctgttttcattttttaatgttttgtggcgatgggccaccacacccagctcaatcacttactttcttatttgggcatctaatttcttcttgtacacaacagatgctcaataaatattatgaaatgaatgagtgttttactaatttatataaatattttatccttactacaagtgtgagtttgtgatttccttgaaggcaagcaaatcatatctaattcaaatgtaatagctttgcaagagccttgcacatagcgcctacttgttttttgtttttttgtgtttttgttttttttttgtttttttgtcttttttgagacagagtctcgctctattggcaggctggagtacagtggcgtgatctcggctcactgcaatctctgcctcctggattcaagcaattcttctgcctcagcctcccaagtagctgggactacaagtgcatgccaccatgcccggctaatttttgtattttcagtagagacggggtttcagcatgttggccagatggtctcgatctcttgacctcgtgatccgcccaccttggcctcccaaagtgctgggattacaggggtgagccaccgcgcccagccttgttttgtttttaaacaaggtaacagtatgaggtcctcactgttgaatgagtgaataaatgttactgcctaacacagccataggacacagcagatgttcatgagatgtatgcatgtgatttaaatggcttcattgccaaacacagtgcctgccacatagtcggtgttcctaactaaaggcttgatggataaattaatgtattacctctagtgcttagcatagagctatgcacataataggcactcttgaaatgtctgttgaaagaataaatgaatgtgtccttagaacttagcacattccccaacacatagcaggtgcttacaaagtgattgtggaatgaattaaaattaattatccaccaggcacagtggctcacacctgtaatcccagcactttgggaggccaaggtgggtggatcacgaggtcaggagtttgagaccagcctggctaacatagtgaaacccagtctctactaaaagtacaaaaattagccaggcatggtgatgtgcgcctgtagtccctgctacttgggaagctgaggcaggagaatcacttgaacccaggaggcggaggttgtggtgagctgagatcacaccactgcactccagcctgggcaacagagtgagattccatctcaaaaaataaaaaaataataaaaatttaattatccaaggtctcttgtgcttgccatactgctaagacacaatggtaggcactcattaaaagtctgttgaatgggccaggcgcggtggctcacgcttgtaatcccaacactttgggaggctgagacgggtggatcacttgaggtcaggagttcgagaccagcctgatcaatgtggtgaaaccccatctctactaaaaatacaaaaattaaccagttagccggccgttgtggcatgttcctgtaatcgcagctcctcaggagactgagatgggagaatcgcttgaacctgggaggtggaggttgtagtgagccaagattgcaccactgcactccagcctgggcgacagagcgagactctatctcaaaaaaaaaaaaaagtttgttaatgaagatgttgccagtgcccagcattatgtttgctggaagaatagatgtgagcacctccaggttttgtaaaaggcaggaagacccagcaagtgtttgtgaaatacctgctgaatgagtgcatccccactgtccagcagagggccaggcacatgcccatggaggggacttgacaagacccccatttcctttccaggtgtggcatctggaacctgactccgttaggacgaacatctgccccttcagggaccctgagccgaccaggcctggggctggggttggggtgttgcgagcgatgggtacctggcatgcggtgactgtgccctttcattgcagatcaccgcagcacaccagaacacatctggcaacacgcccagactgcagactcgcatgacactgcagacgccggctgctgacagcaccgtgctcgctgcccgcagaagcggcactgtgctggcgggctccgggtggggacccctgccagccactggtcccaccgctttcctgggagaatgtcactgtggacgtaagtgaagcagagggcacctcccgtggtgaggggagagtggggaaccgggggtccccttttgtgatcccacccattcctctctttccacagaaggttctcgagttcccattgctgaaaggccaccctaacctctgtgttcaggtcagaaaggggtgcatagtgctgggctggaggctggacctgggcagaccccccagccaagggggtcttagttcttgggccgctaaagcatagtggttgccagcttcctctatgggagttccactgcttactttagtagtgcgcgggaccctgggcaactcacttcacctctctgaacgtcagtttcctcatctgtttaatgcagatgataatacagtaactacctcatggagtggttgtgacaatgaaataagagaagtgcttccccttaggaatcggtacagactaaatgctccataaatgtagccacttttattattgctatccttattctatttccatacctgtagaatgggttgctctacagtttcaaagggtgattataagaacattcactcatccggccaggcgcggtggctcacgcctgtaatcccagcactttgggaggccgaggagggcagatcacgaggtcaggacatcaagaccatcctggctaacatggtgaaaccccatctctactaaaaatacaaaaaattagccggtcgtggtggtgggcacctgtagtcccagctactaggaaggctggggcaggagaatggcgtgaacctgggaggctgagcttgcagtgagctgagagggcgccactgcactccagcctgggtgacagagtgagactgggcgacagagtgaaactccgtctcaaaaaaaaaaaaaattcactcattcaagattttttgagcagcacaagtcactgttttaggcacttgtgatagaccctaacatctctaccctcatagaacttatattgtaatggagaaaggcaggcaacagacattgtaaataaatcatatagtatcttaaaattgcatacaaataccatgggaaagggataaggtgggactggggttgcaatttttagcagggtggtcatgtgagaaaggaatctctttgagaaggttagatgagaggggaaccatgctccgtaagacataaaaacagctttagggtcagaagacgctttatacagatgatctcacaaggctggggcagagaaagatgtagtgattcctaatcacccagccttgaatccacatctgcctcaggtcagattgagtgcagattcccaacccaacaggccttctgttgcctgccccattctggtctttctgcctttggcttttgcttttcttagtggccctaaccatggtctcttcccagcaggtgaacagctcggagaagctgcagctgcaggagtgcttgtgggctggtgagttgggcctgggggcagctggggcagggccacctcctaggggtgaaggtcagggcatgggaggcaggcaagtggccaatcccagcaaggatgggtcttggtcagagtggcctctcaccccttccagactccctggggcctctcaaagacgatgtgctactgttggagacacgaggcccccaggacaacagatccctctgtgccttggaacccagtggctgtacttcactacccagcaaagcctccacggttaggactgggcgaccctcctccacagatctctccaaatgcatctcacatctggcctcaaattttcactccatccaccctgtgccggtctctgggaacatggggggtgactcagaccagggccatattcagcggcatcaccaaagtctcccagtcccctctacctcattctacccagctgtagcctggtaggtgctgccctaagggtgctacctccaggtaacagtgcccccatcctttggcttggcagagggcagctcgccttggagagtacttactacaagacctgcagtcaggccagtgtctgcaggtgagctggtggaagaagggccccacctcaatgcctaggggcaacaggcctaaaactagcactcacctactgtctatttaggcttattttatgttcagccctgggaaagttaagagtagaagaagcacagttcctatccccaaggagcacactgttggctagacacccataaacagataaccacacctacaggtgctaagttttgggttccagggagagcttccgggaagaatttcttcctataagccagatttggtatggaagaagtcataccctagtcagtgggcacagcacaaaggcagagcagctgcaggaaccttagccgggagatatgcatagttgatgctggaaatttggagatcaggccaccagagcttggtgaatattggaacacctggctggtgccctggatttggttctgtttgtatcttacagctatgggacgatgacttgggagcgctatgggcctgccccatggacaaatgtgagtattgtaagaactgcctttcctttctgtaccaggagtggggatcttgacagggaccactcttgggcacagcacatgcaatggccttgtccttccctgagatcagataaacagagggtcattccttcattcactcaaaaaatgatgagagcttgcagggatcgcaggaacaccaaaaatataaatccttgcccccgccccacccctagaagactagcaagacatgagccagtcacttacatttaaagtgggagctactgaagcaccaccaagtgttcagtgctgtaaatgcatacaatgtggacctgacctgggtggggtgaggggtgaggggctcagggggaaggttccagcaaaactctgaagactgagctaggggaagggggtagagatacagggtcttggacaggcaggtttctgtcatgagataaagatgcaggagacatgtaggggatttggatcttatgttgagagcagcaggagctacgatcaaatttttatatatttcacacacacatatatatatatatatacacttatttttttatttatttttgaggcagagtctcactctgttgcccaggctggagtgcaatggcgcgatctcggctaactgcaacctctgcctcccgggttcaagcaattctctacctcagcctcccgggtagctgggattaataggcgcctgccaccatgccctgctaatttttgtatttttagtagagatggggtttcaccatcttggccaggctggtcttgaactcctgacctcgtgatccgcccgcgtcggcctcccaaagtgctgggattatagtcgtgagtcaccgcacctggcccaaatttatatttttaaaagatctctgaggctgtcatgaatcaattcaaggcaaatcaattggaggtaaaaaaaaaaaaaaaaagacagggcagggacaccaggtagttgcagacacccaggacagcaagatcaagggcccagcaaccctagcttaggggagaaaaacagctgacattttagcacttaagatgctcggcattgtgttaagtatgtattaacacattgtgttaagctttatatgtattaatatatttagtcctcacaccaaccctatgacataggtacaactttacagaggagaaaactgaggcagagggtgacattacttattcaaagacccctaaacagatggagctatattcatccactggctctgacactgtgctgtggactctgggcaaatcatttcttcgttttttgttttgttttgttttgttttgagaggagtctcaccctgtcgcccaggctggagtgcaatggcgcgatctcggctcactgcaacctctgcctcccgagttcaagcgattctcttgcctcagcctcccgagtagctgggattacaggcgtgtgccaccacgcccggctaattttttgtatttttagtagagacggggtttcaccgtgttagccaggatggtcttgatgtcctgacctcgtgatctgcccgcctcggcctcccgaagtgctgggattatataaaggcatgagccaccgcacccggcccaattcatttctgttaagtctcagtttttcttctctgtggagggtaagtttctaactcttcttctctgggtctcccagacatccacaagcgctgggccctcgtgtggctggcctgcctactctttgccgctgcgctttccctcatcctccttctcaaaaaggatcacgcgaaaggtgagcgcttcccggctccccattcccctgggggaggaccagagtggctgtgggagttctccgagggaaagcggcggccgagctcactggctgcctccgcccctctcccctaacagggtggctgaggctcttgaaacaggacgtccgctcggggggtgagtgggagcaagcgctgggcggagggccgcccccggggagccaggcctgtgccagctcacctcttccctccccatctgttttctccggcagcggccgccaggggccgcgcggctctgctcctctactcagccgatgactcgggtttcgagcgcctggtgggcgccctggcgtcggccctgtgccagctgccgctgcgcgtggccgtagacctgtggagccgtcgtgaactgagcgcgcaggggcccgtggcttggtttcacgcgcagcggcgccagaccctgcaggagggcggcgtggtggtcttgctcttctctcccggtgcggtggcgctgtgcagcgagtggctacaggatggggtgtccgggcccggggcgcacggcccgcacgacgccttccgcgcctcgctcagctgcgtgctgcccgacttcttgcagggccgggcgcccggcagctacgtgggggcctgcttcgacaggctgctccacccggacgccgtacccgcccttttccgcaccgtgcccgtcttcacactgccctcccaactgccagacttcctgggggccctgcagcagcctcgcgccccgcgttccgggcggctccaagagagagcggagcaagtgtcccgggcccttcagccagccctggatagctacttccatcccccggggactcccgcgccgggacgcggggtgggaccaggggcgggacctggggcgggggacgggacttaaataaaggcagacgctgtttttctaccca

SEQ ID NO: 5506 - DNA, 3431 bp, Homo sapiens
actccgtgctggaagtaggaggagagtcaggactcccaggacagagagtgcacaaactacccagcacagccccctccgccccctctggaggctgaagagggattccagcccctgccacccacagacacgggctgactggggtgtctgccccccttgggggggggcagcacagggcctcaggcctgggtgccacctggcacctagaagatgcctgtgccctggttcttgctgtccttggcactgggccgaagcccagtggtcctttctctggagaggcttgtggggcctcaggacgctacccactgctctccggtgagtctggaaccctggggagacgaggaaaggctcagggttcagtttttggctcagcaaagccttagcctggctcctgtcactgctgccactgccagaactgccctgtctggtctgtctggtgctgatggtagaagagaagaacggggaaggggcaagagctgggtctgtctttctctgggagggtctgggaatacggagccccagaaaaaggtaggtggaggtcttaggcagagaacagtgcctagatggtgggggcacaaattctgactctcctttctttccttcccagggcctctcctgccgcctctggggtaagtatccctacttttaaaaagaatttcccaggttggccgaagggagcagagctgtcccaggcccatgccctccatgcccacctcagcctaggacagccaagttctttggctctctgggtatgtcaggtgccaccaaattctgggcttggaacagcttcagctcccacccgctcctccacacacagacagtgacatactctgcctgcctggggacatcgtgcctgctccgggccccgtgctggcgcctacgcacctgcagacagagctggtgctgaggtgccagaaggagaccgactgtgacctctgtctgcgtgtggctgtccacttggccgtgcatggtgagcaagtcatcctgtgacagtgcatgtgtacacgtgagtgtgtctggggtgggcatgagggccaggggatctctcaagcagtgctaggcatcctcagtgttctcctggaggacaccagcagaaggacccccaggccagtgtggtctccccagcccctgcttcccagcactgggctttccagaaggaagccaacgccaaagccagccagcccagagcagggggcctcacccagggccttgctcttgggtccttctagggcactgggaagagcctgaagatgaggaaaagtttggaggagcagctgactcaggggtggaggagcctaggaatggtgaggagaacctggctggcccaactgccccatgccaaggcctggcctgccgctcctgggcctgactgacccctgccctgttgcccacagcctctctccaggcccaagtcgtgctctccttccaggcctaccctactgcccgctgcgtcctgctggaggtgcaagtgcctgctgcccttgtgcagtttggtcagtctgtggtatgcaaaataataataatcaccttctaaacctaaaatctataaaactttttcacatgcattatctctttgaggattacaaaagaattaaatttattgaaacccttcagtaccaggcattacagccagtgttttacaggtatcaacttatttaattctcacaacagccatgtgaggtgggactattcttttgattctgatcagcgctgtgggcaagtcccttcagcctgttatgcctcagcttttatgtctgtaaaatggggatgagaatagttctacttcatatgcttgactgcgagaaatcaccaagcgtttttcagggtgcttctactattttcccctcctaccagcagtgtatgggagtcctagttgcttcccatctttgccaacacttgatggtgtaattttattttatttttaaattaaatatatttgaattttaaatatatgggaccctccatgaatttgcatgtcatcctcaggcacgggccttgctaatcttttctgtattgttccagttgtagtatatgtggtgccaaaacaagcataagtgttgtaattgtcataatttttctgcatatgtagtggtttgccattgtggttttaatttgtatcttccaatgactgatgaagttgagcacttttttcacatgcttattggctatttgtgtaacttccttgtgaaatatctcttaaagtttttttgtttttgtttttgtttttgtttttgccacataaaaaaacaatagttctggccgggcacagtggttcacacctgtaatcccagcactttgggaggctgaggcgggcagatcacgaagtcaggagattgagaccatcctggctaacactgtgaaaccctgcctccactaaaaaaatacaaaaaattagccaggcatggtggtgggcgcctgtagacccagctactcgggaggcagaggcaggagaatggcgtgaacccgggaggtggagcttgcagtgagccgagatcgcgccactgcactccagcctgggcgacagagcgagattccgtctcaaaaaaaaagaatagtcccacctcacatgactgttgtgagaattaaattaagttggtacctgtaaaacactggatgtaatgcctggcactgaataatttcaataaatttaattcttttgtaatcctcaaaactacctgatgaggcattattagtatcctcattttccagatagataaaatgaggcttggagaggggaggtctgtgggctggatgcacttctctgtactcttggaccaaagaaagagtcctaccatacataccatggtatacttaccatggtgtaagtaccatggtgcagggtgttggggcttctccctgccttaggaggccacatgtacctggaaggtctatttccactggggtcaaatcactcaaaccctttgactttccctccaacctccagcccccagccaatatcctatctggagaattgtagactgggagaacatctgcttggtccatgtcacaagcagttgtaaggaacactgaggcactgggttgagtgtgagaaccacttctgtggggaggggtgtgccatattgtgttggggtgtctcatctccttagctttggccaggtgatctagcacagcagggtgggtgcagggatttaaatgtctagggccttttcccgccctggtgacactcttactgaggacatttgctttagaattgaggccccttgaaagaaaggtgaatagtagatttcaggctatacagtataaatacagtcattagttgggggaggagggcagtgagcagagtggtccctgcagatgatcccacagcccttggcctggattctgagccctgcaccgccagccttcctcacccctctcctcacagggctctgtggtatatgactgcttcgaggctgccctagggagtgaggtac

SEQ ID NO: 5507 - DNA, 3591 bp, Homo sapiens
acttgaccctttcctcctaagctctaccctgacgctggctgtgtgtcccagagacttaatcagaagctggaagaagggctgtgacgtgtgtgacagcaggaactgctggtcaacccacagccggccagcctgccgggacgccatcttggccccaatcttggcagggagaggggagtgtatcggactctggggagagcagctgcctgcacgggcagggtcctcccgtctcaggattaacgttctcaactgtatttgatttctcctcagccagagggggtaaggtggccttcccagaagcacaggtgggccgcgtgtcagaggccctggacagcctgtgcctctcccaggcctcccagcaggggtggctctcgcccctctggaggggagaccccaggaaccggcccccgccctcagccatagcctcacagggtccttgtttctcggggcctggctctgtgggtgcacaaggcatggtcgggctcccgtccttctggaagtctccagagtggcatgtgggcagctgtgtgaagcggccccccagatcttcatccagcctggcctgcagcagctccctacgccctctgctacctcccctgcctacctttgggtagacgttctcttgacccttccttctgtgataaagcaaaagcgtgtgatctcttttctcaccaaggaataaaacgtctctgaataccacagacgtgatgccgggcttttgggggccggggggtgtcctagggccccgagggaggagccctgtgggtgccgaagtcgggccgcaggccctgcactgagatgtcccctcagcctaccccaggcggctgggcatgctgggaagtcctcccgggctgtgtgtgtgaatcatgctgtttcttctctattttctctctctgtctgtttatttttgttgtgtgtcactctgcccagccggccgtcctgtctcttccctccatgctccgcttcgcccgctgctggccagaggtgaccaggtccggctctcagcacggccgccggccggggggccatggggagctccgcctcctccctggccgcagagaccgagtcggaccacagcttccccgggggaccgccctacccgggtcccccggcagcggctggctggtgtaggagcggcccaggggggcccgtctggggaggtgccctggtcagccggcagcaccagcccccacggccccgggcccgaaggtaagaggtggggaggggtggccccggagggctcccgggggcagagggcctcgttctcagggtgccccctccttggcagaggtgcttgcagagaagtgggtccctgctccttccagttgtggcagctctcttccccagggtgcaggagctgagcaggtctgagaccccggcctcggcctggctggttggtggtggggatgggggctagtgcgcccaatcccggcggccctgtgtttctcacaggctgtgctgctccacgcagagaagctgttcctgaagcttctttttgggctggggtcgctggcggctgcaggctctgggcatattgcctgctgcccacggtttcaaagctgccagcactcgctgggctccgcctgctgcccccccgggggtcacaggccacatggcttggtggccgaactccacgtgctggctcctcacagctgtcaccatggccttggctacccgctgcgtccctcaggagctgccatcaggttctgaggtgcctggtctggaggcagtccaggtggtgaggtctggactggctggaccccaccgatgctcctgccgtcaccccgtcctggccctcactggaggcagggacactcaggggcccggggcctcggggccagtgctgcagtggccgccgttgctctcacagcgggtccaggcctggcttctgaaggcaatgtgcctgcgtctcacactcaaaagggcctgccaggctgcacctggcggcagctcccacgggggacgatgtcctgctgtctgttggcccccaggtgggagggacgggcgtggagctgcaggcagtgggcaaggccatggcaggtggccaggcctgggaaccagcctccaggtggcatccacgctgaggcctgagctccggccgacaaggactggggatgcaggggattagccaggggctgtgtgggggagccctggagccctgtctgcgagttaccccgatgaacagggagacgcggcagaggcagggccggggaggggccgtgtgggggagccctggagccctgtctgcgagttaccctgatggacagagagacgcggcaaaggcagggccggggaggggccgtgtggggcctggtggtcggcagaggaagggtctgtgctcctcctgcgtgtggtggcaccggagcgcctcccagttcctggtgttaccgcaccagccgcctcccagtgagcatctccacgtgtgccgacaacagctttgttgaggtagaacttaccagactcacctgttaaaagagtgcagtttggtcactcttagtggtttgtagagttgtgcagccgtcattgcaatccagcgttgcagcattccacagcccacagggacccccagccccacagtccagtgttacagcatcccgcagcccagagggaccctcagccccagacggccactgaccggcttcctgtcttggtttgccttgtgcagaaggtgcgtggatgtggggccacaggacgtggctggctgggtttgccttgtgcagaaggtgcgtggatgtggggccacaggacgtggctggctgggtttgccttgtgcagaaggtgcgtggatgtggggccacaggacgtggctggctgggtttgccttgtgcagaaggtgcgtggatgtggggccacaggacgtggctggctgggtttgccttgtgcagaaggtgcgtggacgtggggccacaggacgtggggccccgtgtctggcctcttcactcggcaccgtgccctccagattcatgcacctgcagcccgaggcagtttcattcactgctcctttgcgggatgaaccgcattttatctattcatggacgctaggactgcttccacgtggcttctgtggacaatgctgtgaacattgtttacgaggttttgcgtggacctgttttcatttatcttgcatagatacctaggagtgggattgctggggcgtgtggtgaactttcataatgtcttgaggaactgccaagccatcttccgcagcggctgcattacctagttcccaccggcaacgctggggagggtcctggcgtctccactccctcgacagctcctgccgttgtctgtccttgtgattctggccgtcccagggggtgggagctggtgtccccttggctttgatctgcgtttccctggtggccagccatgtggggcctctctccctgtctcatccacccgtgcctgtctttttttcattcattcacttatttatttatttagagacagggtcttactctgtcacccaggctggagtacagtggtgtgatcacagctcactgcagcttctacttcctgggttcaagagaacctcccatctcagcctcccaagtagctggaactacaggcgtgcaccaccatagctggttaatt

SEQ ID NO: 5508 - DNA, 334 bp, Homo sapiens
ccgcaatgcttcaaccctcccacgaccccagcaccttcagagaaaacggaccctcgtgccgagtgaagtggttcaggcgaacgttatcaccacacgggggactcggcggcttctgccccaggcctcaaaggagaggggatccagaattctctgtctcaccccctcagcccctgcccttgaagcttctgtccccaaggctgtggggaggaaccagggaagggctggcgcgtctgctgtgcgatcccaggtgctcgtgcctcgctgagctcagcccctgtggcctcagagctgcaggcccctcccgggtgtcagagcactgactggaaaggccccc

SEQ ID NO: 5509 - DNA, 307 bp, Homo sapiens
ggggtgcccccctaaagcaaatacagcttggattacaacactcaagtcctttcatatatatggaaagccttcccaagaaagatgagaaacaagccctgacagtgaagacgatgataaatacctaactcctcaatgcccagatacccaagaacatctactagcgttagcaccatccagaaaaacattacctcaccaaatgatttaaataagttaccagggaccaatccttaagaaacagagatgtgacctttcagacagaattcaaaatagtgaggaaactcagagaaattcaagataacaaagagaa

SEQ ID NO: 5510 - DNA, 116 bp, Homo sapiens
gctaaggtaggagaatcgcttgaacctgggaggcagaggttgctgtgagccaagatcgcgccactgcactccagcctgggcaacagagcaagactccatctcaaaaaaaaaaaaaa

SEQ ID NO: 5511 - DNA, 177 bp, Homo sapiens
ccccatctctactaaaaatacaaaaaattagctgggcgtggtggcaggcacctgtagtcccagctactcaggaggctaaggcaggagaatggtgtgaacccgggaggcggagcttgcagtgagccgagatcgcaccactgcactccagcctgggggacaaagggagactccatctca

SEQ ID NO: 5512 - DNA, 87 bp, Homo sapiens
gcagaatttgaaatgctcttgggtcatagggatgccctcttgagctttgtcactgccattagaactttatctagctttattttaggt

SEQ ID NO: 5513 - DNA, 430 bp, Homo sapiens
aggcttattaggaagaggaaattcccgcctaataaattttggtcagactggttgatctcaaaaccctgtctcctgataagatgtcaatgacaatggtgcccaaaacttcattagcaattttaatttcgccccggtcctatagtcctgtgatctcgccctgcctccacttgccttgtgatattctattaccttgtaaagtacttgatgtctgtgacccacacctattcgcacactccctctccttttgaaactccctaataaaaacttgctggtttttgcggtttgtggggcatcacggaacctaccgacatgtgatgtctcccctggatgcccagctttaaaatttctctcttttgtactttgtccctttatttctcaagctggccgatgcttaaggaaaatagaaaagaacctacgtgagtatcggggc

SEQ ID NO: 5514 - DNA, 836 bp, Homo sapiens
cactaggagcatttgctgtattctcccttttgtatattgggtctctggaagcctacagcgtggttagagctgactgaatattcttagatgtgtggcacatcctacgtgtggctgggtcctatggatagttttgcaggccatgatgtgcagtgtccctttagcagtcattaactcacagtgagttatcaatgggtgttagttctctgtgggtctgacaacttagtatagtgaaaagagtgctggcctgtggctgaacatgctggagaagagcttgcctggccacagggacacagccacgcagatccagcatgtgtctcccatgtgccaagtggagcccccagccaagaaggcagccacactagcagagggtgacaaggacaatgacattgacctgtttgtcagcgacaatgaggaggaagacaaggaggcagcccggctgtgggagaagtggctgaggtggtatgtggagaagaaggccaagaagactgcgttggtggtcaagtcctccatcccgctggacatcaagccttgggacaatgagaccaatatagcccaattggaggcctgtatgcgcttcatccagctggacgggctggtctaggggggcctccaagctggtgcccatgggctacggtatccggaagctgcagattcagtgtgtggtgggggacgacaaggtggggacaaactttctggaagaggagattaccaagtttgagagcgtgtgtagagtgtcgatgttgcagctttcaacaaggtctgaagccttagagtgtgtgtgcgtgcatgcgcacgtgtgcaagtgtgtgaggccctgccactattaaaaactgaga

SEQ ID NO: 5515 - DNA, 488 bp, Homo sapiens
ctttgttaaataactaattctcatttcaagaaacagctcttgacttgctatttagccctgggagagactggatgacttatcataggaaatcaggagacgtggaaactaggtgttatttgatttcaacaatccataaatacaggtgtgcctaggagcactccattttcaagtggacatagtatttatgaaatcaggcttcaggatgtcctgaaggcataagtcagtggttcacactcatggtgtatccactgcagaagtcttactcttacaggctatgttatgacctctccatctacagacttaaagtttggcgagaagtttgctatggccagttgaccaacaggacattttaagcctgacttacagatacttttatctaacctgctggcaccagacgtagactgctgcagcaagtagaactttaagcagttcttcctctgggccacttgctgagaagcagagaaaacctaaaataagaatttatatca

SEQ ID NO: 5516 - DNA, 205 bp, Homo sapiens
atcttggctcactgcaacctctgcctcctgggttcaagcgattctcctgcctcagcctccctagtagctgggactacaggtgcacaccaccacgcccagctacttcttgtatttttagtagtgacagggtttcaccatgttggccaggatggtctcgatctcttgacctcgtgatctgcctgcctcggcctcccaaagtgctggg

SEQ ID NO: 5517 - DNA, 315 bp, Homo sapiens
ggctgggcgcggtcgtcacgcctgtaatcccagcactttgggaggccaaggcgggcggatcacgaggtcaggagattaagaccatcctggctaacatggtgaaaccccgtctctactgaaaatacaaaaaaattagccgggcatagtggcgggcgcctgtagtcccagctactcaggaggctgaggcaggagaatggcgtgaacccgggaggcggagcttacagtgagccgagatcacgccactgcactccagcctgggtgacagagcgagactctgtctcaaaaaaaaaaaaaaaagaactataaaatacatac

SEQ ID NO: 5518 - DNA, 315 bp, Homo sapiens
gctttccaaatagcatgtttaactcagacaaattccagtttcacagaggatatgagaaggaaaaaaaatccacagcaagaatacaacaaagaaggattcattttacattcgttctgattaagaatatctttcagtttatgataaaatcaacgataatattgttaaaaactgacctaattactttcaaccagatactgtccaaacattaactttttccatcaaaagtatccctgatagttactttgtaaaatgaaagcacatttggcttccatttctgaggtggttaaaataaaggctaccgggttggataactta

SEQ ID NO: 5519 - DNA, 315 bp, Homo sapiens; identical to SEQ ID NO: 5518

SEQ ID NO: 5520 - DNA, 324 bp, Homo sapiens
tactcaaagaaatgctaaagaggccggccgcggtggctcacgcctgtaatcccagcactttgggaggccgaggcaggcggatcacgaggtcaggagatcgagaccatcctggctaacacggtgaaaccccgtctctactaaaaatacagaaaattagccgggtgtagtggcgggtgcctgtagtcccagctacttgggaggctaaggcaggagaatggcatgaacccgggaggcggagcttgcagtgagccacgatcgcgccactgcactccagcctgggcaacagagggagactccgtctcaaaaaaaaaaaaaaaaaaaatg

SEQ ID NO: 5521 - DNA, 148 bp, Homo sapiens
aggttcaagcaattctcctgcctcagcctcccgagtagctgggattacaggcatgtgccaccatgcccagctaattttgtatttttagtaaagacggggtttctccatgttgctcaggctggtctcgaactcctaacctcaggtgatc

SEQ ID NO: 5522 - DNA, 148 bp, Homo sapiens; identical to SEQ ID NO: 5521

SEQ ID NO: 5523 - DNA, 283 bp, Homo sapiens
ccggccgcggtggctcacgcctgtaatcccagcactttgggaggccgaggcaggcggatcacgaggtcaggagatcgagaccatcctggctaacacggtgaaaccccgtctctactaaaaatacagaaaattagccgggtgtagtggcgggtgcctgtagtcccagctacttgggagtctaaggcaggagaaatggcatgaacccgggaggcggagcttgcagtgagtccacgatcgcgcctactgcactccagcctggtgcaacagagggagactccgtctc

SEQ ID NO: 5524 - DNA, 554 bp, Homo sapiens
attttatttaaaaaaaaaaactgagatacagagggggaaaatgattttctgagggcattagagataaagccatagtcaaacagatcaaggccccagatccagagtcatttctaatacaccacacactgcctccaaagttttttcatttcaattgttaaattatctcagaaagaaaaaaataatacattaaaggatgcagtatgatcatatgatgagcttcttttctacgtaactttatattgctgttgtaaccttggttttaaaaaaagttaaagctctctctttcctgattattattagatttttgtgttcatgaatgttttgaaaaattaataactaagacactgaattgagatgttttaaacaaattttattaaatgaaatatttacagtccatccaaatggatatttgtaattaaaaaaaaatgcaacatttaaggaacctcaacaagtcttcaaaaaatttagtttgggtttgggctgaatatattactggatggcttttggcttaaaaattgctgtatgcagaagttggggagggaggctgaacaaaa

SEQ ID NO: 5525 - DNA, 920 bp, Homo sapiens
atccaacctcaaaacacagtttaatcagtctttccttcacccactcactaaacaatctatttcctaagggcctctttcatgggtggcttgttcaccgtttgtgttgacatattgttattgccaaagttcatctgtatcaagaagtctttcaaaaataagcatattccttgtcaggtcttctcattggttaacactaatacagaggaacccttggatctcaaacaaatgctttttaatgagtttgaaattcttctgaaaacagttatcttttccccttgaatgcaatgaatgaatcatccttgttatccatccagtcctgactatatttggagaaatacatgaaaattgtacaatttcctcagaaaactgggcattcataataaaaaggaatagtataacaggttgagtcattttatgagaatatgttattttgtgactcttaaatctttatttaaagaagtgcattgaatacaatatcaaatatagtcagttcataattacagtagaactacattttataatacatctttcacatggttctcaggaacacattcctctaccaaaactcaattgcactcacttttggacaagcctgtgctcaggaaaggagaaatggttgtttaccatcaactttatagaaactgtcaaactaactgaagaaaagttttgctccattaagaaaatgcacctccctcaggagatcgagaccatcctggctaccatggtgaaaccccatctctactaaaaataccaaaaattagccgggcgtggtgacaggcacctgtagtcccagctactcgggaggctgaggcaggagaaaggcgtgaacccgggaggcggagcttgcagtgagccgagatcgcaccactgcactccagcctgggcgacagagcaattctctatctcaaaaaaaaaaaaaa

SEQ ID NO: 5526 - DNA, 741 bp, Homo sapiens
gcggtggctcacgcctgtaatcccagcactttgggaggcctaggcgggccgatcacttgaggccaggatttgtgaccaacctgggcaacatggtgaaaccctgtctctactaaaaaaaaaaaaaatagctgggtgtggtggtgagcgcctataatctcagctactcaggaggctgaggcactcgcttgaatctgggaggtggaggttgcagtgagccgagattgtacgcattccagcttgggcagcagaacgagactctgtctcaaaaaaaaaaaaaaagccacgtaggaaattatccacagcatcaattggacttgatcttggctcagggaccaggcccggtgccttgatattggtagatttatttgccatcagactaatgagctggggacattgactgtttcctggcaactgagtcctctgattgtgtaaacaatttgcctgcaaacaaaacctgagtgcttgaaagggtaagtgatcctgatctgccatagaaaccttcatgcttagggagtttccctagctaattcctcagctaagattctccccaggagtttcactcacctgtttccagtgcctcctttgggctgtcagcatctgtgattccacattccccagagggagattcctccccaaagctggttgtatttactgccagtcctgggctgtagccagggcagtctttgaacacattatcaagaatactttttaaaataaaagtctgtttcgacttccactgtg

SEQ ID NO: 5527 - DNA, 252 bp, Homo sapiens
aaacgtttattgagatattttgcctttttttttttttttttttgcaacttcttccaggaaggcactaatttttaaaatagggtatttactggccgggcgcagtggctcacacctgtaatcccagcactttggataggccgaggtgggcggatcacgaggtcaagagattgggatcatcctggccaatatggtgaaaccttgtctctactaaaaacacaaaaattagctgggaatagtgatgtgcgcctgtag

SEQ ID NO: 5528 - DNA, 313 bp, Homo sapiens
gcagttcctacttttagacgcatggtggcgctagggtctcctccggccctgctagcaatctctaaggcacctccgccgccacctgcagtctcaaccaaacctctgggtgggcagcgcgggatgtgacgggccgagcgtccaatcgactgacagatttccgtccacactactgctctagccaatgggagccgaggagaggcgcggaggagcgcgggccccgcggcaagcctggcagaggcgcgaggccctcctcccgcctctccgcctactccagcctccgccgcctcagcttcccgagcgagccctgcggccg

SEQ ID NO: 5529 - DNA, 326 bp, Homo sapiens
gattttccccaccccaatgttgacatgtactactcgacgctgtcatattattgaggcataaaagatgttctaataaaatggaagtgacttaagagaaagttttatgcctcctcccaactctgaacagatgctgagaatataccaaacaagttcacacaggagtagagatttagagaggccttcccaccttcaagaattttataatacgttaatgagctgagtcttattttcaaggatggctttgttaaagcagaagaagggtaactatgcttatgaaaggcagttttgcatgcctgtttgtcaaaaaatacagtacaatttatttt

SEQ ID NO: 5530 - DNA, 23307 bp, Homo sapiens
gcagaatccaggggacggttgctgagcgggcctgggacagcgggtcgcggcacctccggcctgcgcgtgtctaatccgtctgtcgggtcccgaaagagctaagccgagcctgcgccggacgggtgggctggactgagaggtgggtgtgcggacctcgggggggatcctggtgctgccccaacgtgtccgggggtggaacccggatgtctagacaggagttctggaacgtccagacctgggagcccccacccatacgagaggtctaagccatgggataaagttatgagactgttgggggaagacgcccccggattcctaagagactccacgccccacaggggcgctagtctgtggcggcagaaaccctggggaagctgccacagaatcctgaggcccctcacaatgtccggcgaccccagactgtgtgacagggagattggagaagagcagcggcagggatcttcttataatcccatgggtgtcctagattaggcattagggtcagctgccccatagaagaacagacatggggggaatcagaatgtccgcagaacctaaggctggtgaccactggacagtcttgaagaggtttaacccagacagagtaactaggtaagaggcaaggatcctaacaggcagagattgggaggttgacacctctgagcctaccaggatgggagggggaacaagcagtgacttgaacaggctgggacccacacaccccaactgtgtggagcggtaaccctcaccccccacccatgcaccgtatggggtgacttcccaagtgactgttctgaagagagggaagggatgattgaaagatgaatcaacaggaggtggggggcaggcctggggccacacattagtcagtcaccatacattaactaagcatccacagtgtgccagaccagggcccctcaaattccagacagacattagttggggctacaggaggaaggagagatctgcgctgggaggctgggccaggatttaggggtccattttgatgggcagcactggggcaagatggggctcttgcctctgtcactgagagtgttccaggcccttgagggcactttggaagggagcttcggaagccggagatgacgaagattttgattacatccttctctgccctctaagtctttggcttcctccttgctcagtgacaaatccttggccctctccaatcttctcagtttgcctgaaatccaggggttgggcaggtcagcttctgaaagcccttccaggtggggaattgaattctgtatgaattggcaggaggtgctgggtgcctggacacctggcttcaggaggtctggacagcagagctggctccaagaatcggaagacacagtgtaccttcctatacctgggggaatgacagtggtggtggcagcaagaactacgggttcagcccacagccagaagctgagcctgcggagtgggtgggggctgggtaggccctgtggatgggtgggtggggcaggaaactggagactggagtgcaccccctggtggtaagcacagcttgggtgggtcttgccaggccctggcttctcaatccaggtccctgccctccctgttttgaggtttagacaggatgagagtccatcccaggccacacagcagactggcggccaagctggcagggctggaaccagagaccccctaccctgggtttggtgagttttccagcaaaccaccctagggcagagggcagcttccagccaggagccacattataggatgggacagtaatggacgctcctaggttagagagggaaagtaaggcacagagcctaagtgcctgtggtttctggaagccccagcatgcctgattcatgtctgtcccctgcagaattctctgagctggtgacaggtgccacaggcactggggatctcaccagaaaggaaccgacggagctaggggccagcgagatggcggacgaggccttagctgggctggatgagggagcccttcggaagctggtaagtggccccatcacccactgtggggacaggaaagccaagccagagaggcagggtcaatccagggtacctctcagctgacaggaagaagtgatgggggaaaggtcaggaggagggggacatgggaacaggggtaggccagttccatgtggctgatgcagaggcccttgtggcatgtgcctgtccatgcctggtactgaagcctagtccctcccaaccctccacagccaccacctgtttaaacagtaactgctgtagactcgcccgtatgcagccacaggtgtggggaggctggatatgcctctccagagcaatagctcgggcaatgcccacccctggaagctggcccagtgataatggtagcagcaatgattaataatgccaaggcctggcagggggcaggctgggtactgggtataccatgtcacagaataatcacagcagctctgaaagcctgggcactgcgactcaagagagttaaaatcacctgctcaaggacacccatctaagaaggagctgtgccaaaatcccaaccccatagtgggccacgggggaccagagtcctgggaaagtcaaggctggacgaggccataagagagagacaggttttgtgggcccttatggattctgtggcttctcatctcatttttctactcttgagtctcagttcctctacctgtaaaatgaagggagggagggagatgtgtttgcacacaagctctaggtcctagagttggcatggggacagaatgaggcatggacccagatctcaggtggaggaaagatgagcccactccatcccctttcttgttcctcttcctgagagccctgtctacctccatgcacagaggccgtagggcaacccagtggggcagggctccttccccaaccccaaaggccaggcagcctgacctggaggaggggccagaggagctccatctcctcagtccctgacccttgtccatgggggtaaattaaagatttactttacctagaagacaagtgacccaccccactctcataccttcccccgcaggcagaggctggaaccaaccagcgtagcccagccactgggcagtgcccagctgctgccatgacctccccaaggcactctgcctgtatgttctcggaccagcgcattagactctctgggtgtctgcctctccactatcaccgcaggatgtgtgcagcctggaggggatgaggttaggtttccaaaggtgcccgccagtcagttcgaccttccctcaggaagtccaagtcccagtgggggtcgtagaggcagcacagtccaaaaagagggaatgccaggcctggttcccgcacatcctcatctcaaggtatccacaggcaggctcagggttcttcagccgccacctccctctcttaagcgaggctcgggcggcgctggaaaagagttttggagagaagctggagcagtggttgaatctctgggaaaggacagatgagaacctgccccggtctcgggatcggtgcctctcgaagtctttccgaccccgggagcggctcctccagcacccggcgcccgccattactgcgccccgcgcgccggcccggcccccgctggcctcgtggcaagaacgggggcgtcccgagccgggctcctccccgcggggccgggccatataaggaaaagctaggcccgctccgcccgccctgcgccccagcgtctggccgatttggggacgcgggcagtcgcttccggccccggctcccgcacattcttgaggattgggccggggatgggaggaatggggacgcctggggacttgcacgccgcgtgcccctccaccacccgccgggacgccctctgcctcggtcccgagttcgagttcgacctccgccactcagctgggtgtcctggggaccttggtttcttccctttagatccggacactgaagcaggcggtagcgggtgtcttcctacctggctaccccttcggcgcctagcgcgaggcagggtgggcgaggcgagggcggcgccctgcgagggagggcggtcgcagaacctgcgggccttcagcgccccctggcgaggcttccctccaccgccggcgggacccccatgggcaaccgggggagctgggactgaaagcctggagagccccctccgttgtgctgttggggagactgaggcccagtgagacctcagggcctgccaggcgttcccaacagcgagggcagagagtacacggagagccggctccccagggggaggaagcaccctctttcctcccgggagaatttcactgggcagtttcggaaaccgccccatccccttccccttccccctcggtagacaatggcgctttgtacttccttccctccctcccacagctccctccttacacagcggtggggcctgggcgggtggaactcgggacacacagaggagacactgtggtccaacctttgcctccaggcccaaagggaagggtcgtgccagagggtgaccagtggaatgaggttgtcagtctccagccttgcccacccactttgggggatcagagggaggctcccattttccagatggggacactgaagctccgggggttgtgctgtagaggtggccaagttcctacatcaggcttttgtcagagacaaggaccccatctccgagcccagagcactgagaatggggacctaggagacaaaaggctagcccttgcccctctgggcctctttaccctctgtacagaaggggctggaccctctgtcccctccagcccccagcctccaaatgtaccacagaaggctctaggcctgagacacagccagcaccgggggctggggagtgagcctcattccccccgcctctgctataaggcctccttaggcctcagagcatctctagtccaggctagaggggtctccaacacagtgccaggatccctgaggtccccaccatgacacacagaccccagtagcagagctatcttcagcctagggcaggccctggagtcagagagacctgggttcaaatcctggctcaggtcatttgaccatgagcaaatcacatgtcctccctggacttcaatctcctcatctgtcaaatgggaataacagtagtatctagggtttttgtgggcttaggacaagtagggggctcagcacagggtttgactcacaggctctccataaatgttactgatgcctcggggtatcctgcccttcccatttgcccccttgtctctctccctcctcctgactggctagaaccaagtatgggggtgatgcttattgcaactgcagctatgtacaggagaggccaagtcactgttcccaaccccacccactggcaaatgaaaaaaccaagacacagagagtttaagggatatgctcttgatcacccagccaggattggactagggctggaaccaactaagggctctggcctgagtttcagggggtcttctcataattcctcaggaatgtggagcctggagggctcttcccccaagactctccctgctctcttcagactaggacaagctggctcatggctgagttgggccagcccacactccctgctgaaaactatctccatcccatccccacccttgccacctggccttcccgctaagcagaaaggaatgacgggggggcgctaaaaagggagatgatagagggttctttggccctacccctgaatgatttggggggtggggacagaggaaatcaccccgcctttactggctcccgtctggttatcagacccacactggaggcttatctctgccactatcttccaggggaaccctgggccagtcctctctcccttgagccacggaggatctgtatgtagcaggtggctctacatggtggaggtgtgggggaggcaacaggattggctgactcactccagagaaggtgttctttcctgaacctggttagaccagtcacccccaatttcccgggaactgaggggttgagaaccggtagaagcagctgtcacccagggatgccctctataaggccctggggtggcccctagtgccagccaccttatatgtctgggggattggtcctcccactctgcaccctggcttcttccatggtggctaggtccaggccagtgcagtggggacaatagccctcagccaggcaggactcctgagcacctgtcctcagtttccccatctgtggatgaagcagtcaacccccagctgggctgtggtgtttggtgactagaccagggagcctcccttgctcagagggtggacttcatctgtcacctttccctctagggaccctgttagtgacccacagggtggcctccctcctcctcctacaatagctccctgacttttggggatctgggctctgagaggcaggaatcgagttgtagaaaggagtgcctggcttggcacctggcacaagtgggcagtttctggctgtccactcacagttgtgtgctctgtgaaccacaatgcaaagtggactacccaagatccctgaaacagtgggctgggtctacccccgggaccctgcgtgggcaggcaggcacgtgaagagcttgggacacagggagtggacacaggccacacattgtgccctaggcagagccgtgggcagctggtgccagccctccgcccctggcagccaaaatgacctgcctctcgcacccactgcagctggaggtcacagcagatctggcagagcggcggcgcatccgctcagccatccgggaactgcagcggcaggagctggagcgcgaggaggaggccctggcatccaagcgtttccgtgccgagcggcaggacaacaaggagaactggctgcagtgagtagcggggggtggaacatgcgggtgagaaggtgagtgtgagccctggctcagctcatgtgtgcaggcaggcgtgagcacaagtgtatctgtggattgcatgtgctaatggcagtacgtccacacacgcttctggaaaaacagagatgtttgtgggcatggagcatgtactgattgtggcgtcgcggccgtgctgatgtagccagcacgtctgagtgtgtggtattagtgcccacgtccatgggcatatgtgtatcagtgtgcagttagagggtgtgcacagccacatgcccttctgccaaggttctgggtactctgttctggctcctacccttagcccacatcctccacgacctggccatggcagtggtggttacagtcatgatgtctctgcagctctcagcagcgggaagctgagcagcgggctgccctggcacggctggcagggcagctggagtccatgaacgatgtggaggaattgactgcactggtgaggcccaggctggggcaggggatgggggcagggcaggtgaagacctggactccacagcccaacacccgcgacctgtctcttacccacagttgcgaagcgctggtgagtatgaggagcgcaagctgatccgagctgccatccgccgtgtacgggctcaggagattgagggtatgtggcctgtcccggccccacccctgccctgctgtctgctgtccacagcacctccctgtcactcacctgccacttgctccttcccttccagctgccaccttggctgggaggttgtacagcgggcgtcccaacagtggctcaagagaggacagcaaggggctagcggcacacaggctggaacagtgtgaggtaaggagggtgggagagtggcccagtgtcctgtgcccatggataccggtagcacagagtgcctgagtgtctttgctaggctggtatttcactgtaaggggcccacccctgccatccagcctctatttagcagtcagagggatctcccagaaatgcaaatccggccctggcacctcccctgcttcaacccgtcccagggctgcccctcaccctccacacagcccacatctttaccttggcttatggggcctgcatgtcagaccccagctggctcacagttcactctattttccagagtgtgggtgagaggtcaggccatgcaggttccccaagtggccagcagaggccgctgggtccacggtcctggcaggaccccactcccactccagatgaaccaggctgaggccaggagtcaggaacctccactccagggatctattaaggctcccgtccccaataggtctcctgccatacccacccactgacatcaggacctggtcctctctgaacccctttggctaggtagtgccaagagattgggaagtggggatcagagactgcccttagcatgccagtgccagtgcttgcgcaggtgtgcctacaggaagccatgccccaccactctgctttgcatgccctgccctgggcacttgccagcctggccctcagtggtgggggtggcgttcaaagcctagggagccttggttgcatcctgtgggtcccttacaggtgccagagcgagaggaacaggaacagcaggcagaggtttcaaagccaacccccacccctgaaggcaccagccaggatgtgaccacagtgacactcctgctgcgagccccacctgggagcacatccagctcacctgcctcacccagcagttcacccacccctgcctctcctgagcctccattggagcctgccgaggcccagtgccttacagctgaggttccaggcagcccagagccaccccccagcccacccaagaccaccagccctgagcctcaggagtctccaacgctccccagcactgagggccaggtggtcaacaaggtgagtctggatgaggggcagggatgccaggcaagtgagcaggtctgggagtcaggccttgctcaggccctgttcttctcccttgcagcttctgtctggccccaaagagacccctgctgcccagagccccaccagaggcccctctgacaccaagagagcaggtgagggtcccagcaggggtagtcacaggcatctttcttcccctccccctgcctccctttccctgcctagaaaatgggctcttgtgcctggcagctctagcttcctcaggtccatgcagtccctgatactgcaccccacccctgaagtgtccccgcccccagctaggccagcctccccctccacccccatggctagaggcctcccctgcagccttgaaaggcaacgggcctcaggcacattcttctccccaataagggagtccacccatctcccagctggagctgtgggcagcactggccaggagggctgtcccccctccccatctgcagaaaggatctgggcacccttcctccagcctaagcctcgcctggcccccaggagtgtccaagtcatcctagggtcagtgtggcaggagaaggaggtgcctgtaggagagatgcagccgagtggggatgccggagtgtgggagatccaggaggggatggagaggtggggtgggggttgagtacaggaaagggtgggaagctagggaggtgtagaggagaggattatgaaaggtggacacccactatcccctgtcttttctctttccccacatggccatcaccccctccccaacctgccagacgtggctggaccccgaccctgccaacgctccctgtcggtgctcagcccccgccaaccagcccagaaccgaggtactacctattctcaccctgcctaggatctgtgcagaccctgtcccacccagttgctgacagccctcctgttccttctagagtccaccccccttgccagcggaccttcctcattccagcgggctggctctgtgcgggatcgtgtccacaagttcacatctgattctcctatggctgctaggctccaggatggcacaccccaggctgccctaagtcccctgacccccgcaaggctcctgggcccctccctcaccagcaccacccctgcctcctcctccagcggctcctcctctcggggccccagtgatacctcctcccggttcagcaaggagcaacgaggagtagcccagcccctggcccagcttcgaagctgcccccaggaggagggccccagggggcggggcttggctgctaggccccttgaaaacagagcaggggggcctgtggcacgttcagaggagcctggtgccccgctgcccgtggccgtcggcactgccgagccagggggcagtatgaagaccacattcaccatcgagatcaaggacggccgtggccaggcctccacaggccgggtgctgctgcccacaggcaaccagagggcaggtaggcgccccccactgcctccccaatggggatgagtgcctgcaaccgcacttctgcatgcaggacaggtgctgcggccaggactcagggtgtctccaaagggtgtgctgggagcgagggcattatcaaccttgtctggcactgccctcactccacctgatcctcctgacagccacctttctccccactcagaactgacactggggctgcgggcgcccccgaccctactcagcaccagtagtgggggcaagagcaccatcacccgtgtcaacagccctgggaccctggctcggctgggcagtgtcactcatgtcaccagcttcagccatgccccccccagtagccgaggaggctgcagcatcaaggtgagcccctcctcaccccaccagcctcaccatccgtcagcctcacatacactgcttcagggtgtagggctagcagggttcctctgctcctcccctactgcacacacagagaaaccgaggcccagagagggaaggtggctgctcacagaccacagccagtcggtggcagagctaaggccagaccctagcatatcagtccctaagtgtgtcggaagcttactctgtactggcgttaagcttcctggatgctgatctctgatccttagttcgaaattggttggttcattcctggtgaacagatggggaaactgaggctcagagagggtggtaagggcttgctcccctcttcctgtggcagccccagtgcccctgcgcccacccacactggacatcagccccgaggtatagagcagctcatctgctcatccaagatcagcctggcccattaggagattggagattagtgattagcatctgcgtcaacctccctgtgggggttgggcagaagctctgaggggggacagacaggcagaggggcgccaatcaggtgaggcagcagcctagcaggtgccttgggaactgaatacgcagcacccttccattattcattcccaagcccaggatccactagccgggagctcagccgggaaagggatccccaagcgggccacccggctgcccaggtaatgccctctgtgctaaaccagggactgaatgggactttggctgaggtgagatggctagaccagctttgggccttctcaggggagacagggagagagtgagggaaataaagcacccttcctttccaaaaaagcaggatccagctgccctctgacaagggattgtgtggggtggggtggggggacccgctgaggcccttgaggtggatgggaggtgccacagtgagacctgggtctgacaccaccaacttgcctcagtttacccatctggaaccaaaggggacaggtgatgtacccataatgtgcttgctcaaagtctgtggttggacgtgagcaccatgggcaggccagagggcatttatgtaagaccaagacactttttatagcagatcactcaaagtcctgcctccctgtgcctccatttcccccatctgttccagctgtctaaaacagctggagttagggtaaagggtaaaggagtacaggctgtggagtccagcagactgattctcacagctaatgtacatggtggctaggccaggtccattccctgttccctgcctcagtttccccacctgtgaggcatggggccccgatctcagtgatcttcagaacccatgcagtcttactgtgctgcaggcctatgatttctgtagggctatagccaggcctggcgatccgcctgcttgggcaggccccccctcccccactgccccttccacggaggagcccagaataggtttctatttgggctgcagctccagctggctggtggcgggctgggaggcaggggcggggcaggcccgctgcccttgcctttgccctcggaccagctgcaaagactcagacactcagccagagacagcagcccctgccactgccccaccattaccccccatagagtccccaccagcaccatgccgggggtaccagggcctgggcctgagctggccgcagcccttgaggagcagttgggccgggcactggaggagctgcgggcggtggctgaagcaggccgggtggcagtgacccaggcagccgaggtagctgtagccaccgtggagccggtggcccgggcagctgaagagctgcgggcagagagagcagcactgagccggcggctggatgcactgagcaggcaggtggaggtgctgagcctacggctgggggtcccacttgtgtccggccttgagcctgagctggagcccagcgagctgctcctggctgccgccgaccccgaggccctctttcaggctgccgaggatgccgggacccccgtggcccacccacctgccttcagcacccgccgccgctcctccaccggcaccacccgcagcactagtctcgtaagtgcttctgggttggtgggaggggtagttttgagccaggctctgcctcctcttgactttaggtatgtcaccaccttctctgagcctcagtttatctatcttgacaggggactggggcactagtgctctaagactagggcaagagggtgccaggctccagccctgaggcatgtgtggcagctgccttggcagcccctggcatgacccaggccccagcccccagctccctgccgccctgcaccctggccagaccaagcctccctgaaacagctgccacctcagctctccttacccttatagcagacggagaggccctgccaggagaggaagggccataatagttggcttggggccttgtcttcaaggggctagggagatgccctgggagggctgcagggctagagactccttagaggatggtttccagcaggggcgaggcagggggaggtggtacagaggagagcttcatagaggtcttggctcagggcagccccagtcagacacctggtcaggagcctacaggccccgggccagccctcttggcaaggtagcaggcagatggggggcaacatgtgctgcctgggcactggcccaggaggacctaggcctcgggaactggcagcacagagcagagcctgcctgggagggggctgggaacaaagcagcaaaatgaactaaggttcaggagttaggctgccttcagctcagatcccaggctgcatcacacttagagagagactgtgggcaagtcagttagctgccctgagcctcagtttccccttctgttttttttttttttttttccggtcttgttttctttgcaacagggtcttactctcttgcccagactggagtgcagctgcatgatcatagctctctgcagcctctaactcctgggctcaagtaatcctcctacctcagctttctgagtaggtgggactacaggtgcacaccaccatgcctagctaattttttatttttgtttttgtagagatgcggtctcgctatgttacccaggttggtctcaaactgctggcaacaagtgatccctcccacctcggcctcccaaactgttgacattacaggcatgagccactgcgcccggccttcccttctgttaaatagggacagtaaagtccctagtgtttatacaacacttactatggactggaaatcatcattattatcactatccattgtattaatacaattcggggtacgtgggaagccctacaacaaaactgtcagtgcctcttccctgactgacgctgacatggccatctttgggcaggcaggctggcaggctagtggttatttccaaggcgtgccagcaaccctaggatctgcttccctatccattggagacatgatgagtttcacccatacccctgcttaaagtccatgccctctccccaccctgcagatggaagcagagccagcagagcctctcgctgcagcagtggaagcggccaatggggctgagcagacccgagtgaacaaagcaccagaagggcggagccctctgagcgctgaggagctgatgactattgaggatgaaggagtcttggacaagatggtatagccagatccggtgggctgggggttggcagaggccagcaggcaccaggtaggcaatgatgggctctatatgcagctggatcagagcacggactttgaagagcggaagctcatccgggctgcacttcgtgagctccgacaaaggaagagaggtagagagccagttgccctaccctagatccagctgccccattccccagctgctcccctcatactctggggtccatttgtggacaccccagcttaataactgccctacccagcttctccttctctagacccagcagttcccttggctattccctgctggatccagctgctccttccctagctccttctctcccgctggtgaccccagttattctccccaaccagcttctcttctccttcctagacccagatactccctcccgcagctactctctccttggatccagttgcctctcaaagtactgtcaacgactccttccctgaatccagatactccttctccctgctgctcctctctccctgaagtccattgatggccatcttagcctctgccccatccagcttcccttttcctggacacaactacttcctcccccagatagttcttccctggacacatctattcattcccttagattctgggttcaattgcttctcctctcaaacactctcaattactcctctgaatctagctgcttctgccagggcccactgatggccaccccagtctctatctctacccacctacttctattttaagcccagttaacccccttcactagcttctctcccagctactcttcccctggatcagattgcttctcagatcccatcaattgctcccttcctggatctaaatattcctgcctccagctgctcttctcctccaaccaaagacctgctgatggcccacccagctacttcctcactcagcttctccttccttggactcagctaccccctcactagatctagatacccctcctgacttagctactcatgcctatagaaaccctttttggatccatacccctttgagtttagctactccgtattctctagtttctgcctgagtccatcaaacccttcccacactccattccctgtcaagttatggctgtcccctcaccccagctgctcctagagaggcccttgttacctgtgtcattcatgtttctaacaagccaccctccaccccgtcttgtgtgccccatgcacctgtgcatctgtgctgtgtgggtgttggtggcccttttgcgcatgcatggggcatcccctgcccagaccagcgggacaaggagcgggaacggcggctgcaggaggcacggggccggccaggggaggggcgcggcaacacagccactgagaccaccacgaggcacagccagcgggcagctgatggctctgctgtcagcactgttaccaagactgagcggctcgtccactccagtaaggggccaaatggggccggcccagggctcagggtgggaacacatcctcccccagccccctgtgcctttcacatccttctcatcccctgcccctgcagatgatggcacacggacggcccgcaccaccacagtggagtcgagtttcgtgaggcgctcggagagtaaggccacctggtgtcgccctgtgcctgcctgcctgtccgcccacctcctccggctcttccttgagctctctctccgtgtcttcaactgtgccgtcactttctcttctctgcctgcggctatcaccacccctccatacagcctcccatcccatctcctgatgtccagcccaggccctcacctggtgccccttccccttttttgcagatggcagtggcagcaccatgatgcaaaccaagaccttctcctcttcctcctcatccaagaagatgggcaggtgagcaccagcacccaatccctgaccatagaggagtcagtgccacaggggacctaactgcaaacccgttttacagaggggtgggctgggcacagtggctcttgcctgtaatcccagcactttgggaggccgaggtgggcggatcacttgaggtcaggagttcaagaccagcctggccaacatggtaaaacctcatctctactaaaaatacaaaaattagccgggcgtggtggcaggcacctgtaatcccaactactggggaggccgaggcacaagaatcacttgaacctgggaggcggaggttgcagtgagctgagatcactccactgcactccagtctgggcaacagagcgagactcagtctcaaaaataaatagataaataaataaataaataaataaataaataaataaaacagaggggtagactgggatgctgggaggtaataggtctatagccagggaggggcaaagtgagagttaaggatcctgctctccttgggatctcattttattctcaaccacaccacaggagaggtggatgctcagggaggccagtgagttgcttaggggctcacatctctgagtggctgcaatagcattgaacacttacagaggcctacctaccacactgagctgcctggtggcactgccacttcccagtatctgcaaaccatgtcccaggtcacacagcacctttataccttagccccatgagaaaggagggtacccccatgtaacagaggctgttggggctggcagaaagcaggaacaggatcagaatccaggatgagaaccaaaggggtccagagactctgaatcagagagaccttgttcaagttctagttccgcccatcacgtcctctgaaatcttaggcaagttactgccagaggtctcagtttcctcacctttagtggaattggtaaggcccctccctgctcttgtgaagtttaaaatggcacacaggaaaggatcaacagagatgaattattattattactattattatgctagtcatcatttttattatcggatagtgcccagaagctgaactcccctgtaacttgagggtacaatgaggcttctcagagaactactcgtgggtgggggagggggaggcggaaacctgttgaaaaccttgctgtcatttgagactcagtgtactcctctaaaatgcgtgtgatgaggacgcctccctccctggcaggcgtttgtggcagtggagatactagtgtgctacaagaccccccctcctcctcgcgagtggtggtccaggctggggagcagccctgctctccctgcctaacatgcgcctccccaacccctagcatcttcgaccgcgaggaccaggccagcccacgggccggcagcctggcggcgctcgagaaacggcaggccgagaagaagaaagagctgatgaaggcgcagagtctgcccaagacctcagcctcccaggcgcgcaaggccatgattgagaagctggagaaggagggcgcggccgggtgagctgcagaagtgggctgggcagtggggggcggggcgtgataggcagtggggggcggggcttgatagttggcccggcagaggcgggaagaccgcgcggctagatctgtggtgcaaaggcccgaaggtcatggaaggcggggcctgggatccactgggtgggcccaccgaggcatgccccttatagtcgtgtgacctggtcctgacaccgcccctacagcagccctggcggaccccgcgcagccgtgcagcgatccaccagcttcggggtccccaacgccaacagcatcaagcagatgctgctggactggtgtcgagccaagactcgcggctacgaggtgagccccgggaggccagggggcctggaggcctccccagaccccagctcaacacctccttcttagcagagctcctattacccagtacacttcctgccactgtgtggcctcacagggaacatggaaaggctcttggggtgaggaaactgaggctcaaagaggacacaaggcaagccctagattccagaatcagtgatgaagtaacagggcctcttgggtggtgggcagggttcaaggccggatcccactcttggagtcccctccttgttgctctgtaggaggccctgagtcaatttctctaaatgagggaaggagtgatgaggcatgaccatagccttagctgggtggcgctgggcctctcagtagctctgtcccttgaaattgcaaatatgggagttgacaggctgacttggaggaggctcatgttccaactattcactcattgtgcaagctacggggcctctttgtgcccagtgccctaggtctggaataacagaatgctgaggggtagacagcaggggggagttgcccccaggttcctgaccagtcctcctacggcttatagcacgtcgacatccagaacttctcctccagctggagtgatgggatggccttctgtgccctggtgcacaacttcttccctgaggccttcgactatgggcagcttagccctcagaaccgacgccagaacttcgaggtggccttctcatctgcggagtaagtgtgggccctggccctgctaatgttgctgcacatctggggctggacatcgggaccaggcccagttgccctgagaacccctggagcgggccagccacattgtcagtcagcggctgagacccccttccccagagagtccccgtccttctccatccccacccccccgctgctgagcgtgccaggtgcccgccggaacgaaggagccgcaggccggcctaccagcccgggccaaagcccaccaggtggccctgtccatatcccctccatcctccctctgcccccttctccctctctctccctttctctgtcctgctctcctcccactatcaccagagcttcctgctcccacgggatcccggctggagattccaaaaggaggctcctggcccgggcaccgtgcccgcccagcctatatagtgctgccagaggcttatataggacctcagcaagccctccactttggaatcgttgccccgtctgctcacctcaccctcagcacccttctccatctgtcttcccttctttccccttctctttctggtttccctcaaatttcttcctcctcctccttctcctcttcctcctccccccacctcctctcacgcctccctcaccccctctccccggggcacagccctcctctccaaccttggtgccaacgccatcgcccccaccccgcgttcccgcttgcccctagagttctctgcacctgtgactggtttggcccccacccttgtctgcattgcacaccattagtgatgggtagtgagcggcacgtccacagtggggaggaggcatgcggggggctggcagactgcagcactggaatcgtaattgaactcatgtctctgtgtgtgtgtgtgtatgtgtgtgtgtctctgtttcctcccctctctcttctctgcctcttccctctcttccccacccggggccctggcctcctgcccccgtcccccaccccttcccggccccctaccctccccaggacccatgcggactgcccgcagctcctggatacagaggacatggtgcggcttcgagagcctgactggaagtgcgtgtacacgtacatccaggaattctaccgctgtctggtccagaaggggctggtaaaaaccaaaaagtcctaacccctgctcggggccccacggtgagaaacgccgcctctaccacctgccccgtttcaccagaatctgctcagcaaggccagagagggtccagggaggcgggtgggggaagtaaggggggcatttagtcaagccagaggagccagacatagccctgtcttctggcagttcagggcccagcaggtgagaccattctaaatgggcagtgatgacccaggtgggcagcactgtgatgggggaagcccaggggagatgcctgacccaggctgcaggtctgggccccccatctgaaaaaagtgcaaactaagctgggatctgaacaagttcaggctaaaggagggagagggagttccaggcagaggaatcagcctaggcttagcagggcaagagagctggagagcacagcacatcaggaagggaagaaacttgagtctggatatgagggaggagggggccacagttagaagtttgaccttctggccgagcacggtggctcatgcctgtaatcccagcactttgggaggccaaggtgggcagatcacgaggtcatgagttcgagaccagcctgaccaacatggtgaaaccccatctctactaaaaatacaaaaattagccaggcgtgtggcgcacacctgtaatcctagcgactcaggaggctgaggtaggagaatcacttgaacccaggaggcgaaggttgcaatgagctgaaatcatgccactgcactccagcctgggtgacagagcgagactccatctcaaaaaaaaaaaaaaaaaaaaaaaagtttgaccttcctcctgaggacaacaggagttataaagggtttccaaacagagaagggatggatatagcattctaggaccttcctcggatgaggcttggatgagagatgggatggactagatgactggaatagcttaagagctagagagacaggcttcccaatagatctggtttggagagggagagggaaggtcaagaagtctgccaggctcctgtgtgggcactggggagttggtggtgccatactccaaagtggggagctcaggagcaggaccagttcaacaggaagatgtttctggctggggactctggatcctaagccagctgtggcatttcctctctggtcacctcacctcagtaccaaagtaaagaattcagatcctaaactaactaccccattacagacaaggagctcagagagagacgtgggctaagactgtcctgggggtgggagggagagggaagatggttaggtcagagctggggccagaaactgagactccaaactccccacttagtggctgttttccttgccccatcactgtgttcccgcccattttgtagagaggattgaaaatagaggcccagaaggagcaaggggattggctgaaggaatgtgagtcagtgacaggtaggggcacactcagatgcccctcagggcctggagccattgtggggggcagtccacatgtgcacacacacactcagagaaggagcacagatgagtggcggatgggcttggtgctatctccagatcatatatggacttaggagctgctgcccagcaagccagcttggagggagaggggcccagcccagccctgatccagttggaaagtgtgactcagccgtgctgttgctcaagttgcctggtgtttggcctgtcactggggcagcctgagccctgagccctgagccccagtgtaaacaatggctttataaggtctccagggaagggagtggggcgggagggagcaccaggttggagagggcggtcgggatccccaggacgatagccacagctggaagaagcttcagagagaggctgcctttgcatcatggtacagctcgggaaacaagcccagtctgggatagggatgaccctaggggcacgtggcacatcagcagcagacccagaaccctctcactcatcctaaattcttgtaaggtctcaaatgagatagagaataactgtcctgttctaaagagggggaaacagtcatagaaaagggccttatctagcacccacaactggttagggatacagtctggactaaaacagaggtgttcggtgttctgcctcccaggtttcttctctgaaggagtccaggtgagctgggggtaggcccagccctaccacagttctgagtttgtccataagggcacgagatgggaggtggtcttgggttctcaggtgtcttgagaataaggagcaattgttgccattatgccttccctgccataggaaactcattcagcaacattgaatgcttgctatgtcccaggtatggcagataggagggatcaaggcagaagaggtcttgctctgggggttgagggacaggggaaaaggagccagagagcagactccagcttcagagctctgggagctgtcagttgcttaataggcacaacccactcactccagagtggggaaaaggctttgccaacacccagaactgggggcctgggtcccatgcggcctagcctgcacttactaagccatggggcttgaaacaaatggctcctctgctctgtgactcagtttccttatctgtgaagggcagctagcattctgaaggatggccagaagggtggtccccccgagcatggcatagatggtccattggtattggctgggatcctcatctgcctcctctgctctacccaaggcaggtgataagggttagagaacccctctgctgcccacacgttccctggcctccatctccagcagcagggttatccccaccccctgtcaaagaataggggtccctgggcctctcaacaggaagtaccagatcaggcagctagcagacaatcatcggtggaccacagggccactagagtgagacctatccatagataaagattggccagtgatgaagcccatctgggtgcaaaggccgagctgagaggcttctaccaactggagtgtgccagtgagggtgagcagaaggtggtctccagggagaacatgggcagggtttggagccagcacctccccagggttggaggaagcagacccaggacctgcctgactgggatggggctctcttctgccatctccgcctccacctgcctagctctgctcccccgccccgagagatgcctccaggcttgggtagatgaagccaggggcttcctgccttcctggaaggcttttccctgtctggagtttatgaaagaccagcaggcaatgcggcaataaaaaagaccttggggtagaggggcgccacgagaggcgggtctggcgctgacatccaaccccgtgccccctccctgcaggatgctggtggactgtgtgcccctggtggaggtggacgacatgatgatcatgggcaagaagcctgaccccaagtgtgtcttcacctatgtgcagtcgctctacaaccacctgcgacgccacgaactgcgcctgcgcggcaagaatgtctagcctgcccgcccgcatggccagccagtggcaagctgccgcccccactctccgggcaccgtctcctgcctgtgcgtccgcccaccgctgccctgtctgttgcgacaccctcccccccacatacacacgcagcgttttgataaattattggttttcaacga

SEQ ID NO: 5531 - DNA, 2971 bp, Homo sapiens
tcagttaaggcaggagggaatttagtggagctggggaaggaagaaagtggggttgggagaacctccccaaccccatccctgctggcccggggacgggcatcggctctcagcaagagaagtattcccgggatgctgagcgcttcattctgtctccaggactcaggcaggtaggtcccagctccgccgcgcccccggacctacaggtcagcgtggtccgaagtttcctctgggggcttcgcgggcgcccacacgtactcggggggcacctgcgcgtcgggcgccgccttgcggtagaagccgagctcctgcactagcgcattgatctcttcgcgggtcatttcactgagtgggatgcgctgaggcggaggaggggcggggtcagcaggctgggcctcgcctctggcctcgcccccagcccacctcccacggcctcacctctagttcctcgtagcggcggcccagcagcacgagctcagggtcggccccagggaggtgtttcatcaccaggttgtgactggaggtggtgttaaggagcggggtggtgggcagagggaggtggtggtttccgcagccttactgatgggaacagcattgcctcctttgctcagagcttactctgtgcccgggaggggccagggtctccgcttatacgtgagaaaattagggttcaaagaagtaaagggccctcctctccattctgtggcagtcatcactagtcaatctctcttgcccacccaacatggagaccacctcagaatcctctgggagccactaccaatcaattcaacttgtcagttgaaaaccatctgccacccctttctgaagttacgtggagattctcccaggtgcccatcccatttcccctcccccagaacagaaggatactagaatggaatgtcctgcgtgacgaaagccttcacctggggaggaaccagagcatcagagaccatgacctcagtctactcgaggtacagacgagacactgaagcccagtgaggtcataaagcaagtcaggtgcaggctagactctcagcctaggctagactctcagcctagggatccttcccccctccccgccccagtcattgggaccatgttgcccactccccaagaggctcagggggaacagagctagggacctcttccttcaaactcacctcctttaggcggttcagctgtcatcccccgcaggtctggagggggataaaatgggataggtcaggagtccttcacgtttattccagtcacatccccaaagccatacttccttatccctgagttgggtcgggctgtgagttatccccggatcagcagttcccaaggtctgaaggaaatgctggacccttgtgggcagaagggggaactgtgtatacaggtggggagactcaggcctagagacaccaggggaaaagagcaaggccagagacccacagtgtgcctgccagccttggggcctgtacatcctactggctgtggactgactcccaatgcccaggggaaatgatcaccctgctcctcttaagcagtagagacctgggcttggcctttgatccctgaaatctcacagtggaggcagagcagaaggaaacacctcagaatggccctgggggcccccattggagacacctaccatctggtccctactctacacaggcagacctcaccctgcctgccacctgcggcccagccccacagaccatgtggttgcttccctgacatgggaggatgggagggctcctccctgccttccctgaggagatgccaccatccagcaggagtctagaccccaggaccacccactccagccctcctccatcctaccctcagcccttttcttagagacagggtctcactatgtcccccaagctggtcttgaactcctgggctcaagcaatcctcctgccttggcctcccaaagtgctgggattacaggcgtgcaccaccggcacccaaccattctacacccttttgtcagacagagctgacaaaaagctcagaggcgggctgtgatggtcaaagtcacatagcaagacagggactccgaacgggaatttcctggttgggggaggatgggaggctgctgcagagtaaatgttggcaaccaagttcccaactcggttgcccctccgagttggcccccttccccggatcctgcatatgggaggaggcacccagaaagtcttctttccccccaggagaaggaaaagagactttctggagcctccagccctggaaccgggtcgggggggaattccaggaaaacatgaagtgatgggggatgggaagttgggacaggattgggagtcataggccacgagaagagttaggagactgcgtcagtgtgtctgggtgtccgctgtcggaccgggtagggggagctggggaagggttcggagttccaggccccaaagtcggtgtctcaggcttccacggtggatgctggggccatctggggctagggaacaggagggatggtcccggcgccagggggaaagcagggagactcgcggttcgaggtggtcttggggccgggacggacggtgctcccatggggccgcagggttggggaacgatagtgccggggctggaggccggcgtactcacctctacccgggcgcgggttaggccgctcagacggttccagtccggccggtaggcagtggcggctgtggctggggccacaagcgccgcgagaagcagcagcagcgccagcggaggcaacaggaggctcatcgggacccggccgcagatgatgcgcaagctggaggcgaacctccgagtcgctgcgccacgtctgggcccccaggctggccccgcccccgcccccgcccccactcccgctagaggcccagtcccgctggagaccacgcccccagcgctcggtctccgccccaggactccccgccgttacctcccgctagctcagggcgaggtcctggctcctccctggcgtttgggccgtcactttccc

SEQ ID NO: 5532 - DNA, 401 bp, Homo sapiens
gttcatacctttatgcctttttttacacactgttcccattgcctggaatgcccttcttcattcggcaaagttccatttgttccttcaaaactcagatgagcgtccctgtcatcctggcattaactacctccttctctgtgctacccagctataccttgtacatacttttactgttacagctgtcacactatgttatagtcacatttctatctcccttatttgactgtaagcagagactgttctttaaggaagttactatcgtattcatctcgcttccccagttataacagagctatagtaagaaggcaccaaacataatgtgactttaagttgtatgatagtatgtaagtataaaaaaaaagtttaaaaaattctaaaatacacattatttgtaaaaaaaa

SEQ ID NO: 5533 - DNA, 7713 bp, Homo sapiens
agatgcaggagaatgatacacagtaactttaggactgcagcttaccactgaggagaaaggaaagaaggatgaagaagactttagctatattagcatttattttctttttaaaaaaatctgaaaaaattacaggaactacttactagttctcgctttgcttcttcaattttcacttgagcaagagacggattctttaaaaaaaaataaaacaaggaaaggttatattgcctcaattcagacccaaggagaaaaataatgccataatccttttcaaaaggcaaaaatcctcccagagggatacccaatgtacatataacactgaaatttaccactgactttaaacctttaaaaaccaacacattattttctttcttttttttttttttttgagacagagtctcactctgttgcccaggctggagtgcagtggctcaatctcagctcactgcagcctctgcctcctgggttcaagcgattctcctgcctgtctcctgagtagctgggattataagcgcccaccaccacgccctgctaatttttgtatttttagtagagacggggtttcaccatgttggtcaggctggtctcaaactcctgacctcgtgatctgcccgtctcggcctcccaaagtgctgggattacaggcataagccatcatgcccagcctttttttttgagatggagtcttgctctgttgagcaggctggagtgtggtggcacgatcttagctcactgaaatctctgcctcccaggttcaagtgattctccagcctcggcctcctgagtagctgggactacagttgcgcaccactgggtccagctaatttttgtatttttagtagagacggggtttcaccatattagccaagctggtctctaactcctgacctcaggtgatcagcctgccttgtcctcccaaagtgctgggattacaggcgtgagccaccgtgcctggcctaaacacactattttcatggtcatatagtaccctcagggaaggttggaggaaataattgttttttaattcgcgaaaattattaccggcattaagtctaaataggactccaattttttcttcaaaggtatagtctgttgctttaatcttgccagtttctgggggtaaaagaacacagtcacagagtaatagaaacattcacaatgcaactaatactgtccatttctgaaataaaacacaacaaagcattaacattagtatattttaaataacgttatcgaataaaaagcttcaaagatagacaaactcactccaaatggaaacaacacctgttagatgcttaaaataggaaagttatagtcttatttaattattattattataatttttttttgagatggagtctttctgtgttgcccaggctggagtgcagtggtacaatcatggcttacggtggcctcaaactcctcagctcaaccaatcttcccacttcagccttccaggtagctgggaccacaggcgtgcaccaccatgcctggctaattttttttttttttttttttgagatagagtcttgctctgtcacccaggctggagtgcagtggcacgatctcggcccactgcaacctccgccccctgagttcaagtgattcttctttctcctgcctcagcctcctgagtagctgggattacaggcatgtgccaccatgcctggctaatttttgtatttttagtagagatgaggtttcgccattttggccaggctggtctcaaactcttgggcttaagtaatcttcctgcctctgcctcccaaagtactgggattacaggtgtgagccaccatgcctggcctttgctcccatttattaacaataggattgaagtatgctgtcttagaatagaaaagaatgtgattaagaggaatcaaaacataaaggaggctgggtgtggtggcttacacttctaaccccagcactttgggaggccaaggtgggaggatcacttgagcccaggagtttgagaccagcttgggcaacatagcaagacccccatctctatttataaaaacaaggggaaaaaaatgtaaagggagaactagaatcccaaatacatatttatgaattgtcaacattagattccaagaacaaagtatgaaaaacgttaagaataataaaacaaaacaaaaccctctatttctctcttcccaccaaaacaggtaaaacctttatataacctaaaatcccagaattgcatttggtaactacaggagtttggagacctgcattttactgtctactgaaagagaagaaaggggagcacctagatgattagctcatggtccttcaataaatttgtttaataaatacatcaataatacataagtgactccagcggagtttctaacttataataaaaaggaaaccatgcaaatgtgagggcatatacagctaaacaaggaataaaagatataaataccagtgaatataaagtacaaaggtaaaggaaaagaaatcaggtccacagtgaataaaagccgaataaaaagaaacaaatgaaaaagcagactgtggagtaaaattttaaagaaagttaaattaggttaaaataagctcacctctgatagtgctactaaggactgatgagacagagaagcatccatgcctctggctgaaagttgctcctacaattaccaaaaaaaggagttcagttaaaaaattatttgaaaagtgaccaccatcaaatatttttctttttcttcttttttttttgagaccgagtcttgctctgtcacccaggctggagtgcagtggcgcgatctcggctctctgcaaactccgcctcccgggttcatgtcattctcctgcctcagcctcctgagtagctgggactacaggcgcccaccaccacgcccggctaattttttatatttttagtagagacggggtttcactgtgttagtcaggatggtctcgatctcctgacctcatgatccgcccaccttggcctcccaaagtgctggattacaggcgtgagccaccgtgcccagcccatcaaatatttttaacatataacacagtaaagaggagctacaagtataaatgaaaaactgtacatgtatctaagcatttgtacgttacatgtgaatcctttccacactcacgcatttgtgacaagatgggtgcagtgtgtaaggcctgagtttcagagcctggatgcctgagtttgaatctagatctgcttactgtaatagctatgtaatcttgggcaacttaccaacttctctatagtcctctcatctgtaaaaagggaataataatgcctagctgtgaggatgatggtaaaaaatcaggccgaagagagctaactatattcggtccttcatacaaacctctgcagccttgattccaaatctgaattcctctgactttgcttttagaaagtccatgttctgacgacgattatcaactttggccctttctgtagacagatgcaactctgctttcttgacatccctttaaaaagcaaaattaaaaacattttcttcttcttcttctcagtaaaagtattgtacaatagaaactctactacttttggattcaatgctggcttggccaagagttggtaaccaggtcatcttcccctccatgttgcactctgggttttttttttttttaagagatgaggtcttggtctgtcacccaggcttgaatgcagtggtgtgatcactgcagcctcaagctccttggctgaagtgatcctcccacttcagcctcccaaatagccagggctacagacacatgccactatgcctggctaatttttaaatcttttgtagatggccaggcacagtggcttacacctataatcccagcattttgggaggccaaggtgggcagatcacctgaggtcaggagttcgagaccagcctggccaacatggtgaaaccctgtctttactaaaaatacaaaaattagccaggcatggtggcatgcgcccataatcctggctactcaggaggctgaggcaggagaatcacttgaacctgggaggcagaggttgcaatgagctgagattgtaccactgcactccagtgtgggtggcagagtaagactccatctcaaataaaaaaaaataataaaataaataatttttttgtagagacagtctcactatgctgcccaggtttacaacaattttacaattaatgtaagccaattattcttgaagaaagtaaatcagccattcaaaaaaaaattggtgctcactttggcagctcatatactaaaattagaacgacacagagaaaattagagtggcctctactcaaggaagatgggtaaatttgtgaagtgttccacattttgttttgtggcttatctagaaataatatggaaaatattgctgttatttttggcaaagaaagtcaattttgtatagtttatttcaacctaaataaactgtgaattttgtttaaaaaataataataataataataatttaacatatctgaagccaatttgaaataggaggtcctaaatacctctgtactaaatgtgacatgaagttcgagaccagcctggccaacatggtgaaaccccgtctctgctaaaaatacaaagaaattagctgggtgtggtggcaggtgcctgtaatcccagctacttgaaaggctgaggcaggagaatcacttgaacccgggaagcggagggtacagtgagctgagatcgcgccattgcactctagcctgggtgacaagagagaaactctgtctcaacaaaataaataaataaaataagtaaataaataaataaaaataaacgtgacatgacagtgccttgcacatatgtagtcatttgttgaataaatttacataccgtcaaattacttgtgcatatatacacatactcctgatctataggccctaatctctggggcaaaaaggaacagaaaaaggcctaaagtatcataagagggataccctagctatagcaagaatgcacaacaaaacataatgtgactttaagtataagaaaaatcacatacattttgaaaattctaaaacccatattatttgtttttaagaaaaggcaggaggctgggtgcggtggctcatgcctgtaatcctagcattttgggaagccaaggcaggtggaccacttgaggtcaggagttcgagaccagcctggccaatatggtgaaaccctgtctctactgaaaacacaaaaatcagctgggcatggtggtgcacacctgtagtcccagctactggggaggctgaggcaggaaactcgcttgaacccgggaagtggaggttgcagtgagccaagactgcaccattgcactccagcctgggtgtctcagcgagactccatctcaaaaagaaaaaaaaataaggtaagaaattgtatgaagtaaaattgtatgaagtaaaagctgaaaaagtcaggccgggcgcagtggctcacgcctgtaatcccagcactttgggaggccgaggcgggcggatcacctgaggtcgggagttcgagaccagcctgaccaacatggagaaaccccgtctctactaaaaatacaaaattagctgggcatggtggctcatgcctgtaatcccagctactcgggaggctgaggcgggagaattgcttgaacccaggaggtggaggttgcagtgagctgagatcgtgccactgtactccagcctgggtgacagagtgagactccgtttcaaaaaaaaaaaaagctggaaaagtctatatccaaccatctccagctccactaatcattcaacttaaaaaaatgttttatggatcccatttcctaatgtttttaaaatcacacctactgccaaaactaaatttgacaatgtcctattactcccttatttataaattgtcaccactctgaactcaattacttactcttgtagacatttttctaatactaaagttgcagttaaatttttttcaagtttttccagttcaatcttgatttcttcacttttggatttggtacgaaagagatcagaggtcaaatcattcactgcagggataaaactaaaagaagaatctggtcatatacatgggcttaatgggcaataattataattactcctcattgctaaaaatgactttattgccctgtagatttttatataaccatgctgttcatacctttatgcctttttttacacactgttcccattgcctggaatgcccttcttcattcggcaaagttccatttgttccttcaaaactcagatgagcgtccctgtcatcctggcattaactacctccttctctgtgctacccagctataccttgtacatacttttactgttacagctgtcacactatgttatagtcacatttctatctcccttatttgactgtaagcagagactgttctttaaggaagttactatcgtattcatctcgcttccccagttataacagagctatagtaagaaggcacaaaacataatgtgactttaagttgtatgatagtatgtaagtataaaaaaaaagtttaaaaaattctaaaatacacattatttgtaaaaaaaaaaggcaagaaattatatgattcatccctgcttccccagtgcttatacaactaacatacaactggtatttgttatctgctgaacttatttaattcaagtctagatttctgctgccatacagtagggatgctcttatacctaaaacactactctttgagcttatacataaattgcctttaaattgacaggtaagctgttctgctgtgttgttctctgattatgataagttgtattaatattcgtagttctaccgggcgcagtggctcacgcctgtaatcccagcactttgggaggcagaggtgggtagatcacaaggtcaggagtttgagaccagcctggccagcatggtgaaaccctgtctctactaaaaatacaaaaaaaattagccaggcatggtggcaggcgcctgtaatcccagctatttgggaggctgaggtaggagaatcgctttaccccgggaggcggaggttgtagggagccgagatcacgccactgcactccagcctgggtgacagaatgagactctgtctcaaaaacaaaaactaaaacaaaatattagtagtcctagctaagatatggccaaaagtggtagtcatatgaactttataagactggttttgaatctcagctctgccatttagtagctcggataaattatttaacccacacctcctgattcctctaaaggttgttggaagaatcatgttattatataagtaaaatgcctgttaaaaagaatgaaaattcctgacctacttaacaaaaaggtagacataaccaaaatttattatgctcaaccaaatcatttagcctactatctttcttattatacacagggaacaatgtgatactaacccctttccaaatatacatgagaaccacccttcataaatctaatcctggaagaagaaaacactaaaaattaaccaataccatatttatccaaattaattatactcactggcaaagacatgaagtaactaaattcagtgctttgtatttattgccaatttttcatatagaattatgctgagaacaaaaagtctttaagaccttatagcagatatgattgcggaaattaaaactgtcataagaattacctagctagcgaggtatcctttgtttcaagggccaccgcactgtcaaccaaagcattcagatacctggaaccagtgctagagagattggcggggga

SEQ ID NO: 5534 - DNA, 6670 bp, Homo sapiens
cggcattaagtctaaataggactccaattttttcttcaaaggtatagtctgttgctttaatcttgccagtttctgggggtaaaagaacacagtcacagagtaatagaaacattcacaatgcaactaatactgtccatttctgaaataaaacacaacaaagcattaacattagtatattttaaataacgttatcgaataaaaagcttcaaagatagacaaactcactccaaatggaaacaacacctgttagatgcttaaaataggaaagttatagtcttatttaattattattattataatttttttttgagatggagtctttctgtgttgcccaggctggagtgcagtggtacaatcatggcttacggtggcctcaaactcctcagctcaaccaatcttcccacttcagccttccaggtagctgggaccacaggcgtgcaccaccatgcctggctaatttttttttttttttttgagatagagtcttgctctgtcacccaggctggagtgcagtggcacgatctcggcccactgcaacctccgccccctgagttcaagtgattcttctttctcctgcctcagcctcctgagtagctgggattacaggcatgtgccaccatgcctggctaatttttgtatttttagtagagatgaggtttcgccattttggccaggctggtctcaaactcttgggcttaagtaatcttcctgcctctgcctcccaaagtactgggattacaggtgtgagccaccatgcctggcctttgctcccatttattaacaataggattgaagtatgctgtcttagaatagaaaagaatgtgattaagaggaatcaaaacataaaggaggctgggtgtggtggcttacacttctaaccccagcactttgggaggccaaggtgggaggatcacttgagcccaggagtttgagaccagcttgggcaacatagcaagacccccatctctatttataaaaacaaggggaaaaaaatgtaaagggagaactagaatcccaaatacatatttatgaattgtcaacattagattccaagaacaaagtatgaaaaacgttaagaataataaaacaaaacaaaaccctctatttctctcttcccaccaaaacaggtaaaacctttatataacctaaaatcccagaattgcatttggtaactacaggagtttggagacctgcattttactgtctactgaaagagaagaaaggggagcacctagatgattagctcatggtccttcaataaatttgtttaataaatacatcaataatacataagtgactccagcggagtttctaacttataataaaaaggaaaccatgcaaatgtgagggcatatacagctaaacaaggaataaaagatataaataccagtgaatataaagtacaaaggtaaaggaaaagaaatcaggtccacagtgaataaaagccgaataaaaagaaacaaatgaaaaagcagactgtggagtaaaattttaaagaaagttaaattaggttaaaataagctcacctctgatagtgctactaaggactgatgagacagagaagcatccatgcctctggctgaaagttgctcctacaattaccaaaaaaaggagttcagttaaaaaattatttgaaaagtgaccaccatcaaatatttttctttttcttcttttttttttgagaccgagtcttgctctgtcacccaggctggagtgcagtggcgcgatctcggctctctgcaaactccgcctcccgggttcatgtcattctcctgcctcagcctcctgagtagctgggactacaggcgcccaccaccacgcccggctaattttttatatttttagtagagacggggtttcactgtgttagtcaggatggtctcgatctcctgacctcatgatccgcccaccttggcctcccaaagtgctggattacaggcgtgagccaccgtgcccagcccatcaaatatttttaacatataacacagtaaagaggagctacaagtataaatgaaaaactgtacatgtatctaagcatttgtacgttacatgtgaatcctttccacactcacgcatttgtgacaagatgggtgcagtgtgtaaggcctgagtttcagagcctggatgcctgagtttgaatctagatctgcttactgtaatagctatgtaatcttgggcaacttaccaacttctctatagtcctctcatctgtaaaaagggaataataatgcctagctgtgaggatgatggtaaaaaatcaggccgaagagagctaactatattcggtccttcatacaaacctctgcagccttgattccaaatctgaattcctctgactttgcttttagaaagtccatgttctgacgacgattatcaactttggccctttctgtagacagatgcaactctgctttcttgacatccctttaaaaagcaaaattaaaaacattttcttcttcttcttctcagtaaaagtattgtacaatagaaactctactacttttggattcaatgctggcttggccaagagttggtaaccaggtcatcttcccctccatgttgcactctgggttttttttttttttaagagatgaggtcttggtctgtcacccaggcttgaatgcagtggtgtgatcactgcagcctcaagctccttggctgaagtgatcctcccacttcagcctcccaaatagccagggctacagacacatgccactatgcctggctaatttttaaatcttttgtagatggccaggcacagtggcttacacctataatcccagcattttgggaggccaaggtgggcagatcacctgaggtcaggagttcgagaccagcctggccaacatggtgaaaccctgtctttactaaaaatacaaaaattagccaggcatggtggcatgcgcccataatcctggctactcaggaggctgaggcaggagaatcacttgaacctgggaggcagaggttgcaatgagctgagattgtaccactgcactccagtgtgggtggcagagtaagactccatctcaaataaaaaaaaataataaaataaataatttttttgtagagacagtctcactatgctgcccaggtttacaacaattttacaattaatgtaagccaattattcttgaagaaagtaaatcagccattcaaaaaaaaattggtgctcactttggcagctcatatactaaaattagaacgacacagagaaaattagagtggcctctactcaaggaagatgggtaaatttgtgaagtgttccacattttgttttgtggcttatctagaaataatatggaaaatattgctgttatttttggcaaagaaagtcaattttgtatagtttatttcaacctaaataaactgtgaattttgtttaaaaaataataataataataataatttaacatatctgaagccaatttgaaataggaggtcctaaatacctctgtactaaatgtgacatgaagttcgagaccagcctggccaacatggtgaaaccccgtctctgctaaaaatacaaagaaattagctgggtgtggtggcaggtgcctgtaatcccagctacttgaaaggctgaggcaggagaatcacttgaacccgggaagcggagggtacagtgagctgagatcgcgccattgcactctagcctgggtgacaagagagaaactctgtctcaacaaaataaataaataaaataagtaaataaataaataaaaataaacgtgacatgacagtgccttgcacatatgtagtcatttgttgaataaatttacataccgtcaaattacttgtgcatatatacacatactcctgatctataggccctaatctctggggcaaaaaggaacagaaaaaggcctaaagtatcataagagggataccctagctatagcaagaatgcacaacaaaacataatgtgactttaagtataagaaaaatcacatacattttgaaaattctaaaacccatattatttgtttttaagaaaaggcaggaggctgggtgcggtggctcatgcctgtaatcctagcattttgggaagccaaggcaggtggaccacttgaggtcaggagttcgagaccagcctggccaatatggtgaagacctgtctctactgaaaacacaaaaatcagctgggcatggtggtgcacacctgtagtcccagctactggggaggctgaggcaggaaactcgcttgaacccgggaagtggaggttgcagtgagccaagactgcaccattgcactccagcctgggtgtctcagcgagactccatctcaaaaagaaaaaaaaataaggtaagaaattgtatgaagtaaaattgtatgaagtaaaagctgaaaaagtcaggccgggcgcagtggctcacgcctgtaatcccagcactttgggaggccgaggcgggcggatcacctgaggtcgggagttcgagaccagcctgaccaacatggagaaaccccgtctctactaaaaatacaaaattagctgggcatggtggctcatgcctgtaatcccagctactcgggaggctgaggcgggagaattgcttgaacccaggaggtggaggttgcagtgagctgagatcgtgccactgtactccagcctgggtgacagagtgagactccgtttcaaaaaaaaaaaaagctggaaaagtctatatccaaccatctccagctccactaatcattcaacttaaaaaaatgttttatggatcccatttcctaatgtttttaaaatcacacctactgccaaaactaaatttgacaatgtcctattactcccttatttataaattgtcaccactctgaactcaattacttactcttgtagacatttttctaatactaaagttgcagttaaatttttttcaagtttttccagttcaatcttgatttcttcacttttggatttggtacgaaagagatcagaggtcaaatcattcactgcagggataaaactaaaagaagaatctggtcatatacatgggcttaatgggcaataattataattactcctcattgctaaaaatgactttattgccctgtagatttttatataaccatgctgttcatacctttatgcctttttttacacactgttcccattgcctggaatgcccttcttcattcggcaaagttccatttgttccttcaaaactcagatgagcgtccctgtcatcctggcattaactacctccttctctgtgctacccagctataccttgtacatacttttactgttacagctgtcacactatgttatagtcacatttctatctcccttatttgactgtaagcagagactgttctttaaggaagttactatcgtattcatctcgcttccccagttataacagagctatagtaagaaggcacaaaacataatgtgactttaagttgtatgatagtatgtaagtataaaaaaaaagtttaaaaaatgctaaaatacacattatttgtaaaaaaaaaaggcaagaaattatatgattcatccctgcttccccagtgcttatacaactaacatacaactggtatttgttatcctgctgaacttatttaattcaagtctagatttctgctgccatacagtagggatgctcttatacctaaaacactactctttgagcttatacataaattgcctttaaattgacaggtaagctgttctgctgtgttgttctctgattatgataagttgtattaatattcgtagttctaccgggcgcagtggctcacgcctgtaatcccagcactttgggaggcagaggtgggtagatcacaaggtcaggagtttgagaccagcctggccagcatggtgaaaccctgtctctactaaaaatacaaaaaaaattagccaggcatggtggcaggcgcctgtaatcccagctatttgggaggctgaggtaggagaatcgctttaccccgggaggcggaggttgtagggagccgagatcacgccactgcactccagcctgggtgacagaatgagactctgtctcaaaaacaaaaactaaaacaaaatattagtagtcctagctaagatatggccaaaagtggtagtcatatgaactttataagactggttttgaatctcagctctgccatttagtagctcggataaattatttaacccacacctcctgattcctctaaaggttgttggaagaatcatgttattatataagtaaaatgcctgttaaaaagaatgaaaattcctgacctacttaacaaaaaggtagacataaccaaaatttattatgctcaaccaaatcatttagcctactatctttcttattatacacagggaacaatgtgatactaacccctttccaaatatacatgagaaccacccttcataaatctaatcctggaagaagaaaacactaaaaattaaccaataccatatttatccaaattaattatactcactggcaaagacatgaagtaactaaattcagtgctttgtatttattgccaatttttcatatagaattatgctgagaacaaaaagtctttaagaccttatagcagatatgattgcggaaattaaaactgtcataagaattacctagctagcgaggtatcctttgtttcaagggccaccgcactgtcaaccaaagcattcagatacctggaaccagtgctagagagattggcggggga

SEQ ID NO: 5535 - DNA, 189 bp, Homo sapiens
tcacgcctgtaatcccagcactttgggaggccgaggcgggcggatcacctgaggtcgggagttcgagaccagcctgaccaacatggagaaaccccgtctctactaaaaatacaaaattagctgggcatggtggctcatgcctgtaatcccagctactcgggaggctgaggcgggagaattgcttgaacc

SEQ ID NO: 5536 - DNA, 87 bp, Homo sapiens
caccatgttggccaggctggtctcaaactcctgacctcgtgatccgcccactttggcctcccaaagtgctggaattacaagcgtaag

SEQ ID NO: 5537 - DNA, 87 bp, Homo sapiens; identical to SEQ ID NO: 5536

SEQ ID NO: 5538 - DNA, 108 bp, Homo sapiens
tttttttttttttttttttttttttgagacagagtctcactctgttgcccaggctggagtgcagtggctcaatctcagctcactgcagcctctgcctcctgggttcaa

SEQ ID NO: 5539 - DNA, 8736 bp, Homo sapiens
agaggacagggccctcaagcggggcttccaggaggtgagtgtgcgctcaggccgagggaggtggggcctccagcagtggccccaggctgctctgagcacctgtccttccaggtggatgagttgttccttgaggacttccaggccctcccccacgagctcttccaggagtttgactaccagccaattgctgccgccagcctggcacaggtgcacagagccaagctgcacgatggcaccagcgtggctgtgaaggtatatgggggctgccttgttcagcagtgggctggggcggggcacagtggggccccaagttctcaccacaccctcgcccagtgcaggtgcagtacatcgacctgcgggaccgctttgatggggacatccacaccctggagctcctgctgcggctcgttgaggtcatgcaccccagctttggcttcagctgggtcctccaggtacagccccaccccttccccggccagcaggagcaaacacgtatgcagagctggtaggagcagctggtaggcaaagctggtcttcaaccgccatctggcccccaggacctgaaggggaccctggcccaggagctggacttcgagaatgagggccgcaacgcagagcgctgtgcgcgggagctggcgcacttcccctacgtcgtggtgccccgcgtgcactgggacaagtccagcaaggtgggctgggccaggcccttggggtgggcacagcgctgggcctgctgagcccatcctcttgctctccccagcgcgtgctcactgccgacttctgcgccggctgcaaggtcaacgatgtggaggccatcaggagccaggggctggcagtgcattacttgagtgcgggggggcgggggcgggtcaggcgggctggtgctgtgtccactgcaatgcctctcctctccccagatagcaaaaaagctcatcaaggcctttgctgagcagatattttacaccggcttcatccactcggacccacatcctggcaacggtaggaatttaccccaggggtgggggtctcggggtgggcgcaacgcgacctaagaggctgtatccctagttctggtgcggaaaggcccggacgggaaagcggagctggtgctgctggaccacgggctctaccagttcctggaggaaaagtgagcgcgggtgggtgggcgtggggcagggcaagcctctcctgccgcagggagctcatggctgcgggcccatccacacccagggaccgcgcagccctctgccagctgtggcgggccatcatcctgcgggacgacgccgccatgagggcgcacgcagccgcactgggggtgcaaggtgagggggtgcaaggtgagggcgtgcggggatcgctggggcaccacagaagggagtcgggcggcgcagaacccactcagagccccctccctccctccctccctccttccccagattacctcctgttcgccgagatgctcatgcaccgccccgtgcgcctggggcagctgtggggttcgcacctactgagccgcgaagaggcggcctacatggtggacatggcccgcgagcgcttcgaggccgtcatggcggtgctcagggagctgccgcggcccatgctggtggtgctgcgcaacatcaacaccgtgcgtgctattaacgtggccttcggcgcccccgtggaccgctacttccttatggctaaaaggtcggtggcccgaggaggcgcccgggccgtggtggggctggtgtggggctgacgcggcgctaacgcgggtgtgtgcagggttgtccggggttggagccgcctggcgggcgccacgtatcggggtgtttacggcactagcctcctgcgccacgccaaggtcgtctgggagatgctcaagtttgaagtggcgctcaggtgagtggccgcggggcaggtgggtggcgggggcctgctccccacccacctgtgacctgtgacctgacccacgcaggctggagaccttggccatgcggctgaccgccctcctggctcgtgctttggtccacctgagcctcgtgcccccagcggaggagctctaccagtacctggagacctagggtgcagccgcccagggccggcggggcccttttcaccttgggctgacggaggtggcggggctagaggtgtagacaccccgagccccgtgggcactcgcactggggggctgtgacagcagctgggccaggaggccgtgtaatgaccacacactcctctcaagcaaaaaatgtttttccttgtgttttgtacaaaaagggggtgggaggtagttccgtgtgctggtggtgacggcatccacggggctagaaatgggcggtgacgcggtccgtctccagcaagtcgtccaggatctgcaggggatggaatggtgggtgggtgggtgggtggggatgcacacggaggggcggggcgcgcggggggcggggcgcgcactcactatgtctggtgtggtgccgatcttcttggctacctcgctgcgctccatggtgctcaggaacaggtagcggttgagcagctccccatccagcacgttgcgcacggcattctggagggtgcggcggtccacgtgcagcatcctggggcgtacaggcacaggtgtcagggcaggctggggtggagggggtgctgcacgcgggcggggccggggctcaccggaaggcgcgggggttgaggccggcgtggtgtggcagcatggtggtcagcgcgttctgcagcatcagcagccgccggtaggtcttctcctgcatgggcagcagcagcccgatgccgccgtccagggtggctggcaggggtagggtgagggttttggtgtgagccaggccaaccctagggccccccacccagacacacctgctcccccacactcaccaaaccacgtgatgtgcttattctcccacacgaccgactttttgctgagcccttcagtggccccccggcacggggtcctccaaaacgtgttcacgtgggcacccacgtggaagtctgcccgacgcagcaggcgcatgcccccgaaactctccttggctagaccagaaaggcctaggggtcactgctagcccagccccggcccaggcagagggggtggaagaagcactcaccttcgggcaggtacatgtacaccatgaggttgcggtcgcggtcagacactggggagcagaggcccagggtcagccccggccacccccagagcctcagctccccagggccctgcccacatacccagaaaacccagctgggcattgtccaccatgaagtccacgctgtacacctccaggggcttggcatcctgggggcgggaagggggcgtcagaggtgccttgggcgggtacccacccagacacgagcaccgccgccacaggtgtacccgcgacaccaggctcagcgtcttgctttcctcctggtagcgcagcagcgaaatgctcttcatgacgtcggctgccaggatgaagttcttgacgctgatcatctggtgtatgtagagctgcgtgtcgatgaaggccatgcccgtcagctcgctggcccgcaggctccacaggaaaatctgggggcgaaggcgatggtgagcgggcgcggacggggagccgggtgagggtgaaccgggggacacacgccgggtgggactggcacaccttctggccgatggccgacaccaggtggccattgcagtggcacagggcggtcacgggccccttctgctccttctcgtaaaggactttgaacttgttcttggtcaagggctggccaggctcgggcaccacctcaatcacatccatgatcaaaatctggagggcatgggtatggctgtgggatggctgtggggatggcagaggggctgccagttcccgcccccgctcactggccccttacccgccctcggcacgtgacctcctccccctgcatgaggcaggtcccggcggccacgtagcctttgaggcccgacacggtctcctcactgcgcagagacactgtcttcatgcaggtcacatgctcccactcctgcagctcgatcctgtgggggccaggggcctcaggatgctgcctggaggccttgggcagaccccacccccgccggcccagcctcacctggcattgggaatagcctcccagctgaccggggagatgagctggatggagaaggcctcctgctgggggtggatgtaccgctcatctgtggggaccaagggtgacagtcagagtagggcttccccaagatgcggctgaggatgggagtatggtgtgggcgtcaccacctctctcgatggtctcaaactccttctcctcgccagtcatgcgtgggatgcgggcacacggcgtgttggtgctggtggccacagcatacacctgtgggttagtgagggtcacacaccagtggcccggccaggcccaaaaggtccctggtggggtgggggtgggggcagaccttagactccacgtggtaagccacatagtgggccgtgcagcgcagcgggatcttcctgacaggccatggggcatcataggacaggtaggcaggcaggacactgatcctcagctcgccctggggtgggggcacaggggtcaggggatccagggctagccaagggcaggggcaggcaggcccaggccgccaagagccctgggatgttgccctcagctctgtgggagcaggggtgggtgaggggcagctgtgtcctggcgaggtcctggaaggggctgccactcagcctctggggctcctcctgtccattttcccacgctcagctggggctaggggtgctggccacaggggatgggaaagctaggccaggagggcactggaggctgcaaagggcagcccacagactgccatgctggggactgaaaaccaggcagagggagccagggctgccctctttcatggacagtcctgagtcctcaggcacccaggaagcactcaccgcatcccaggcagggtctcaagtgacctggtggtgtggtggcttaaatagggaaccaggatgagaaagcctgtgtgccctcccaaagtcacagagcagccaaggggcagagctagcactcacgtcagctctcctgagaagtgtggaggccaggccctgcgagggcttgcccggcgagccggcagagcagtggtggggaccccaggggatgcagccccagttcccaaccacccctttccagacctttggagcaaccaagtcacaggttccacttcgttgacctcaaccccatcgccctctggacactctttcctggtcctcagggtggagccaatggtcccttatcctgtcccttccccctcagcccccagctggggcagcatcagccagtgttgttgggaaccggccggaccccacctgtctgttgaagtacaggaagccgcggggacagttgacattgtggaatggagcgaaagagtcgaccgggctgtcgatggccatggggtgtagccgcagagcccctcggccggtcaccaagagccagtgaggggaggggccgcagatgaagacctgggggcaggcaccgtgaggatgctgtggatgaggatgctgcggatgaggccgcgtctcctttctaccacagacccctgcaaaggcgctggcctacccctgagtagccataaatatcctcgaagtagcggaaacgcgccaagaggccccgggccccagccccctcctctgcgccgccaccttctgctttcttcttggatggctttggcttcttctcacggaagttgatgttgtgagggacctgggggggaaccatgcaggtcctccaggggctgccggtctgaaacccacaccttgtaccacacccaccccacgccccagcagtccagccactggcaccttcttaaagcggactttgagattgccctggccgagctgagagtcgtgggggaaggcctcgtatataagcagctcttggtccacatgcacctggcaggatgaggggagccatgggggaacgggcagggccatggagaacatgggatgggccatgggaagaggtgggctgtgggtaaggggcggggctgagatggggtggagccatgtatgggaaggggcggggctgtgagggaaatggggtggagccacgggaaggggcggggccgtgggggagatggggtggagccacgggaaggggcggggctgtgggggaacgggcagggccagggggaagatgggaaggggaggccaggccaggcgcactcaccagcaggtagggcctgctctggcggctgcccagcgccaccagcagcacctccttgacgaggggcagctccccctggcgcgtggcctcctccctgcgggcctcgccctgtgtagtgggctgtccaaaggagctgtccacaaggacccgctgccccacagggaagttcttcaccaggaacaccagccgccagtcgggaagctggtagatctgcagggtgggcagcagtcagtggaggcaggtgggtggaacccgctgggccacagtgcagggcaccacctacctccatggtgccattctcccgcaccagcaggcaccagtgggtaggctctgcccggaagggtgcagggtcccggtcagcagggggctggctgcttcttcgggcctcctccttgctggggctgaaaaaggagcccgaatccccatacagcatctcctcctcttcatccactgtggggcggggggccagcagaaagttttgggcggcctgccagccccaaggactcaagcccctacctgcgcccccagcccccacgcacctagtctctgagcccaggccctcggcctccgggccactgcggcccccgagctcgtcacgggccccacccaggcggctctcagtggtgaacatgccgctgaggtctcggtacaggcacagcgtaatcaccttggactgctgtggggagaggggtgggctcagcggcgggcaaggggcagggacaggagggcgccgggaatgagggggcctacatggtgcagcgggggcttgtgcagcgccaggcggtggtggcggccaccgtatgagtcactcttcagcaggaacatggtgacgtggccctcggcactcatgatgaccacataggggtcggccacggcgcactgcacgatgggggcgcccaagtccacggggataaattgcagctgattcactgtaggcatggggcagtcagcatgcgcctcccccccaccgtccccacccacctacctccttccagcaggcggatgcccagggcccaaccacccccccaccaacctccttccagcaggcggatgcccagtggtgacacttggacaatgtagcggttgtccccgatgttcccagcaaagaccgtggggccctgagtggcgaagccactggtgtccagctccatgatctcctgccccgtctgcaggatctgcgggcgacagctgtgagggaggcgccccccgcaggggaccccagccccaggtcccaggtcccaggccctgcccctcaccatggtggagtcttcccggctcagaatcaggaatccgtgtctgcggccgtcgtcgtctgcttcaggggtggtgctgggttcctgctctgtgccctcccccttgggattgtcctcctgtcagggccaaaggggggcacggctggaagccacagtccagtgaaggcaggcacgcaggtgcgacctgggcacccccggcctatgagaaggcagcgccggtcccatcccagggcctccctgcagcaagctcgcacctacctcctccttacgcaccggggcgatgactgtccacatgtcatagcagccgggaagctcaaatgttgtcaccacctggggccggaagatctttttagaatgatgatggggtgggggtgtgatgggggtgtgagcccacccaggtcccaccaggaggcgcccgccccctacttgcccacacacctgcagcaccgacaaagccccgttcttcccgtggccggagcaaaccacaatctccaggtccggctcggggctgttctgaaactgcacaggactcgggggtgaggagtatgccccccaccccccctcacactccagcccatgcccccagccccgaccccaaccctgggcacctctttagagaggaaggcaggtttgcccacggcggcattggcacagggtccaatgttcaggatgctgtcacacacctgcggcacagcaagagtcaggggcccgctgggggcgctggctgggacgggggccctgctgcctcaatctcacctcaaaggagtaggtggccagctgtgttcccgactgggcctcgctgccgtacacttcaatctcgtccacctcatcctgcggcaccgacttacccgcagctgcacacagagagcccacttgagcgcagccctgggtcacctggccccgctcctgaccagccctggaccggccctcacctgaccagccggccgtcgcatccactcgcttcttctttgagggaggctcttcctgtgaggcaggaggggcactgagtggcatgccacagcagtgcccacatgaagggtggtggcccaatgggcccaggaaacccaccttgtcggcagcctcacggacagcactggccgggggctcctgcagcttctccgtgtacttgaggaggagggaattgcccaggcgagaacccaggaacaggtacccgggctccatggtgaccatctgagggagggcaggtgtgtgatggctgggccgggtctggacccagacccaacccctattcccaactcacgctggtggtgaggacgctggcggccgc

SEQ ID NO: 5540 - DNA, 355 bp, Homo sapiens
actttgagaccatgctcattggtagcctgtgaatgagtcatggtgatgacccagaatgactcatccaaggctgaagatctagccaaccagtctgtgtacaaggagaacaggtgaatattaaataagccaaaattgtaatatgaaagattaagcttacatataatgttacgtaagggataacaacactacgattggccaaaatatgcataaaatggaagaatttatttttagataattaaaatagggcaaatggaacagaagagggtatatgacctcaaattcctcccttctctaaatcagaatgctaattaagtctcagtgatgtctacctaatttttaaaatatatagaatttc

SEQ ID NO: 5541 - DNA, 3458 bp, Homo sapiens
cccgggcccagggcgccgcggtctgaactctgctcggctggaggactcggtgagtgggttcctctggggggaggcggggccagggcggagcttggggacaggggtggagcttgactgtggatgccagctagtagacctggagcgggaagaggtttaggggtgaggcctgaggatctgcccctgcctgggaagagggcgggacccaggtgctctagagagaggcggggagtcggagagttagaggagaggactgagggatcagcatgaccagccaaggggacaggcatggaaccttagtacataatggggctggtagtgaagtatcttaacagcagctgtgttggggacatgggcaagaaggcgtgagtgtcgaaggtcggggaacaggagtgcgacctaaggacttgggcctgatcggatcttggagaacaggggcggggccggtgcggacgcattagatcaagtacagccagcctcgtagggtccccacggccctggcaggctgactggagtaaatttttctgactagtctccgagctccgtcagaaatggggaacttgcagtcggagccatccgcgggcgggggctcccgaaaagtgcagccctcggaccgcgcccccgactcccgccggacgtccctggtggagcccgagatgacctcccaggccatgcgcctgactcgtgggctgggtgtctggttccctggcagcgccacacccccgggactcatggtaccccgggagccccaggcctcaccctcgaccctgcccctcaccttagaacggccctctccagtgatgccccctcctgaagaggcggccgcggtctctgcaccacccccggcccccgcggggactctgctgcccggcccgtctaaatggcaaaagcccgcgggcactccagttccccggatccgccgcctgctggaggcgagccatcgcggccagggcgaccctccgagcctccgcccgctgaagccgccgccgccgccccggcaactatccgtgaaggacactgtcccgagggccccatcccaatttccgccgcccctggagacttggaagccgccaccaccattaccttctgaacggcagccggcggaccgcagaatcactcctgctctggccacacccgcctcacccccgacagaaagccaggctgggccccgcaaccagggccagacggccggcagggctcgcggaggggcgcctccccatgcgggcgaaggcgaaatggcccagcctgcggattccgagtccggtctgagcctgctgtgtaaaatcaccttcaagtcgaggccctctttggcccctccggcagcctcgagttccttagcagccaaagcttcgctggggggcggcggaggcggcggcctctttgctgcctcaggtgccatctcttacgccgaggtcctgaagcaagggcccctgcctcctggagccgctcgccccttgggagaggtttctcgaggggcacaggaagccgagggaggtgatggagacggcgaagggtgctctggtcctccctcggcgcctgcgtcccaagcccgggccctaccgccgccaccctacaccaccttcccaggctcgaagcccaaattcgactgggttagcgctcccgacggccctgaacgccacttccgcttcaacggggctggcggaggcatcggggcgccgcgacggcgtgcggccgcactctctgggccttggggctcccctccgccaccaccagagcagatacactcagctcccgggccccggaggcccgcacctgccctgctggcgccgcctacgttcatcttcccagcacccaccaatggcgagcccatgcgcccggggcctccaggcctgcaggagttaccaccgctgccaccgcccacaccgccgcccacactgcagccaccagcgctccagccaacgccgctgccggtggctcccccgctcaccccgggtctgggccacaaggagtcagccctggctcccaccgcagcccctgctctgcccccagccttagccgccgaccaggccccggccccatccccggctccagctcccaccgtggctgagccctcgccgcctgtgtccgcgcccgcacccgcggctgcgcccatcaagacccgcacgcgcaggaacaagggttcccgtgcagcccggggcgcgacccgtaaggatggcttgcatggagatggtcctcgcgaacgagctacagctaccgtgcctgacagcagtggtggagggggtggtggcagcggggcctctcagactggggcagctaacacccgcgctgcgcgccactggctgcccttccaggtgcttaactcctgtccctgcaagtgttactgccaccaccagccacgccatcgccgcctgccacgcaacgtctctgcctggtgagaggggagaagggacaggagggtgccgaaccccagactgctggatagagtcctactcagccctttggcttcctgaccctagaatgacccgtggccttcatctctgccacatctcaaacctagctgagctcccacccttcaggaccaagaggacccatgatcccatgctgacctttgacggggaaagggggacaccctggcccagccctatggcatccaatccctaagtggactcttggccctcctgtacctctcttggagccattagagagggaggctggtcccagctggcctgaccctatacactgccttgaccctgtccctgagggtatcaaggaggaccacgtccgaggccactcagggatgggggtgaggggatgactgtcttcctggaactaaatgggggtagatgcacgcctccaactttactgggcacaggggcagccctggactcctgacccctctagcctctgaggacttctcctgactctgggactcaaggcttcagccgccagagggcactgatgtcccagcccttgtgctggggaggctcctcctgagtcccacatccagggggacaatgcatcctccagccaccccctacccacactgaatcaccagatctggccactggggtctgatactgactcctgggagtgctgaaccactgggagactgccctggacctcttgaagcttagctgggacactcgccagccctcagctccctttcctattaagtggccacagccctgccctaaactgcctttgggatattccaatatagccttcagaagcttccctattcatatggggacagggaggccctagaagggctagaggcctggtcccattgctgggctttgctgactctaccctcccccactaggctgagcacatccaccaaccacctgggcgagccaccctgggttgccaccatcaagctgtccggctctctggtggccaagctggagcactacgacttgcaggccacccattccaactgagtgtagtcggctcaacaccctccaccttcccctccatgccaataaaataaccaatccaga

SEQ ID NO: 5542 - DNA, 9496 bp, Homo sapiens
tttcacatgtcatttgaaaaattgtttaattcactgccaacatttattctttttagtaggacacttcaccccctttgttgaaaaaatctggtaccctggtccagcattcctatgtgtccacagctggctagaacagtccccctacctggggccatgccctcctgcaggccacagtgctgctggggccccacagtgggcgtccatgtttgagaccctgagcaatgcccaccagacagaggctgacccagttggaggctatctccaactcctgaatgccccaaaacctccaagttcttcagatataagaacttgtctctctgccgtcccaactggggagacaagggcctggaagagggaatgtcagtccacctttattgggcgaaaccctgcagtgtaactgttttaaataactcgtgccctgccccacccagtgcccggggggctcagacgatcatctccagctgccgggcatactcgatgacctgtttggccagttctgtggagggaatggtggtgtcttccggcttctgctgctggctggcaaaactgtagtagttgttggggcccaggacccaccctcgctgcaggaaaggagggattagagacgagtagagtgatcacaaaggctccatccccaccctatggggccagcacttgcccacgtgtcctatgctctcttttctcaccaatcgtactctgcccaacgacccttgacaagtaacttcacctctctgtgcctcagtttctctgtgttgagactgggaccctaattacacacctctctgggtcaactgtgaggatttggtgaatcaacatctttaaagcactgaggatagtgtttggcctgagtgacagatcagttaccagctgtcaccatcactaaaattcaatttcaccttcttcttttttttttttttttccccagacagagtctcgctctgtcacccaggctggagtgcaatggcgtgatctcggctcactgcaacctccaccctcctgggttcaagcaattctcctgcctcagcctcccgagtagctgagattacaggcacccgccaccacatccggctaattttttttgtattttttagtagagatgaggtttcaccatgttgaccaggctggtctcgaactcctgacctcaggcgatcctcccacctcagcctcccagagtgagcctaggtgggaggatccaccttggtgcgcgggagccactgcacccagcccaatttcaccttccatagcctggtcccagccctcctcctgcaacaccaagcgttgctcgtgctcaaacgcctgagaccaaatgaagcaaagtcttgcagaaaaagctgccacctctaagaaattttgataaagacagcagccaacatgcgtgcagcgcccacctccagctgctgccaggtactaagctcatcccatgtatctagccccattctgtggatagagaaactgatgtcagagagctttggcagcttgcctagagtcacacagttgaacttaaacctgggcagtcttgttccagtgtccctctaagccaccccacactgttgttagtgacttcaccccttggtcccacggccccttgccctgtaccccagccaccttcttggcgtagtctgtcatctttttgggtgtgttgaagaagaggatccgggtggcctcagtgaaaaggattttctcgtaggccttctcgatgcacccagcgatctcatccctgggggaagatgagaagctcctcattactgagcatcaacaacctcccaggacctgtccccccagacctgacatgtgtcagctctgaccctggagttcagcactgatggcaggaatatgtgaagggccctgttttattcatcaaggctcagaaggggagaaacttgaccagactcgcaaagcaagcaagggccacgggtgatccccactgaaatctctgactcctgggcccacactctgaatcccactcccagccacaggatttcaggtctgaaacccagcttgggactcacatgagggcatctcttctcataacacccatcaccagggtgctgcaccccacttcatagatcctgagggggttccttgtacccatcaagaggcaccacgaacaacaccgaagtagaaatagagcaaggcatgaagtcactgtagtgagggagggggtaagctctggggaaaagccagtgatggggaggagtgcctccaatatcgcttaggccatgcggtaggtagtgggtactggctaccactcctcactcgaatgcctctgggcttgcctttgcacctaaggcatggaaactcattctgatttggtgctctgcccgagtgcatcagctcagccaccacttcgacacccttttactcctcaagggatttgtatgtcacatccatctgcccgtgggatgtcacttgtgcacacggcaacccaaggggctgctgggatttggtcaacccattctagagaaggagaaactgagggttccacagttttggtggccggaggtgaagtctcatgactcactggatgggtatctaggacggaagatgggctaagacaggccgcacaatccctgcctgctgaaccaattccatgctcaggtttgacacacgtggccacacatgtcaacagccaagggtggtgagatgagagccgttatccacaatcccatgaccaggcccaattcactgaaaaggagagctgaggtgctaggaggataagaaacacacctagcctacccagacaaccaatggctggaatgagattcagactcggagctgtccgactcaagcccaagttctttccaaactccacagggcccggccccgctacgcacctgatagtgtcgagcaggatgtcaatgaagaaggtgtagctctcggcggggatgttacccttggccaggaacactttgttgtagctgccctccatcaggtactgcagaagccgggaagggggaagaagagagaatgaagaggaggctgcaaaggggcctacctgtgtgggcctcatcacactcctagtgcccctgtaatccctttgccacacagccacacccctgccctgggtaccccctcttccagaaagcccttgctggtttatgcgcacacacacacacacacacacactctctctctctctctctcaccccctcttcctccctccctccctccccccaagcctgctctgggctggcatctcattatctcatctactgtccaattatccatctattttccaggagggagacagcgctggctccaccacaggctcatccctgtacacctttgcccgaactgtgctgcccgccctaactgccctctctcccatcctctccccactgaccaaatcctcccataagatgtcagctccaggaacaacttcctaaccttaggtcctaaggctttgccctggccctgctcactttgttccaaaaacactgtcttcttggctgtccttcgaacacagcagacacagtactgcctcaggacatttggactggctggttcctctgcccggctgtccacagggttcagtcccttacccttttcttttcttttttgagcctgttgcccaggctggagtgcaatggcacaatcttggctcactgcaacctccacctcctgggttcaagtgattctcctgcctcagcctcccgagtagctgggattacaggcacccaccatccgcctggctagtttttgtatttttatagagacggggtttcaccatgttggccaggctggtttcgaactcctgaactcaggtgatccacccgcctcggcctcccaatgtgctgggattacaggcgtgagccactgtgcacggccacccttttctttaaaaaatatgtttttattcatttattttctaaatagagacagaatctcactgtcacccaggctagaatacagtggtgtgatcatagcacactgcagccttgaactcctgggctcaagcagtcctcctgcctcagcctcccaaagtgctgagattacaggcataagccagttcctcacccttttcaagtctttctccaatttcaccttttaggtgaggccttctgactccccgagataaatatcacccatccctgcctctccaccctccttcctgctttttctccacagcactcagcatctgacagactgcgcaggccactcactcttcgggcttactatctgcttccacaccccagtgtcatcaccacaagatcatgaatttcacctgcttggctcactgcacagtctgacaacctaccacagtgccaggcacacagctgggactcagtatttgttggacaaacaagaggatgggtccgtgggtggaaagatgggtgaaccctggccactccttcaggaaagccctcctaagaccacccctgcaccacccactttggccaggtcctcccctgccccttgccatctcacttgctccagggacactgggtgcttgatgtagacattggtctgtatgtccttggcaggcagccgctccaactccgtgtggaactcagccacccggttctgggacagcaggaagaggaggttgaggcccaagagctggtgcatataggctgactcggggagctgctccctgtggacgtgggatggggaagcaggttaaggaggatttaagggcctagcgagccctctaccccaggctccaggaatcctcacaacgccccatgcatcttcctgaagaggtatcaggtcctgggttttcatatgaggaaactgtgtcccaaagatgcatgaataagtcatttacaagagtcatattgagtcatacaagagcgagtgacctcacttcagtgaaatgacaacctcggtttcccaaagtgtaaactgggtatcaccatagtatccttttatttattttttgagaaggagtctctctctgttgcccaggctggagtgcaatggtgcgttcttggctcactgcaacctccgcttgccgggttcaagcgattctcctgatttagcctcccaagtagctgggactacaggcacatgccaccatgcccggctaattttttgtacttttagtagagacggggtttcactatgctggccaggctggtctcgaactcctgatctcgtgatccacccacctcggcctcccaaagtgcttggattacaggtatgagccactgcgcccagccctttttttttttttcaattccgagacaaggtcttgctctgtcacccaggctcactgcagcctcaacttcccacgctcaagccatcctcccacctcagactccaaagtagctgggactacaagtgcacaccaccatgcccagctaatttttttttttttttttttgagacggagtcttgctctgtcgcccaggctggagtgcagtggcccgatcttggctcactgcaggctctgcctcctcggttcatgccattctcctgcctcagcctcccgagtagctgggactacaggcgcccaccaccacacctggctaatttttgtatttttcttttagagacagggtttcaccgtgttagccaggatggtctcaacctcctaagctcatgatccgcccaccttggcctcccaaagtgctgggattacaggtgtaagccaccatgcccagcctgcccagctaatttttcaatattttttgtagagacaggatttcgccatgttggccaggcaggtctggaaatcttgggctcaagtgatcctcctgtctcagcctcccaaagtgctgggatttcaggcatgtgccatcatgcccggcctcacagtatccatttcgtagagatgggttgaatgaacaagggttaagtgaattaaatgattcaacccaggtaaggtgattagaacaatacctggcccaaataaacacaaagtgttagctataactatattaagagttactggccgggcgcggtggctcacgcctataatccaagcactttgggaggccgaggcgggtggatcacctgaggtcaggagttcaagaccagcctggccaacctggcaaaaccccatctctactaaaaatacaaaaattagctgggcgtggtcgtgggcacctgtaataccagctactcaggaggctgagggaggctgaggcaggagaatcacttgaacctgggaggcggaggttgcagtgcaccgagatccagccgttgcactctagcctgggtggactctagcagggcgtggtggcgcatgcctgtaatcccagctacttgggagactgaggcaggagaatagcttgaacccgggaggcagaggttgtggtgagccgagattgcaccattgcactccagcctgggcaacaagagtgaaactccgtctcaaaaaaaaaaaaagttattggagtcagatgcaatgactcaacacctgtaatcccaacactctgggagcccaaggcaggaggatcacttgtggccaggagttcgagaccagcctgggcaacaaagcgagacccccatctctacaaaaaattaaaataaaagagccaggagtggtggtgtgcacctgtagccctagctacttgagaggctaaggtaggagtaccgcttgagcccaggaggtcaaggctgtggtgagccatgactgcaccactgcactccagcctgggcaacacagcaagaccctgtctccaaaaataaataaataaaagaatcaccactccctactttaacagggaaactgagagaggtaaagtcatttgcccaagacctcataatcaggaagcggctggatgtttcaaagccagatttgtctgatgtcaaattcccaatcattaatctgtgcaggtatcattcagttttatattcaacacatatccagtgagtccctgttctgggcctggccctgtggtaggcagtgctagggacatagcagtaactgagacagttccaagctctgcctttagaaagctcacagtccagtgagagaaagggctgggatgagcaggcacaggcagaggggtgtgagctggaactgcattggaagccacaggaaagaacttggtcttgtgcctgaggaccatgaagagccacggcaggttctgagcggggtatggacagtgtcaaattttagtgtcacatgatcctactggctgccacaggggtttgagtcagaggggcaaggctggggccaggacacgtgaaaggtgatggcagccccactgggcagagggggtgcaatgtgggaatgggtagggggagactgactagtcaagccaagtctcaggacctccaagccaagccctgaccctgcaccactgaggagagaactaagccaggaggagttcccagatgaaggaagaggacccaagcagccagagctccagaaataaaggagcttccatgcaaccacccccccagttgggggcagggcccattctcacttgtaatcaaagtagtagcatttgagctgggccatgtagcgctcgaaggaggggatgtccttgcgtaggatgctccattgggccccgatctccagtatgtcacctgtgggtgacagagtgagctctcaggaggtgactgaggtctcttccccaaccaccagtgctaccattcctgccatgacccccagattatcacccccaaccaaccccagtgacactcacgggccagaattagctgctgtttggtcagcttggtccctgtggttggcaagaagttgagctccagaagaactagctgatggggaggggagggagggaagaaagaaaagaagggaattcaaatacagatgacttacctgctctacgctctggtcttcccacttggaaaatggagctaaccatcatccagactcatgaggaatgctttctcataaagcactcagaacagggcctgagcacgcaacacatgcccatttaagattacatcacattacaattattaatagccccactggggaaacaaggagggacactcagtgcctgacccagtggaatcacgcggcggtggggacaggagtacattccattcttggcccatcttccccacaatctattggggaaggggtagctgggctatccccaaaatctatatctgggagggggaggtccaaatctccccccacagttcagcccatacatctttccttagcaggctcagcagcttgttccaagccactggatttacactccctcccaacagatgtttggtctgaagcactctgggccccgtattcttgttctctacttgtaagaatatttcttctaggttcagtcctgccttcacaactaggctgccccctctcccaacagatgcgagcctaagccccagatctctcagatcctaacccagcctggtcttaaccacacaccctctacacagcccaccttttcagcctcattcttttatcactccgggcagtcctcacttcccacttggtcttgcctggaatccaccatcaggaaaagcccgaatcccaatcctgccactccgaccagttaagcctccacgcaccaaaaatctaacccctcactcagttctgccataagtcttccaatcattcccccaccacccccgcgtgggtccattccagtcatctctcacttaaaaaaaaaatgtagagacagagtctcgctatgttgctcaggctgatcttgaactcctgggctcaagcgacgctcccccgcctcggcctcccaaagcgctgcgattacaggcgtgaccatcaacgctccctgtccctctctcgcttcttgacgccctccgagcccccactttggctgttccaaatctttcaccccatcggatcccccagcccgcctcagtctcgctggcaccgaggtggcttccgcggcccgggacttggttgggtccagacacctcgtagcgcctcccacgcccgcaacactcggtttcctgggcctgccgactttaccttgagtcgacccagctcttccccgcacttgctaagattggggcttttacggttccactcgcccttgagttgctcgtacatgccggtcgcggcctgcagaacagcgcccgaggttgccgcgggcccggagctcgagaagcctgccgccccgttcaccgccgcggccgccatcttgcgtgatgcggcaagcagaccgcctgatttacggcagcgccgcctacaaacgcttgcccggcggaagtggggccgagaggtggagcccaaggcccggggcggggctacaacctgcctcagcccgccccgggtagcccgccgtcgctctcgaggtggcgccctcggagccctgcccttaatgaacatgtcagttggagctccgcctctgtcgtcactcaagatggtgaccggaagttggcttttgccctaactgaaaatgacagctgtctcaacaccaccccccctacccacctcacggttccaataatgaacatggctgccctggcttcagtctgagtgctcgggacgctacgtagctgtcctggaggttccgccttcggggcagcgtctccaagccaaaaggtagcgggtgtcgtgccatttggagagctgtgttattctcattttata

SEQ ID NO: 5543 - DNA, 801 bp, Homo sapiens
cacaaagtcatgaatttccaataaattatactacgatggaggttaaatacatagacctattatcccaaaatgtgtctctaaatgaaatatttgtattcatattgttagcattctaatttcacaatactaatcatgtgtacacctgtgtgttgggtaaaatattttgttaatataaattttttggttctgcattagagaaaaaaatcatagaaaggcaaatttaagatataaaacatatttagcatgatctttgagcatgtttgtgcatattaaatactactttgactgctatagtaaaatccagatttagtcaccatagctaagaatgtgaaaaagccttgcaagaatttggcttgctaatgatgctattaaaagatgaaataaagttgatatactgtattattgcagagagtatttttctatattcatattgaaaaatgcccaaaaagccccaaaatagaatcctaattgtcggatgtcacttttgctatgaatttttaaaatgtagtaaaagaaaaaaaaagcaaagaaattcttgaaaatatgttggttttacattattcttgatgaactaccacatgaggatacttctctaggcctgatgctgagaatcatagaagaaacatgaggccatgaggaagaatagtagggttctctcactaccctgaactccagtacttaaaaaacaagatggaaatcacatttatcaaatagcattctcccttttacctgccataattattatcatcatcatctatatatacatctcattaaatgatttatttttgaaatatttaaata

SEQ ID NO: 5544 - DNA, 413 bp, Homo sapiens
atactgtattattgcagagagtatttttctatattcatattgaaaaatgcccaaaaagccccaaaatagaatcctaattattggatgtcacttttgctatgaatttttaaaatgtagtaaaagaaaaagaagcaaagaaattcttgaaaatatgttggttttacattattcttgatgaactaccacatgaggatacttctctaggcctgatgctgagaatcatagaagaaacatgaggccatgaggaagaatagtagggttctctcactaccctgaactccagtacttaaaaaacaagatggaaatcacatttatcaaatagcattctcccttttacctgccataattattatcatcatcatctatatatacatctatctcattaaatgatatatttttgaaatatttaaata

SEQ ID NO: 5545 - DNA, 138 bp, Homo sapiens
atagcattaggagatatacctaatgctaaatgacgagttaatgggtgcagcacaccagcatggcacatgtatacatatgtaactaaccggcacattgtgcacatgtaaccctaaaacttaaagtattataatattaaa

SEQ ID NO: 5546 - DNA, 177 bp, Homo sapiens
cacaaagtcatgaatttccaataaattatagtatgatggaggttaaatatatagacctattatcccaaaatgtgtctctaaatgaaatatttgtattcatattgttagcattctaatttcacaatactaatcatgtgtacacctgtgtgttgggtaaaatattttgttaatataaat

SEQ ID NO: 5547 - DNA, 1359 bp, Homo sapiens
atccagacatgataagatacattgatgagtttggacaaaccacaactagaatgcagtgaaaaaaatgctttatttgtgaaatttgtgatgctattgctttatttgtaaccattataagctgcaataaacaagttaacaacaacaattgcattcattttatgtttcaggttcagggggaggtgtgggaggttttttaaagcaagtaaaacctctacaaatgtggtatggctgattatgatctctagtcaaggcactatacatcaaatattccttattaacccctttacaaattaaaaagctaaaggtacacaatttttgagcatagttattaatagcagacactctatgcctgtgtggagtaagaaaaaacagtatgttatgattataactgttatgcctacttataaaggttacagaatatttttccataattttcttgtatagcagtgcagctttttcctttgtggtgtaaatagcaaagcaagcaagagttctattactaaacacagcatgactcaaaaaacttagcaattctgaaggaaagtccttggggtcttctacctttctcttcttttttggaggagtagaatgttgagagtcagcagtagcctcatcatcactagatggcatttcttctgagcaaaacaggttttcctcattaaaggcattccaccactgctcccattcatcagttccataggttggaatctaaaatacacaaacaattagaatcagtagtttaacacattatacacttaaaaattttatatttaccttagagctttaaatctctgtaggtagtttgtccaattatgtcacaccacagaagtaaggttccttcacaaagatccggaccaaagcggccatcgtgcctccccactcctgcagttcgggggcatggatgcgcggatagccgctgctggtttcctggatgccgacggatttgcactgccggtagaactccgcgagtcgtccagcctcaggcagcagctgaaccaactcgcgaggggatcgagcccggggtgggcgaagaactccagcatgagatccccgcgctggaggatcatccagccggcgtcccggaaaacgattccgaagcccaacctttcatagaaggcggcggtggaatcgaaatctcgtgatggcaggttgggcgtcgcttggtcggtcatttcgaaccccagagtcccgctcagaagaactcgtcaagaaggcgatagaaggcgatgcgctgcgaatcgggagcggcgataccgtaaagcacgaggaagcggtcagccattcgccgccaagctcttcagcaatatcacgggtagccaacgctatgtcctgatagcggtccgcacacccagccggcca

SEQ ID NO: 5548 - DNA, 1457 bp, Homo sapiens
  SITE (761): n equals a,t,g, or c
  SITE (940): n equals a,t,g, or c
  SITE (952): n equals a,t,g, or c
  SITE (1226): n equals a,t,g, or c
  SITE (1248): n equals a,t,g, or c
  SITE (1263): n equals a,t,g, or c
  SITE (1270): n equals a,t,g, or c
  SITE (1276): n equals a,t,g, or c
  SITE (1277): n equals a,t,g, or c
  SITE (1278): n equals a,t,g, or c
  SITE (1280): n equals a,t,g, or c
  SITE (1281): n equals a,t,g, or c
  SITE (1284): n equals a,t,g, or c
  SITE (1285): n equals a,t,g, or c
  SITE (1289): n equals a,t,g, or c
  SITE (1290): n equals a,t,g, or c
  SITE (1291): n equals a,t,g, or c
  SITE (1293): n equals a,t,g, or c
  SITE (1297): n equals a,t,g, or c
  SITE (1298): n equals a,t,g, or c
  SITE (1301): n equals a,t,g, or c
  SITE (1306): n equals a,t,g, or c
  SITE (1308): n equals a,t,g, or c
  SITE (1309): n equals a,t,g, or c
  SITE (1313): n equals a,t,g, or c
  SITE (1314): n equals a,t,g, or c
  SITE (1315): n equals a,t,g, or c
  SITE (1316): n equals a,t,g, or c
  SITE (1320): n equals a,t,g, or c
atccagacatgataagatacattgatgagtttggacaaaccacaactagaatgcagtgaaaaaaatgctttatttgtgaaatttgtgatgctattgctttatttgtaaccattataagctgcaataaacaagttaacaacaacaattgcattcattttatgtttcaggttcagggggaggtgtgggaggttttttaaagcaagtaaaacctctacaaatgtggtatggctgattatgatctctagtcaaggcactatacatcaaatattccttattaacccctttacaaattaaaaagctaaaggtacacaatttttgagcatagttattaatagcagacactctatgcctgtgtggagtaagaaaaaacagtatgttatgattataactgttatgcctacttataaaggttacagaatatttttccataattttcttgtatagcagtgcagctttttcctttgtggtgtaaatagcaaagcaagcaagagttctattactaaacacagcatgactcaaaaaacttagcaattctgaaggaaagtccttggggtcttctacctttctcttcttttttggaggagtagaatgttgagagtcagcagtagcctcatcatcactagatggcatttcttctgagcaaaacaggttttcctcattaaaggcattccaccactgctcccattcatcagttccataggttggattctaaaatacacaaacaattagaatcagtagtttaacacattatacacttaaanattttatatttaccttagagctttaaatctctgtaggtagtttgtccaattatgtcacaccacagaagtaaggttccttcacaaagatccggaccaaagcggccatcgtgcctccccactcctgcagttcgggggcatggatgcgcggatagccgctgcttggtttcctggatgccganggattttcactnccggtagaactccgcgaggttcgtccagcctcaggcagcagctgaaccaactcgcgaggggatcgagcccggggtgggcgaagaactccagcatgagatccccgcgctggaggatcatccagccggcgtcccggaaaacgattccgaagcccaacctttcatagaaggcggcggtggaatcgaaatctcgtgatggcaggttgggcgtcgcttggtcggtcatttcgaaccccagagtcccgctcagaagaactcgtcaagaaggcgatagaangcgatcgctgcgaatcgggagnggcgataccgtaaancacgagnaattgnnntnngcnnattnnncnccannctnttcancnntctnnnngggnagccaacgctatgtcctgatagggtccgccaaacccagccggccacagtcgatgaatccagaaaagcggccattttccaccatgatattcggcaagcaggcatcgccatgggtcacgacgagatcctcgccgtcggg

SEQ ID NO: 5549 - DNA, 1223 bp, Homo sapiens
  SITE (999): n equals a,t,g, or c
gatccagacatgataagatacattgatgagtttggacaaaccacaactagaatgcagtgaaaaaaatgctttatttgtgaaatttgtgatgctattgctttatttgtaaccattataagctgcaataaacaagttaacaacaacaattgcattcattttatgtttcaggttcagggggaggtgtgggaggttttttaaagcaagtaaaacctctacaaatgtggtatggctgattatgatctctagtcaaggcactatacatcaaatattccttattaacccctttacaaattaaaaagctaaaggtacacaatttttgagcatagttattaatagcagacactctatgcctgtgtggagtaagaaaaaacagtatgttatgattataactgttatgcctacttataaaggttacagaatatttttccataattttcttgtatagcagtgcagctttttcctttgtggtgtaaatagcaaagcaagcaagagttctattactaaacacagcatgactcaaaaaacttagcaattctgaaggaaagtccttggggtcttctacctttctcttcttttttggaggagtagaatgttgagagtcagcagtagcctcatcatcactagatggcatttcttctgagcaaaacaggttttcctcattaaaggcattccaccactgctcccattcatcagttccataggttggaatctaaaatacacaaacaattagaatcagtagtttaacacattatacacttaaaaattttatatttaccttagagctttaaatctctgtaggtagtttgtccaattatgtcacaccacagaagtaaggttccttcacaaagatccggaccaaagcggccatcgtgcctccccactcctgcagttcgggggcatggatgcgcggatagccgctgctggtttcctggatgccgacggatttgcactgccggtagaactccgcgaggtcgtccagcctcaggagcagctgaaccnactcgcgaggggatcgagcccggggtgggcgaagaactccagcatgagaatccccgcgctggaggatcatccagcggcgtcccggaaaacgattccgaagcccaacctttcatagaaggcggcggtggaatcgaaatctcgtgatggcaggttgggcgtcgcttggtcggtcatttcgaaccccagagtcccgctcagaagaactcgtcaagaaggcgatagaa

SEQ ID NO: 5550 - DNA, 1423 bp, Homo sapiens
  SITE (1212): n equals a,t,g, or c
atccagacatgataagatacattgatgagtttggacaaaccacaactagaatgcagtgaaaaaaatgctttatttgtgaaatttgtgatgctattgctttatttgtaaccattataagctgcaataaacaagttaacaacaacaattgcattcattttatgtttcaggttcagggggaggtgtgggaggttttttaaagcaagtaaaacctctacaaatgtggtatggctgattatgatctctagtcaaggcactatacatcaaatattccttattaacccctttacaaattaaaaagctaaaggtacacaatttttgagcatagttattaatagcagacactctatgcctgtgtggagtaagaaaaaacagtatgttatgattataactgttatgcctacttataaaggttacagaatatttttccataattttcttgtatagcagtgcagctttttcctttgtggtgtaaatagcaaagcaagcaagagttctattactaaacacagcatgactcaaaaaacttagcaattctgaaggaaagtccttggggtcttctacctttctcttcttttttggaggagtagaatgttgagagtcagcagtagcctcatcatcactagatggcatttcttctgagcaaaacaggttttcctcattaaaggcattccaccactgctcccattcatcagttccataggttggaatctaaaatacacaaacaattagaatcagtagtttaacacattatacacttaaaaattttatatttaccttagagctttaaatctctgtaggtagtttgtccaattatgtcacaccacagaagtaaggttccttcacaaagatccggaccaaagcggccatcgtgcctccccactcctgcagttcgggggcatggatgcgcggatagccgctgctggtttcctggatgccgacggatttgcactgccggtagaactccgcgaggtcgtccagcctcaggcagcagctgaaccaactcgcgaggggatcgagcccggggtgggcgaagaactccagcatgagatccccgcgctggaggatcatccagccggcgtcccggaaaacgattccgaagcccaacctttcatagaaggcggcggtggaatcgaaatctcgtgatggcaggttggcgtcgcttggtcggtcatttcgaaccccagagtcccgctcagaagaactcgtcaaganggcgatagaaggcgatgcgctgcgaatcgggagcggcgataccgtaaagcacgaggaagcggtcagcccattcgccgccaagctcttcagcaatatcacgggtagccaacgctatgtcctgatagcggtccgccacacccagccggccacagtcgatgaatccagaaaagcggccattttccaccatgatattcggcaagcaggcatcgcc

SEQ ID NO: 5551 - DNA, 1425 bp, Homo sapiens
atccagacatgataagatacattgatgagtttggacaaaccacaactagaatgcagtgaaaaaaatgctttatttgtgaaatttgtgatgctattgctttatttgtaaccattataagctgcaataaacaagttaacaacaacaattgcattcattttatgtttcaggttcagggggaggtgtgggaggttttttaaagcaagtaaaacctctacaaatgtggtatggctgattatgatctctagtcaaggcactatacatcaaatattccttattaacccctttacaaattaaaaagctaaaggtacacaatttttgagcatagttattaatagcagacactctatgcctgtgtggagtaagaaaaaacagtatgttatgattataactgttatgcctacttataaaggttacagaatatttttccataattttcttgtatagcagtgcagctttttcctttgtggtgtaaatagcaaagcaagcaagagttctattactaaacacagcatgactcaaaaaacttagcaattctgaaggaaagtccttggggtcttctacctttctcttcttttttggaggagtagaatgttgagagtcagcagtagcctcatcatcactagatggcatttcttctgagcaaaacaggttttcctcattaaaggcattccaccactgctcccattcatcagttccataggttggaatctaaaatacacaaacaattagaatcagtagtttaacacattatacacttaaaaattttatatttaccttagagctttaaatctctgtaggtagtttgtccaattatgtcacaccacagaagtaaggttccttcacaaagatccggaccaaagcggccatcgtgcctccccactcctgcagttcgggggcatggatgcgcggatagccgctgctggtttcctggatgccgacggatttgcactgccggtagaactccgcgaggtcgtccagcctcaggcagcagctgaaccaactcgcgaggggatcgagcccggggtgggcgaaagaactccagcatgagatccccgcgctggaggatcatccagccggcgtcccggaaaacgattccgaagcccaacctttcatagaaggcggcggtggaatcgaaatctcgtgatggcaggttgggcgtcgcttggtcggtcatttcgaaccccagagtcccgctcagaagaactcgtcaagaaggcgatagaaggcgatgcgctgcgaatcgggagcggcgataccgtaaagcacgaggaagcggtcagcccattcgccgccaagctcttcagcaatatcacgggtagccaacgctatgtcctgatagcggtccgccacacccagccggccacagtcgatgaatccagaaaagcggccattttccaccatgatattcggcaagcaggcatcgcc

SEQ ID NO: 5552 - DNA, 1362 bp, Homo sapiens
atccagacatgataagatacattgatgagtttggacaaaccacaactagaatgcagtgaaaaaaatgctttatttgtgaaatttgtgatgctattgctttatttgtaaccattataagctgcaataaacaagttaacaacaacaattgcattcattttatgtttcaggttcagggggaggtgtgggaggttttttaaagcaagtaaaacctctacaaatgtggtatggctgattatgatctctagtcaaggcactatacatcaaatattccttattaacccctttacaaattaaaaagctaaaggtacacaatttttgagcatagttattaatagcagacactctatgcctgtgtggagtaagaaaaaacagtatgttatgattataactgttatgcctacttataaaggttacagaatatttttccataattttcttgtatagcagtgcagctttttcctttgtggtgtaaatagcaaagcaagcaagagttctattactaaacacagcatgactcaaaaaacttagcaattctgaaggaaagtccttggggtcttctacctttctcttcttttttggaggagtagaatgttgagagtcagcagtagcctcatcatcactagatggcatttcttctgaggcaaaacaggttttcctcattaaaggcattccaccactgctcccattcatcagttccataggttggaatcttaaatacacaaacaattagaatcagtagtttaacacattatacacttaaaaattttatatttaccttagagctttaaatctctgtaggtagtttgtccaattatgtcacaccacagaagtaaggttccttcacaaagatccggaccaaagcggccatcgtgcctccccactcctgcagttcgggggcatggatgcgcggatagccgctgctggtttcctggatgccgacggatttgcactgccggtagaactccgcgaggtcgtccagcctcaggcagcagctgaaccaactcgcgaggggatcgagcccggggtgggcgaagaactccagcatgagatccccgcgctggaggatcatccagccggcgtcccggaaaacgattccgaagcccaacctttcatagaaggcggcggtggaatcgaaatctcgtgatggcaggttgggcgtcgcttggtcggtcatttcgaaccccagagtcccgctcagaagaactcgtcaagaaggcgatagaaggcgatgcgctgcgaatcgggagcggcgataccgtaaagcacgaggaagcggtcagcccattcgccgccaagctcttcagcaatatcacgggtagccaacgctatgtcctgatagcggtccgcacacccagccggcca

SEQ ID NO: 5553 - DNA, 5701 bp, Homo sapiens
gaattcttgaagacgaaagggcctcgtgatacgcctatttttataggttaatgtcatgataataatggtttcttagacgtcaggtggcacttttcggggaaatgtgcgcggaacccctatttgtttatttttctaaatacattcaaatatgtatccgctcatgagacaataaccctgataaatgcttcaataatattgaaaaaggaagagtatgagtattcaacatttccgtgtcgcccttattcccttttttgcggcattttgccttcctgtttttgctcacccagaaacgctggtgaaagtaaaagatgctgaagatcagttgggtgcacgagtgggttacatcgaactggatctcaacagcggtaagatccttgagagttttcgccccgaagaacgttttccaatgatgagcacttttaaagttctgctatgtggcgcggtattatcccgtgttgacgccgggcaagagcaactcggtcgccgcatacactattctcagaatgacttggttgagtactcaccagtcacagaaaagcatcttacggtatggcatgacagtaagagaattatgcagtgctgccataaccatgagtgaataacactgcggccaacttacttctgacaacggatcggaggaccgaagagctaaccgcttttttgcacaacatgggggatcatgtaactcgccttgatcgttgggaaccggagctgaatgaagccataccaaacgacgagcgtgacaccacgatgcctgcagcaatggcaacaacgttcgcaaactattaactggcgaactacttactctagcttcccggcaacaattaatagactggatggaggcggataaagttgcaggaccacttctgcgctcggcccttccggctggctggtttattgctgataaatctggagccggtgagcgtgggtctcgcggtatcattgcagcactggggccagatggtaagccctcccgtatcgtagttatctacacgacggggagtcaggcaactatggatgaacgaaatagacagatcgctgagataggtgcctcactgattaagcattggtaactgtcagaccaagtttactcatatatactttagattgatttaaaacttcatttttaatttaaaaggatctaggtgaagatcctttttgataatctcatgaccaaaatcccttaacgtgagttttcgttccactgagcgtcagaccccgtagaaaagatcaaaggatcttcttgagatcctttttttctgcgcgtaatctgctgcttgcaaacaaaaaaaccaccgctaccagcggtggtttgtttgccggatcaagagctaccaactctttttccgaaggtaactggcttcagcagagcgcagataccaaatactgtccttctagtgtagccgtagttaggccaccacttcaagaactctgtagcaccgcctacatacctcgctctgctaatcctgttaccagtggctgctgccagtggcgataagtcgtgtcttaccgggttggactcaagacgatagttaccggataaggcgcagcggtcgggctgaacggggggttcgtgcacacagcccagcttggagcgaacgacctacaccgaactgagatacctacagcgtgagctatgagaaagcgccacgcttccgaagggagaaaggcggacaggtatccggtaagcggcagggtcggaacaggagagcgcacgagggagcttccagggggaaacgcctggtatctttatagtcctgtcgggtttcgccacctctgacttgagcgtcgatttttgtgatgctcgtcaggggggcggagcctatggaaaaacgccagcaacgcggcctttttacggttcctggccttttgctggccttttgctcacatgttctttcctgcgttatcccctgattctgtggataaccgtattaccgcctttgagtgagctgataccgctcgccgcagccgaacgaccgagcgcagcgagtcagtgagcgaggaagcggaagagcgctgacttccgcgtttccagactttacgaaacacggaaaccgaagaccattcatgttgttgctcaggtcgcagacgttttgcagcagcagtcgcttcacgttcgctcgcgtatcggtgattcattctgctaaccagtaaggcaaccccgccagcctagccgggtcctcaacgacaggagcacgatcatgcgcacccgtcagatccagacatgataagatacattgatgagtttggacaaaccacaactagaatgcagtgaaaaaaatgctttatttgtgaaatttgtgatgctattgctttatttgtaaccattataagctgcaataaacaagttaacaacaacaattgcattcattttatgtttcaggttcagggggaggtgtgggaggttttttaaagcaagtaaaacctctacaaatgtggtatggctgattatgatctctagtcaaggcactatacatcaaatattccttattaacccctttacaaattaaaaagctaaaggtacacaatttttgagcatagttattaatagcagacactctatgcctgtgtggagtaagaaaaaacagtatgttatgattataactgttatgcctacttataaaggttacagaatatttttccataattttcttgtatagcagtgcagctttttcctttgtggtgtaaatagcaaagcaagcaagagttctattactaaacacagcatgactcaaaaaacttagcaattctgaaggaaagtccttggggtcttctacctttctcttcttttttggaggagtagaatgttgagagtcagcagtagcctcatcatcactagatggcatttcttctgagcaaaacaggttttcctcattaaaggcattccaccactgctcccattcatcagttccataggttggaatctaaaatacacaaacaattagaatcagtagtttaacacattatacacttaaaaattttatatttaccttagagctttaaatctctgtaggtagtttgtccaattatgtcacaccacagaagtaaggttccttcacaaagatccggaccaaagcggccatcgtgcctccccactcctgcagttcgggggcatggatgcgcggatagccgctgctggtttcctggatgccgacggatttgcactgccggtagaactccgcgaggtcgtccagcctcaggcagcagctgaaccaactcgcgaggggatcgagcccggggtgggcgaagaactccagcatgagatccccgcgctggaggatcatccagccggcgtcccggaaaacgattccgaagcccaacctttcatagaaggcggcggtggaatcgaaatctcgtgatggcaggttgggcgtcgcttggtcggtcatttcgaaccccagagtcccgctcagaagaactcgtcaagaaggcgatagaaggcgatgcgctgcgaatcgggagcggcgataccgtaaagcacgaggaagcggtcagcccattcgccgccaagctcttcagcaatatcacgggtagccaacgctatgtcctgatagcggtccgccacacccagccggccacagtcgatgaatccagaaaagcggccattttccaccatgatattcggcaagcaggcatcgccatgggtcacgacgagatcctcgccgtcgggcatgcgcgccttgagcctggcgaacagttcggctggcgcgagcccctgatgctcttcgtccagatcatcctgatcgacaagaccggcttccatccgagtacgtgctcgctcgatgcgatgtttcgcttggtggtcgaatgggcaggtagccggatcaagcgtatgcagccgccgcattgcatcagccatgatggatactttctcggcaggagcaaggtgagatgacaggagatcctgccccggcacttcgcccaatagcagccagtcccttcccgcttcagtgacaacgtcgagcacagctgcgcaaggaacgcccgtcgtggccagccacgatagccgcgctgcctcgtcctgcagttcattcagggcaccggacaggtcggtcttgacaaaaagaaccgggcgcccctgcgctgacagccggaacacggcggcatcagagcagccgattgtctgttgtgcccagtcatagccgaatagcctctccacccaagcggccggagaacctgcgtgcaatccatcttgttcaatcatgcgaaacgatcctcatcctgtctcttgatcagatcttgatcccctgcgccatcagatccttggcggcaagaaagccatccagtttactttgcagggcttcccaaccttaccagagggcgccccagctggcaattccggttcgcttgctgtccataaaaccgcccagtctagctatcgccatgtaagcccactgcaagctacctgctttctctttgcgcttgcgtttcccttgtccagatagcccagtagctgacattcatccggggtcagcaccgtttctgcggactggctttctacgtgttccgcttcctttagcagcccttgcgccctgagtgcttgcggcagcgtgaagctttttgcaaaagcctaggcctccaaaaaagcctcctcactacttctggaatagctcagaggccgaggcggcctcggcctctgcataaataaaaaaaattagtcagccatggggcggagaatgggcggaactgggcggagttaggggcgggatgggcggagttaggggcgggactatggttgctgactaattgagatgcatgctttgcatacttctgcctgctggggagcctggggactttccacacctggttgctgactaattgagatgcatgctttgcatacttctgcctgctggggagcctggggactttccacaccctaactgacacacattccacagccggatctgcaggacccaacgctgcccgagatgcgccgcgtgcggtgcctggagatggcggacgcgatggatatgttctgccaagggttggtttgcgcattcacagttctccgcaagaattgattggctccaattcttggagtggtgaatccgttagcgaggtgccgccggcttccattcaggtcgaggtggcccggctccatgcaccgcgacgcaacgcggggaggcagacaaggtatagggcggcgcctacaatccatgccaacccgttccatgtgctcgccgaggcggcataaatcgccgtgacgatcagcggtccaatgatcgaagttaggctggtaagagccgcgagcgatccttgaagctgtccctgatggtcgtcatctacctgcctggacagcatggcctgcaacgcgggcatcccgatgccgccggaagcgagaagaatcataatggggaaggccatccagcctcgcgtcgcgaacgccagcaagacgtagcccagcgcgtcggccgccatgccggcgataatggcctgcttctcgccgaaacgtttggtggcgggaccagtgacgaaggcttgagcgagggcgtgcaagattccgaataccgcaagcgacaggccgatcatcgtcgcgctccagcgaaagcggtcctcgccgaaaatgacccagagcgctgccggcacctgtcctacgagttgcatgataaagaagacagtcataagtgcggcgacgatagtcatgccccgcgcccaccggaaggagctgactgggttgaaggctctcaagggcatcggtcga

SEQ ID NO: 5554 - DNA, 8167 bp, Homo sapiens
  SITE (2740): n equals a,t,g, or c
atccagacatgataagatacattgatgagtttggacaaaccacaactagaatgcagtgaaaaaaatgctttatttgtgaaatttgtgatgctattgctttatttgtaaccattataagctgcaataaacaagttaacaacaacaattgcattcattttatgtttcaggttcagggggaggtgtgggaggttttttaaagcaagtaaaacctctacaaatgtggtatggctgattatgatctctagtcaaggcactatacatcaaatattccttattaacccctttacaaattaaaaagctaaaggtacacaatttttgagcatagttattaatagcagacactctatgcctgtgtggagtaaggaaaaacagtatgttatgattataactgttatgcctacttataaaggttacagaatatttttccataattttcttgtatagcagtgcagctttttcctttgtggtgtaaatagcaaagcaagcaagagttctattactaaacacagcatgactcaaaaaacttagcaattctgaaggaaagtccttggggtcttctacctttctcttcttttttggaggagtagaatgttgagagtcagcagtagcctcatcatcactagatggcatttcttctgagcaaaacaggttttcctcattaaaggcattccaccactgctcccattcatcagttccataggttggaatctaaaatacacaaacaattagaatcagtagtttaacacattatacacttaaaaattttatatttaccttagagctttaaatctctgtaggtagtttgtccaattatgtcacaccacagaagtaaggttccttcacaaagatccggaccaaagcggccatcgtgcctccccactcctgcagttcgggggcatggatgcgcggatagccgctgctggtttcctggatgccgacggatttgcactgccggtagaactccgcgaggtcgtccagcctcaggcagcagctgaaccaactcgcgaggggatcgagcccggggtgggcgaagaactccagcatgagatccccgcgctggaggatcatccagccggcgtcccggaaaacgattccgaagcccaacctttcatagaaggcggcggtggaatcgaaatctcgtgatggcaggttgggcgtcgcttggtcggtcatttcgaaccccagagtcccgctcagaagaactcgtcaagaaggcgatagaaggcgatgcgctgcgaatcgggagcggcgataccgtaaagcacgaggaagcggtcagcccattcgccgccaagctcttcagcaatatcacgggtagccaacgctatgtcctgatagcggtccgccacacccagccggccacagtcgatgaatccagaaaagcggccattttccaccatgatattcggcaagcaggcatcgccatgggtcacgacgagatccttcgccgtcgggcatgcgcgccttgagcctggcgaacagttcgctggcgcgagcccctgatgctcttcgtccagatcatcctgatcgacaggggcggggaggggcggggaggcgcggggaaggggccgggcccgagccccacagtgcgcctcggcctccgcgagctccggactgggctcgggtctcagagggaagtgccccgcgtgggagggcccgcgaggacaggcgtcagggagcgtcccgcgctgccgggcggtgcgcgcgagcgtccccatggagggagaagccggccggccgggcgggccagtgtctcctgcaagggagacgagggcgcagcgagcgctttcccccagggacccgcgtcgagtgcgagggcgcagtgggtctgggggtgccacggtgtcaggggtgggacctgggagagcttaacgcgtccggaggggggctgtgaaagcctccagcatcgccagcgagccgtcagttcgcgtgtgcgcgcgcctgcgtgtgcgcgtgtagtcacagggctgcagggacacaggaccaaagtacaaagtacactcgcaaagtacaaagttcagaagccgagggcaagtgcagaaacgtccctcgcccgggaagttgagcgcacacccaggcacgcctgtgtttctggaggaattccccggtgcaggcggccgagttttctgctgcatcgcagcccgcgggggttggaaaggctcccgccctgttttcaggcgcgtccccgcctcctgagccccggtcctctgcggaggggccgcgcgctccagtttgccagcgtgagcttcactcttcgctctcggcgtgggcctcctgagccgtgtcttactttcctttgattccctctcgtcccagctggagaaaaggctcccggaagggtgacctggtgtcgctggattccactccccatcactccctagccaaccccgcgagctgagctccaggcagggagaggggcgggtgcctgggagtcgggctgactccctgggcggtggcgggcaggggtcgagcgtcctctgtccgtcaggggcccgcagcaccaggaggcgacgctggatgcagtggccatctcctcctgcctccaggccatggggaacccagggcggatcccgggtcagcagggccagctgtccaccaagctgacccacccgacatgccaggactaaggaaagaagggctgccccacccccttagtcggatggcaagtgtttggggtgcagcccccgccacgagtgtcacctgttctgcctgagcaggcttctctcttactccctgctcntgggcctgaagcagagccgctggctcagtggggcgctccattgtgaggtcactggcatgcaccacggaagcccagcgggaccacccacccacgtgccccagctccccagcggaggtcctgagatggcagattaatactctggggttctgaattccacagatgaactgggtcccccacgggtatggccaagggaacggcccactccctagtggctccgtgtgaaatcgagctgctgctgctctcgccgcagggcccagctcactgcccagacataggagcacatcgccctgcgcacaggctgggtgggcacagctgtgagggagccaccccatgcctcaggcctcctgcacaggcgtgggcctcgccactctgggtggacaggctactttggcccctcagcctctggggactgctgccctgttttcagcaccgtgtcaggcaccatctggtcagccagctcctccagccccgagactcccgtgtcctcattctcctgggccgttacggtcggccagtgcccagcctttgctggaagctgtccaggctgggctctggtcaggcatcgatgtcccccaggcacctggcctcacctcgcgttgggacagcctctgcaagatggaacaggaaaggtctggctttgcctctgtcaccttctcccggtccatcatgtcctcctggccagcccgttcctggttcctgcggggagcccagcccgaagggaaccgaaagattctaacttaactctagttcagcctcccggatcctcctgtggagcggcaggatcccataaaacctacttggctcagcaacttgctggccaagcctccccacagcggtccacacaggccagaggtaaacattcccattccccacacctggaaggcctggtgcaaggaggggttgtagtgactgaaatgggaactctggctttatggcgcggagagagaagacatggacccaagagctgcagggtggggacaaccgacgcgctctttgtcccctcgatgtggtgccacagcctgaatccaatagcaccggccgctgacgcgctgacctggggctgggttagtcgctcgtcccccttgctctgaaatggagagtgcacgtgaccacggccagtcctggacaatcctgccatgccagagccaccagctggaacacacggacacaacctcttttccatctgactggtacaaggtatgtgcttctcctagctccagagggccttgggtggtgccacctatggtgatcaaggtggcaactacccatgtggctttgactgaatcaggcttgttcattttttaaaatagctttattgatatagacatcatgctgtaagactttctcccgtttaaagtgttcaattcaatggtgttcagtttagttacagagttgtgccactgtcaccatcatccagtttagaacttttttgttttgttttgtttttttgagatggagtcttgctctgttgcccaggctggagtgcagtgacactaccttggctcactgcaacctctgccttccaagttcaagcaattctcctgcctcagcctcctgagtagctgggattataggcatgtgccactacgcccggctaatttttgtatttttagtagagacggagtttcaccatgttggaccaggctggtctcgaacacctgacctcaggtgatccacctgccttggcctcccaaagtgctgggattacaggcgtgcaccactgcgcctggccccaagtttaggacattttcatcaccctaaaaagcaaatggggatgcccctcagcagtcccccccattacccctccctccagcccctggtgaccgctaatctagtttctgtctctgtggatttgcctgttctgtacatttcatagaaatggaacctattcaatgcacggcctttgtgtctggctttttttactgagcataacatttccaaggcttgtccattttgtaatgtgtatcagcgcttctttcttttttactcctgaatagagtccattgtatagtctaatacattctaatgtatccattgtttggatatatgacattttgtttatccattcatgagttgatggacaattggctttttccctctttttggctattatgaataatgttgctatgaacgttcatgtctaagtttttgtggacatttgtcttcatttctctgaggtgtacacctaagagtggagttgctgtttgaccttttgaggaaacaacagactgttttccaaagtgactgcaccattttccattcccgctggcagtgtaccagcgttccccgctcacgtcccccacaacccgctgtgactgttgggctttttattgcagccagcacagtaggtgtgacgtcgtatcactgaggggtcagtttgcatttccctaatgattcgtgatgctgagcttatctgacactgattatcttcattggaggaatgtctgttcagtcctctcactatcttggtagtgtcctttcagacataaaagttttaaattttggtgaaatccaatttacatatgttctccctttgttgcttgtgcttttgtggctacattacttgatggaggacgggagctgcccggcctcctgggtcgttagaaaggaaacctcttggcggacacggtggtccactcctgtaattccagcactttgcgaggccgagaccggtggatcacttgaggtcaggagttcgagaacagcctggccaacatggcaaaactcccgactctactaaaaaactacaaatattagccgggcatggtggtaagcacccgtagttccagctactcaggaggctgaggcaggagaatcgcttgaacccgggaggcgcaagctacgatgagccgggatgacaccactgcactccagcctgggtgacagcgagacaagaaagaaaggaaagaagagaaggtgaaggagaaggaaggaaggaaataaacctcttttctgtctgagccatttcattttgggcctgtctgtcccagaggtttaactacactagtatagagcatcgtttagtaaaggtttgttgaggtttgttgttgatttgtttctacttacacgagatgtcttcatttttaccctcggtcttgaaataaaattttggtgcatgttcatttttggtttgaattgaattattttcttgaacatagtgaggcaggagaacagggtctggaggccaattcatgctgactccctagaactaaatcaaatggaaacacttccgctatgacaagaagtgtcctctccatttacacagggcgtacaccaagtaaccaatggaaacctctagagggtatttaacccccccaaaaaatctgtaacggggctcttgagcgctaggctcagccgctccacagtgtggagttattttcgttgtcttttcttgtttcttttttgagacgaagtctggctctatcgcccaggctggagggcagtggtgcgatctcggctcactgcaacctccgcctcccggattcaagcaattctcctgcgtcagcctcccgagtagctaagaccacaggcgtgcaccaccacgcccggctaatttttgtgtttttagtagagaggggggtttcaccatgttgcccaggctggtctcaaactcctgacgtcaggtgatctgcccgccttggcctcccaaagtgctgggattacaggcctgagccaccgcgcccggccacacttttgttttccataaatctcgcttttgttgcttccttctttccgtgctttgtttgtgcgttttgtccagttctttgttcaagacgtcaagaacctggacaccctccaccggtcacaatagcagtttcgctttccattccattttatccagggtggttttatctccaccctggcgtttgcagaatccgggcaagtacacaaatggatgctccacaatacttgtctagatatttaaaaggtataaataaaataacttaaatgaatgaaatttttattatttaaatctgttgaagtcttgtgtgcatgaaaataaaactcctcctaatgtggcgttcattgcccataccgctgccaccgtgcctggtccctgcgcctgggcgcgctgtgtccgctgctacagacgccggcgggcaaggcgggcaaggcgggcaggcgggcaaggcgggcaggcgggcaggcgggcggggggaggcggcgcagagcccggcaggcgccgccgttgcctccgcctccgcgcggtctccccggggccagctgggaccccgagggctggggcgggggcgggggcgcgggcgactgcggcggggcctggagggcgctggtcccagcccagggcggggtcccggggacgcccctcggcctttagatccgcgagcggcagctcggcctgggggcggggcctggaggatatcgacccgctcactctgcccgggactgatctcgcgaggaccgccttggtctcgcggcgctgcctgtagcgacgaccctaagctatagcaagagtcgctccctgggcctggcgagattcaaaacatgccgcccttcgtgttcctctgtctcgccaagaccggcttccatccgagtacgtgctcgctcgatgcgatgtttcgcttggtggtcgaatgggcaggtagccggatcaagcgtatgcagccgccgcattgcatcagccatgatggatactttctcggcaggagcaaggtgagatgacaggagatcctgccccggcacttcgcccaatagcagccagtcccttcccgcttcagtgacaacgtcgagcacagctgcgcaaggaacgcccgtcgtggccagccacgatagccgcgctgcctcgtcctgcagttcattcagggcaccggacaggtcggtcttgacaaaaagaaccgggcgcccctgcgctgacagccggaacacggcggcatcagagcagccgattgtctgttgtgcccagtcatagccgaatagcctctccacccaagcggccggagaacctgcgtgcaatccatcttgttcaatcatgcgaaacgatcctcatcctgtctcttgatcagatcttgatcccctgcgccatcagatccttggcggcaagaaagccatccagtttactttgcagggcttcccaaccttaccagagggcgccccagctggcaattccggttcgcttgctgtccataaaaccgcccagtctagctatcgccatgtaagcccactgcaagctacctgctttctctttgcgcttggttttcccttgtccagatagcccagtagctgacattcatccggggtcagcaccgtttctgcggactggctttctacgtgttccgcttcctttagcagcccttgcgccctgagtgcttgcggcagcgtgaagctttttgcaaaagcctaggcctccaaaaaagcctcctcactacttctggaatagctcagaggccgaggcgcctcggcctctgcata

SEQ ID NO: 5555 - DNA, 5697 bp, Homo sapiens
gaattcttgaagacgaaagggcctcgtgatacgcctatttttataggttaatgtcatgataataatggtttcttagacgtcaggtggcacttttcggggaaatgtgcgcggaacccctatttgtttatttttctaaatacattcaaatatgtatccgctcatgagacaataaccctgataaatgcttcaataatattgaaaaaggaagagtatgagtattcaacatttccgtgtcgcccttattcccttttttgcggcattttgccttcctgtttttgctcacccagaaacgctggtgaaagtaaaagatgctgaagatcagttgggtgcacgagtgggttacatcgaactggatctcaacagcggtaagatccttgagagttttcgccccgaagaacgttttccaatgatgagcacttttaaagttctgctatgtggcgcggtattatcccgtgttgacgccgggcaagagcaactcggtcgccgcatacactattctcagaatgacttggttgaattccccccattcacagaaaagcatcttacggatggcatgacagtaagagaattatgcagtgctgccataaccatgagtgataacactgcggccaacttacttctgacaacgatcggaggaccgaagagctaaccgcttttttgcacaacatgggggatcatgtaactcgccttgatcgttgggaaccggagctgaatgaagccataccaaacgacgagcgtgacaccacgatgcctgctgagcaatggcaacaacgttcgcaaactattaactggcgaactacttactctagcttcccggcaacaattaatagactggatggaggcggataaagttgcaggaccacttctgcgctcggcccttccggctggctggtttattgctgataaatctggagccggtgagcgtgggtctcgcggtatcattgcagcactggggccagatggtaagccctcccgtatcgtagttatctacacgacggggagtcaggcaactatggatgaacgaaatagacagatcgctgagataggtgcctcactgattaagcattggtaactgtcagaccaagtttactcatatatactttagattgatttaaaacttcatttttaatttaaaaggatctaggtgaagatcctttttgataatctcatgaccaaaatcccttaacgtgagttttcgttccactgagcgtcagaccccgtagaaaagatcaaaggatcttcttgagatcctttttttctgcgcgtaatctgctgcttgcaaacaaaaaaaccaccgctaccagcggtggtttgtttgccggatcaagagctaccaactctttttccgaaggtaactggcttcagcagagcgcagataccaaatactgtccttctagtgtagccgtagttaggccaccacttcaagaactctgtagcaccgcctacatacctcgctctgctaatcctgttaccagtggctgctgcagtggcgataagtcgtgtcttaccgggttggactcaagacgatagttaccggataaggcgcagcggtcgggctgaacggggggttcgtgcacacagcccagcttggagcgaacgacctacaccgaactgagatacctacagcgtgagctatgagaaagcgccacgcttcccgaagggagaaaggcggacaggtatccggtaagcggcagggtcggaacaggagagcgcacgagggagcttccagggggaaacgcctggtatctttatagtcctgtcgggtttcgccacctctgacttgagcgtcgatttttgtgatgctcgtcaggggggcggagcctatggaaaaacgccagcaacgcggcctttttacggttcctggccttttgctggccttttgctcacatgttctttcctgcgttatcccctgattctgtggataaccgtattaccgcctttgagtgagctgataccgctcgccgcagccgaacgaccgagcgcagcgagtcagtgagcgaggaagcggaagagcgctgacttccgcgtttccagactttacgaaacacggaaaccgaagaccattcatgttgttgctcaggtcgcagacgttttgcagcagcagtcgcttcacgttcgctcgcgtatcggtgattcattctgctaaccagtaaggcaaccccgccagcctagccgggtcctcaacgacaggagcacgatcatgcgcacccgtcagatccagacatgataagatacattgatgagtttggacaaaccacaactagaatgcagtgaaaaaaatgctttatttgtgaaatttgtgatgctattgctttatttgtaaccattataagctgcaataaacaagttaacaacaacaattgcattcattttatgtttcaggttcagggggaggtgtgggaggttttttaaagcaagtaaaacctctacaaatgtggtatggctgattatgatctctagtcaaggcactatacatcaaatattccttattaacccctttacaaattaaaaagctaaaggtacacaatttttgagcatagttattaatagcagacactctatgcctgtgtggagtaagaaaaaacagtatgttatgattataactgttatgcctacttataaaggttacagaatatttttccataattttcttgtatagcagtgcagctttttcctttgtggtgtaaatagcaaagcaagcaagagttctattactaaacacagcatgactcaaaaaacttagcaattctgaaggaaagtccttggggtcttctacctttctcttcttttttggaggagtagaatgttgagagtcagcagtagcctcatcatcactagatggcatttcttctgagcaaaacaggttttcctcattaaaggcattccaccactgctcccattcatcagttccataggttggaatctaaaatacacaaacaattagaatcagtagtttaacacattatacacttaaaaattttatatttaccttagagctttaaatctctgtaggtagtttgtccaattatgtcacaccacagaagtaaggttccttcacaaagatccggaccaaagcggccatcgtgcctccccactcctgcagttcgggggcatggatgcgcggatagccgctgctggtttcctggatgccgacggatttgcactgccggtagaactccgcgaggtcgtccagcctcaggcagcagctgaaccaactcgcgaggggatcgagcccggggtgggcgaagaactccagcatgagatccccgcgctggaggatcatccagccggcgtcccggaaaacgattccgaagcccaacctttcatagaaggcggcggtggaatcgaaatctcgtgatggcaggttgggcgtcgcttggtcggtcatttcgaaccccagagtcccgctcagaagaactcgtcaagaaggcgatagaaggcgatgcgctgcgaatcgggagcggcgataccgtaaagcacgaggaagcggtcagcccattcgccgccaagctcttcagcaatatcacgggtagccaacgctatgtcctgatagcggtccgccacacccagccggccacagtcgatgaatccagaaaagcggccattttccaccatgatattcggcaagcagcatcgccatgggtcacgacgagatcctcgccgtcgggcatgcgcgccttgagcctggcgaacagttcgctgcgcgagcccctgatgctcttcgtccagatcatcctgatcgacaagaccggcttccatccgagtacgtgctcgctcgatgcgatgtttcgcttggtggtcgaatgggcaggtagccggatcaagcgtatgcagccgccgcattgcatcagccatgatggatactttctcggcaggagcaaggtgagatgacaggagatcctgccccggcacttcgcccaatagcagccagtcccttcccgcttcagtgacaacgtcgagcacagctgcgcaaggaacgcccgtcgtggccagccacgatagccgcgctgcctcgtcctgcagttcattcagggcaccggacaggtcggtcttgacaaaaagaaccgggcgcccctgcgctgacagccggaacacggcggcatcagagcagccgattgtctgttgtgcccagtcatagccgaatagcctctccacccaagcggccggagaacctgcgtgcaatccatcttgttcaatcatgcgaaacgatcctcatcctgtctcttgatcagatcttgatcccctgcgccatcagatccttggcggcaagaaagccatccagtttactttgcagggcttcccaaccttaccagagggcgccccagctggcaattccggttcgcttgctgtccataaaaccgcccagtctagctatcgccatgtaagcccactgcaagctacctgctttctctttgcgcttgcgttttcccttgtccagatagcccagtagctgacattcatccggggtcagcaccgtttctgcggactggctttctacgtgttccgcttcctttagcagcccttgcgccctgagtgcttgcggcagcgtgaagctttttgcaaaagcctaggcctccaaaaaagcctcctcactacttctggaatagctcagaggccgaggcgcctcggcctctgcataaataaaaaaaattagtcagccatggggcggagaatgggcggaactgggcggagttaggggcgggatgggcggagttaggggcgggactatggttgctgactaattgagatgcatgctttgcatacttctgcctgctggggagcctggggactttccacacctggttgctgactaattgagatgcatgctttgcatacttctgcctgctggggagcctggggactttccacaccctaactgacacacattccacagccggatctgcaggacccaacgctgcccgagatgcgccgcgtgcggctgctggagatggcggacgcgatggatatgttctgccaagggttggtttgcgcattcacagttctccgcaagaattgattggctccaattcttggagtggtgaatccgttagcgaggtgccgccggcttccattcaggtcgaggtggcccggctccatgcaccgcgacgcaacgcggggaggcagacaaggtatagggcggcgcctacaatccatgccaacccgttccatgtgctcgccgaggcggcataaatcgccgtgacgatcagcggtccaatgatcgaagttaggctggtaagagccgcgagcgatccttgaagctgtccctgatggtcgtcatctacctgcctggacagcatggcctgcaacgcgggcatcccgatgccgccggaagcgagaagaatcataatggggaaggccatccagcctcgcgtcgcgaacgccagcaagacgtagcccagcgcgtcggccgccatgccggcgataatggcctgcttctcgccgaaacgtttggtggcgggaccagtgacgaaggcttgagcgagggcgtgcaagattccgaataccgcaagcgacaggccgatcatcgtcgcgctccagcgaaagcggtcctcgccgaaaatgacccagagcgctgccggcacctgtcctacgagttgcatgataaagaagacagtcataagtgcggcgacgatagtcatgccccgcgcccaccggaaggagctgactgggttgaaggctctcaagggcatcggtcga

SEQ ID NO: 5556 - DNA, 1625 bp, Homo sapiens
atccagacatgataagatacattgatgagtttggacaaaccacaactagaatgcagtgaaaaaaatgctttatttgtgaaatttgtgatgctattgctttatttgtaaccattataagctgcaataaacaagttaacaacaacaattgcattcattttatgtttcaggttcagggggaggtgtgggaggttttttaaagcaagtaaaacctctacaaatgtggtatggctgattatgatctctagtcaaggcactatacatcaaatattccttattaacccctttacaaattaaaaagctaaaggtacacaatttttgagcatagttattaatagcagacactctatgcctgtgtggagtaagaaaaaacagtatgttatgattataactgttatgcctacttataaaggttacagaatatttttccataattttcttgtatagcagtgcagctttttcctttgtggtgtaaatagcaaagcaagcaagagttctattactaaacacagcatgactcaaaaaacttagcaattctgaaggaaagtccttggggtcttctacctttctcttcttttttggaggagtagaatgttgagagtcagcagtagcctcatcatcactagatggcatttcttctgagcaaaacaggttttcctcattaaaggcattccaccactgctcccattcatcagttccataggttggaatctaaaatacacaaacaattagaatcagtagtttaacacattatacacttaaaaattttatatttaccttagagctttaaatctctgtaggtagtttgtccaattatgtcacaccacagaagtaaggttccttcacaaagatccggaccaaagcggccatcgtgcctccccactcctgcagttcgggggcatggatgcgcggatagccgctgctggtttcctggatgccgacggatttgcactgccggtagaactccgcgaggtcgtccagcctcaggcagcagctgaaccaactcgcgaggggatcgagcccggggtgggcgaagaactccagcatgagatccccgcgctggaggatcatccagccggcgtcccggaaaacgattccgaagcccaacctttcatagaaggcggcggtggaatcgaaatctcgtgatggcaggttgggcgtcgcttggtcggtcatttcgaaccccagagtcccgctcagaagaactcgtcaagaaggcgatagaaggcgatgcgctgcgaatcgggagcggcgataccgtaaagcacgaggaagcggtcagcccattcgccgccaagctcttcagcaatatcacgggtagccaacgctatgtcctgatagcggtccgccacacccagccggccacagtcgatgaatccagaaaagcggccattttccaccatgatattcggcaagcaggcatcgccatgggtcacgacgagatcctcgccgtcgggcatgcgcgccttgagcctggcgaacagttcggctggcgcgagcccctgatgctcttcgtccagatcatcctgatcgacaagaccggcttccatccgagtacgtgctcgctcgatgcgatctttcgctcggtagaccatcgtcaggtcgccggatcatgcgcatcagcctcc

SEQ ID NO: 5557 - DNA, 5620 bp, Homo sapiens
  SITE (5105): n equals a,t,g, or c
  SITE (5106): n equals a,t,g, or c
  SITE (5539): n equals a,t,g, or c
  SITE (5540): n equals a,t,g, or c
  SITE (5547): n equals a,t,g, or c
  SITE (5549): n equals a,t,g, or c
  SITE (5558): n equals a,t,g, or c
  SITE (5561): n equals a,t,g, or c
  SITE (5562): n equals a,t,g, or c
  SITE (5563): n equals a,t,g, or c
  SITE (5565): n equals a,t,g, or c
  SITE (5569): n equals a,t,g, or c
  SITE (5578): n equals a,t,g, or c
  SITE (5581): n equals a,t,g, or c
gaattcttgaagacgaaagggcctcgtgatacgcctatttttataggttaatgtcatgataataatggtttcttagacgtcaggtggcacttttcggggaaatgtgcgcggaacccctatttgtttatttttctaaatacattcaaatatgtatccgctcatgagacaataaccctgataaatgcttcaataatattgaaaaaggaagagtatgagtattcaacatttccgtgtcgcccttattcccttttttgcggcattttgccttcctgtttttgctcacccagaaacgctggtgaaagtaaaagatgctgaagatcagttgggtgcacgagtgggttacatcgaactggatctcaacagcggtaagatccttgagagttttcgccccgaagaacgttttccaatgatgagcacttttaaagttctgctatgtggcgcggtattatcccgtattgacgccgggcaagagcaactcggtcgccgcatacactattctcagaatgacttggttgagtactcaccagtcacagaaaagcatcttacggatggcatgacagtaagagaattatgcagtgctgccataaccatgagtgataacactgcggccaacttacttctgacaacgatcggaggaccgaaggagctaaccgcttttttgcacaacatgggggatcatgtaactcgccttgatcgttgggaaccggagctgaatgaagccataccaaacgacgagcgtgacaccacgatgcctgtagcaatggcaacaacgttgcgcaaactattaactggcgaactacttactctagcttcccggcaacaattaatagactggatggaggcggataaagttgcaggaccacttctgcgctcggcccttccggctggctggtttattgctgataaatctggagccggtgagcgtgggtctcgcggtatcattgcagcactggggccagatggtaagccctcccgtatcgtagttatctacacgacggggagtcaggcaactatggatgaacgaaatagacagatcgctgagataggtgcctcactgattaagcattggtaactgtcagaccaagtttactcatatatactttagattgatttaaaacttcatttttaatttaaaaggatctaggtgaagatcctttttgataatctcatgaccaaaatcccttaacgtgagttttcgttccactgagcgtcagaccccgtagaaaagatcaaaggatcttcttgagatcctttttttctgcgcgtaatctgctgcttgcaaacaaaaaaaccaccgctaccagcggtggtttgtttgccggatcaagagctaccaactctttttccgaaggtaactggcttcagcagagcgcagataccaaatactgtccttctagtgtagccgtagttaggccaccacttcaagaactctgtagcaccgcctacatacctcgctctgctaatcctgttaccagtggctgctgccagtggcgataagtcgtgtcttaccgggttggactcaagacgatagttaccggataaggcgcagcggtcgggctgaacggggggttcgtgcacacagcccagcttggagcgaacgacctacaccgaactgagatacctacagcgtgagctatgagaaagcgccacgcttccgaagggagaaaggcggacaggtatccggtaagcggcagggtcggaacaggagagcgcacgagggagcttccagggggaaacgcctggtatctttatagtcctgtcgggtttcgccacctctgacttgagcgtcgatttttgtgatgctcgtcagggggcggagcctatggaaaaacgccagcaacgcgcctttttacggttcctggccttttgctggccttttgctcacatgttctttcctgcgttatcccctgattctgtggataaccgtattaccgcctttgagtgagctgataccgctcgccgcagccgaacgaccgagcgcagcgagtcagtgagcgaggaagcggaagagcgctgacttccgcgtttccagactttacgaaacacggaaaccgaagaccattcatgttgttgctcaggtcgcagacgttttgcagcagcagtcgcttcacgttcgctcgcgtatcggtgattcattctgctaaccagtaaggcaaccccgccagcctagccgggtcctcaacgacaggagcacgatcatgcgcacccgtcagatccagacatgataagatacattgatgagtttggacaaaccacaactagaatgcagtgaaaaaaatgctttatttgtgaaatttgtgatgctattgctttatttgtaaccattataagctgcaataaacaagttaacaacaacaattgcattcattttatgtttcaggttcagggggaggtgtgggaggttttttaaagcaagtaaaacctctacaaatgtggtatggctgattatgatctctagtcaaggcactatacatcaaatattccttattaacccctttacaaattaaaaagctaaaggtacacaatttttgagcatagttattaatagcagacactctatgcctgtgtggagtaagaaaaaacagtatgttatgattataactgttatgcctacttataaaggttacagaatatttttccataattttcttgtatagcagtgcagctttttcctttgtggtgtaaatagcaaagcaagcaagagttctattactaaacacagcatgactcaaaaaacttagcaattctgaaggaaagtccttggggtcttctacctttctcttcttttttggaggagtagaatgttgagagtcagcagtagcctcatcatcactagatggcatttcttctgagcaaaacaggttttcctcattaaaggcattccaccactgctcccattcatcagttccataggttggaatctaaaatacacaaacaattagaatcagtagtttaacacattatacacttaaaaattttatatttaccttagagctttaaatctctgtaggtagtttgtccaattatgtcacaccacagaagtaaggttccttcacaaagatccggaccaaagcggccatcgtgcctccccactcctgcagttcgggggcatggatgcgggatagccgctgctggtttcctggatgccgacggatttgcactgccggtagaactccgcgaggtcgtccagcctcaggcagcagctgaaccaactcgcgaggggatcgagcccggggtgggcgaagaactccagcatgagatccccgcgctggaggatcatccaagcggcgtcccggaaaacgattccgaagcccaacctttcatagaaggcggcggtggaatcgaaatctcgtgatggcaggttgggcgtcgcttggtcggtcatttcgaaccccagagtcccgctcagaagaactcgtcaagaaggcgatagaaggcgatgcgctgcgaatcgggagcggcgataccgtaaagcacgaggaagcggtcagcccattcgccgccaagctcttcagcaatatcacgggtagccaacgctatgtcctgatagcggtccgccacacccagccggccacagtcgatgaatccagaaaagcggccattttccaccatgatattcggcaagcaggcatcgccatgggtcacgacgagatcctcgccgtcgggcatgcgcgccttgagcctggcgaacagttcggctggcgcgagcccctgatgctcttcgtccagatcatcctgatcgacaagaccggcttccatccgagtacgtgctcgctcgatgcgatgtttcgcttggtggtcgaatgggcaggtagccggatcaagcgtatgcagccgccgcattgcatcagccatgatggatactttctcggcaggagcaaggtgagatgacaggagatcctgccccggcacttcgcccaatagcagccagtcccttcccgcttcagtgacaacgtcgagcacagctgcgcaaggaacgcccgtcgtggccagccacgatagccgcgctgcctcgtcctgcagttcattcagggcaccggacaggtcggtcttgacaaaaagaaccgggcgcccctgcgctgacagccggaacacggcggcatcagagcagccgattgtctgttgtgcccagtcatagccgaatagcctctccacccaagcggccggagaacctgcgtgcaatccatcttgttcaatcatgcgaaacgatcctcatcctgtctcttgatcagatcttgatcccctgcgccatcagatccttggcggcaagaaagccatccagtttactttgcagggcttcccaaccttaccagagggcgccccagctggcaattccggttcgcttgctgtccataaaaccgcccagtctagctatcgccatgtaagcccactgcaagctacctgctttctctttgcgcttgcgttttcccttgtccagatagcccagtagctgacattcatccggggtcagcaccgtttctgcggactggctttctacgtgttccgcttcctttagcagcccttgcgccctgagtgcttgcggcagcgtgaagctttttgcaaaagcctaggcctccaaaaaagcctcctcactacttctggaatagctcagagaggcgcctcggcctctgcataaataaaaaaaattagtcagccatggggcggagaatgggcggaactgggcggagttaggggcgggatgggcggagttaggggcgggactatggttgctgactaattgagatgcatgctttgcatacttctgcctgctggggagcctggggactttccacacctggttgctgactaattgagatgcatgctttgcatacttctgcctgctggggagcctggggactttccacaccctaactgacacacattccacagccggatctgcaggacccaacgctgcccgagatgcgccgcgtcgcgctggagatggcggacggatggatatgttctgccaagggttggtttgcgcattcacagttctccgcaagaattgattggctccaattcttggagtggtgaatccgttagcgaggtgccgccggcttccattcaggtcgaggtggcccggctccatgcaccgcgacgcaacnnggggaggcagacaaggtatagggcggcgctacaatccatgccaacccgttccatgtgctcgccgaggcgcataaatcgccgtgacgatcagcggtccaatgatcgaagttaggctggtaagagccgcgagcgatccttgaagctgtccctgatggtcgtcatctacctgcctggacagcatggcctgcaacgcgggatcccgatgccgccggaagcgagaagaatcataatggggaaggccatccagcctcgcgtcgcgaacgccagcaagacgtagcccagcgcgtcggccgccatgccggcgataatggcctgcttctcgccgaaacgtttggtggcgggaccagtgacgaaggcttgagcgagggcgtgcaagattccgaataccgcaagcgacaggccgatcatcgtcgcgctccagcgaaagcggttnncgtcgangnaaatgaccnagnnngngtgncggcacctntcntacgaggttgcatgataaagaggacagtcataagtgcgg

SEQ ID NO: 5558 - DNA, 1359 bp, Homo sapiens
atccagacatgataagatacattgatgagtttggacaaaccacaactagaatgcagtgaaaaaaatgctttatttgtgaaatttgtgatgctattgctttatttgtaaccattataagctgcaataaacaagttaacaacaacaattgcattcattttatgtttcaggttcagggggaggtgtgggaggttttttaaagcaagtaaaacctctacaaatgtggtatggctgattatgatctctagtcaaggcactatacatcaaatattccttattaacccctttacaaattaaaaagctaaaggtacacaatttttgagcatagttattaatagcagacactctatgcctgtgtggagtaagaaaaaacagtatgttatgattataactgttatgcctacttataaaggttacagaatatttttccataattttcttgtatagcagtgcagctttttcctttgtggtgtaaatagcaaagcaagcaagagttctattactaaacacagcatgactcaaaaaacttagcaattctgaaggaaagtccttggggtcttctacctttctcttcttttttggaggagtagaatgttgagagtcagcagtagcctcatcatcactagatggcatttcttctgagcaaaacaggttttcctcattaaaggcattccaccactgctcccattcatcagttccataggttggaatctaaaatacacaaacaattagaatcagtagtttaacacattatacacttaaaatttttatatttaccttaaagctttaaatctctgtaggtagtttgtccaattatgtcacaccacagaagtaaggttccttcacaaagatccggaccaaagcggccatcgtgcctccccactcctgcagttcgggggcatggatgcgcggatagccgctgctggtttcctggatgccgacggatttgcactgccggtagaactccgcgagtcgtccagcctcaggcagcagctgaaccaactcgcgaggggatcgagcccggggtgggcgaagaactcctgcatgagatccccgcgctggaggatcatccagccggcgtcccggaaaacgattccgaagcccaacctttcatagaaggcggcggtggaatcgaaatctcgtgatggcaggttggcgtcgcttggtcggtcatttcgaaccccagagtcccgctcagaagaactcgtcaagaaggcgatagaagcgatgcgctgctgaatcgggagcggcgataccgtaaagcacgaggaagcggtcagcccattcgcgccaagctcttcagcaatatcacgggtagccaacgctatgtcctgatagcggtccgccacacccagccggcca

SEQ ID NO: 5559 - DNA, 5715 bp, Homo sapiens
  SITE (2073): n equals a,t,g, or c
  SITE (2081): n equals a,t,g, or c
  SITE (2082): n equals a,t,g, or c
  SITE (3445): n equals a,t,g, or c
  SITE (3446): n equals a,t,g, or c
  SITE (3449): n equals a,t,g, or c
  SITE (3454): n equals a,t,g, or c
  SITE (3455): n equals a,t,g, or c
  SITE (3458): n equals a,t,g, or c
  SITE (3461): n equals a,t,g, or c
  SITE (3465): n equals a,t,g, or c
  SITE (3466): n equals a,t,g, or c
  SITE (3467): n equals a,t,g, or c
  SITE (3475): n equals a,t,g, or c
  SITE (3481): n equals a,t,g, or c
  SITE (3483): n equals a,t,g, or c
  SITE (3499): n equals a,t,g, or c
  SITE (3570): n equals a,t,g, or c
  SITE (3571): n equals a,t,g, or c
  SITE (4610): n equals a,t,g, or c
  SITE (4615): n equals a,t,g, or c
  SITE (5057): n equals a,t,g, or c
  SITE (5058): n equals a,t,g, or c
  SITE (5181): n equals a,t,g, or c
  SITE (5454): n equals a,t,g, or c
  SITE (5459): n equals a,t,g, or c
  SITE (5461): n equals a,t,g, or c
  SITE (5504): n equals a,t,g, or c
  SITE (5545): n equals a,t,g, or c
  SITE (5546): n equals a,t,g, or c
  SITE (5550): n equals a,t,g, or c
  SITE (5591): n equals a,t,g, or c
  SITE (5594): n equals a,t,g, or c
  SITE (5599): n equals a,t,g, or c
  SITE (5600): n equals a,t,g, or c
  SITE (5616): n equals a,t,g, or c
  SITE (5641): n equals a,t,g, or c
  SITE (5644): n equals a,t,g, or c
  SITE (5651): n equals a,t,g, or c
  SITE (5697): n equals a,t,g, or c
gaattcttgaagacgaaagggcctcgtgatacgcctaattttataggttaatgtcatgataataatggtttcttagacgtcaggtggcacttttcggggaaatgtgcgcggaacccctatttgtttatttttctaaatacattcaaatatgtatccgctcatgagacaataaccctgataaatgcttcaataatattgaaaaaggaagagtatgagtattcaacatttccgtgtcgcccttattcccttttttgcggcattttgccttcctgtttttgctcacccagaaacgctggtgaaagtaaaagatgctgaagatcagttgggtgcacgagtgggttacatcgaactggatctcaacagcggtaagatccttgagagttttcgccccgaagaacgttttccaatgatgagcacttttaaagttctgctatgtggcgcggtattatcccgtattgacgccgggcaagagcaactcggtcgccgcatacactattctcagaatgacttggttgagtactcaccagtcacagaaaagcatcttacggatggcatgacagtaagagaattatgcagtgctgccataaccatgagtgataacactgcggccaacttacttctgacaacgatcggaggaccgaaggagctaaccgcttttttgcacaacatgggggatcatgtaactcgccttgatcgttgggaaccggagctgaatgaagccataccaaacgacgagcgtgacaccacgatgcctgcagcaatggcaacaacgttcgcaaactattaactggcgaactacttactctagcttcccggcaacaattaatagactggatggaggcggataaagttgcaggaccacttctgcgctcggcccttccggctggctggtttattgctgataaatctggagccggtgagcgtgggtctcgcggtatcattgcagcactggggccagatggtaagccctcccgtatcgtagttatctacacgacggggagtcaggcaactatggatgaacgaaatagacagatcgctgagataggtgcctcactgattaagcattggtaactgtcagaccaagtttactcatatatactttagattgatttaaaacttcatttttaatttaaaaggatctaggtgaagatcctttttgataatctcatgaccaaaatcccttaacgtgagttttcgttccactgagcgtcagaccccgtagaaaagatcaaaggatcttcttgagatcctttttttctgcgcgtaatctgctgcttgcaaacaaaaaaaccaccgctaccagcggtggtttgtttgccggatcaagagctaccaactctttttccgaaggtaactggcttcagcagagcgcagataccaaatactgtccttctagtgtagccgtagttaggccaccacttcaagaactctgtagcaccgcctacatacctcgctctgctaatcctgttaccagtggctgctgccagtggcgataagtcgtgtcttaccgggttggactcaagacgatagttaccggataaggcgcagcggtcgggctgaacggggggttcgtgcacacagcccagcttggagcgaacgacctacaccgaactgagatacctacagcgtgagctatgagaaagcgccacgcgttccgaaggagaaaggcggacaggtatccggtaagcggcagggtcggaacaggagagcgcacgagggagcttccagggggaaacgcctggtatctttatagtctgtcgggtttcgccacctctgacttgagcgtcgatttttgtgatgctcgtcaggggggggagcctatggaaaaacgccagcaacgcggcctttttacggttcctggccttttgctggccttttgctcacatgttctttcctgcgttatcccctgattctgtggataaccgtattaccgcctttgagtgagctgatatcgctcgccgcagccgaacgaccgagcgcagtcagtgagcgaggaagcgaaagagcgctgacttccgcgtttccagactttacgaaacacggaaaccgaagaccattcatgttgttgctcangtcgcagnntttttgcagcagcagtcgcttcacgttcgctcggtatcggtgattcattctgctaaccagtaaggcaaccccgccagcctagccgggtcctcaacgacaggagcacgatcatgcgcacccgtcagatccagacatgataagatacattgatgagtttggacaaaccacaactagaatgcagtgaaaaaaatgctttatttgtgaaatttgtgatgctattgctttatttgtaaccattataagctgcaataaacaagttaacaacaacaattgcattcattttatgtttcaggttcagggggaggtgtgggaggttttttaaagcaagtaaaacctctacaaatgtggtatggctgattatgatctctagtcaaggcactatacatcaaatattccttattaacccctttacaaattaaaaagctaaaggtacacaatttttgagcatagttattaatagcagacactctatgcctgtgtggagtaagaaaaaacagtatgttatgattataactgttatgcctacttataaaggttacagaatatttttccataattttcttgtatagcagtgcagctttttcctttgtggtgtaaatagcaaagcaagcaagagttctattactaaacacagcatgactcaaaaaacttagcaattctgaaggaaagtccttggggtcttctacctttctcttcttttttggaggagtagaatgttgagagtcagcagtagcctcatcatcactagatggcatttcttctgagcaaaacaggttttcctcattaaaggcattccaccactgctcccattcatcagttccataggttggaatctaaaatacacaaacaattagaatcagtagtttaacacattatacacttaaaaattttatatttaccttagagctttaaatctctgtaggtagtttgtccaattatgtcacaccacagaagtaaggttccttcacaaagatccggaccaaagcggccatcgtgcctccccactcctgcagttcgggggcatggatgcgcggatagccgctgctggtttcctggatgccgacggatttgcactgccggtagaactccgcgagtcggtccagcctcaggcagcagctgaaccaactcgcgaggggatcgagcccggggtgggcgaaagaactccagcatgagatccccgcgctggaggatcatccagccggcgtcccggaaaacgattccgaagcccaacctttcatagaaggcggcggtggaatcgaaatctcgtgatggcaggttgggcgtcgcttggtcggtcatttcgaaccccagagtcccgctcagaagaactcgtcaagaaggcgatagaaggcgatgcgctgcnnatngcggnncgngcnatannntaaagcangaggangnggtcagcccaattcgncgccaagctcgttcaggaatatcacgggtagccaacgctatgtcctgatagcggtccgccacacccagccnnccacagtcggatgaatccaaaaaaggggccattttccaccattatattcgggaagggaggatggcgtgggtcacgacgagatcctcgccggtcgggatgcgcccttgaacctcgcgaacaattctcttcggagcccctaatgctctcgtccacatcatccttacaagaccggcttccatcccgagtacgtgctcgctcgatgcgatgtttcgcttgggtggtccgaatgggcaggtagccggatcaagcgtatgcagccgccgcattgcatcagccatgatggatactttctcggcaggagcaaggtgagatgacaggagatcctgccccggcacttcgcccaatagcagccagtcccttcccgcttcagtgacaacgtcgagcacacgtgcgcaaggaacgcccgtctggccagccacgatagccgcgctgcctcgtcctgcagttcattcagggcaccggacaggtcggtcttgacaaaaagaaccggggcccctgcgctgacagccggaacacggcggcatcagagcagccgattgtctgttgtgcccagtcatagccgaatagcctctccacccaagcggccggagaacctgcgtgcaatccatcttgttcaatcatgcgaaacgatcctcatcctgtctcttgatcagatcttgatcccctgcgccatcagatccttggcggcaagaaagccatccagtttactttgcagggcttcccaaccttaccagagggcgccccagctggcaattccggttcgcttgctgtccataaaaccgcccagtctagctatcgccatgtaagcccactgcaagctacctgctttctctttgcgcttgcgttttcccttgtccagatagcccagtagctgacattcatccggggtcagcaccgtttctgcggactggctttctacgtgttccgcttcctttagcagccccttgcgccctgagtgcttgcggcagcgtgaagctttttgcaaaagcctaggcctccaaaaaagcctcctcactacttctggaatagctcagaggcngaggnggcctcggcctctgcataaataaaaaaaattagtcagccatggggcggagaatgggcggaactgggcggagttaggggcgggatgggcggagttaggggcgggactatggttgctgactaattgagatgcatgctttgcatacttctgcctgctggggagcctggggactttccacacctggttgctgactaattgagatgcatgctttgcatacttctgcctgctggggagcctggggactttccacaccctaactgacacacattccacagccggatctgcaggacccaacgctgcccgagatgcgccggcggctgctggagatggcggacgcgatggatatgttctgccaagggttggtttgcgcattcacagttctccgcaagaattgattggctccaattcttggagtggtgaatccgttaggcgaggtgccgccgnntctccattcaggtgggaggtggcccggctccattgcaccgcgacgcaacgcggggagggcagacaaggtataggcggcgcctacaatccatgccaacccgttccatgtgctcgccgaggcgcnataaatcgccgtgacgatcagcggtccaatgatcgaagttaggctggtaagagccgcgagcgatccttgaagctgtccctgatggtcgtcatctacctgcctggacagcatggcctgcaacgcggcatcccgatgccgccggaagcgagaagaatcataatggggaaggccatccagcctcgcgtcgcgaacgccagcaagacgtagcccagcgcggtcggccgccatgccgcgataatggcctgcttctcgccgaaacgtttgggtggcggnaccantnaacgaaggctttgagcgagggcgtgcaagattccgaataccgnaagcgacaggccgatcatcgtcgcgctccagcaaacgggtnnctcncgaaaataacccagagcgctgccggcacctgtcctgcgggntgnatgannaagaagacagtcatangtgcggcgacgatagtcatgccccncgnccaccgnaagagctgactgggttgaaggctctcaagggcatcggtcgaggaantttcgggcggctttgctg

SEQ ID NO: 5560 - DNA, 1425 bp, Homo sapiens
  SITE (805): n equals a,t,g, or c
atccagacatgataagatacattgatgagtttggacaaaccacaactagaatgcagtgaaaaaaatgctttatttgtgaaatttgtgatgctattgctttatttgtaaccattataagctgcaataaacaagttaacaacaacaattgcattcattttatgtttcaggttcagggggaggtgtgggaggttttttaaagcaagtaaaacctctacaaatgtggtatggctgattatgatctctagtcaaggcactatacatcaaatattccttattaacccctttacaaattaaaaagctaaaggtacacaatttttgagcatagttattaatagcagacactctatgcctgtgtggagtaagaaaaaacagtatgttatgattataactgttatgcctacttataaaggttacagaatatttttccataattttcttgtatagcagtgcagctttttcctttgtggtgtaaatagcaaagcaagcaagagttctattactaaacacagcatgactcaaaaaacttagcaattctgaaggaaagtccttggggtcttctacctttctcttcttttttggaggagtagaatgttgagagtcagcagtagcctcatcatcactagatggcatttcttctgagcaaaacaggttttcctcattaaaggcattccaccactgctcccattcatcagttccataggttggaatctaaaatacacaaacaattagaatcagtagtttaacacattatacacttaaaaattttatatttaccttagagctttaaatcctctgtaggtagttngtccaattatgtcacaccacagaagtaaggttccttcacaaagattccggaccaaagcggccatcgtgcctccccactcctgcagttcgggggcatggatgcgcggatagccgctgctggtttcctgggatgccgacggatttgcactgccggtagaactccgcgaggtcgtccacctcaggcagcagctgaaccaactcgcgaggggatcgagcccggggtgggcgaagaactccagcatgagatccccgcgctggaggatcatccagccggcgtcccggaaaacgattccgaagcccaacctttcatagaaggcggcggtggaatcgaaatctcgtgatggcaggttgggcgtcgcttggtcggtcatttcgaaccccagagtcccgctcagaagaactcgtcaagaaggcgatagaaggcgatgcgctgcgaatcgggagcggcgataccgtaaagcacgaggaagcggtcagcccattcgccgccaagctcttcagcaatatcacgggtagccaacgctatgtcctgatagggtccgccacacccagccggccacagtcgatgaatccagaaaagcggccattttccaccatgatattcggcaagcaggcatcgcc

SEQ ID NO: 5561 - DNA, 1424 bp, Homo sapiens
atccagacatgataagatacattgatgagtttggacaaaccacaactagaatgcagtgaaaaaaatgctttatttgtgaaatttgtgatgctattgctttatttgtaaccattataagctgcaataaacaagttaacaacaacaattgcattcattttatgtttcaggttcagggggaggtgtgggaggttttttaaagcaagtaaaacctctacaaatgtggtatggctgattatgatctctagtcaaggcactatacatcaaatattccttattaacccctttacaaattaaaaagctaaaggtacacaatttttgagcatagttattaatagcagacactctatgcctgtgtggagtaagaaaaaacagtatgttatgattataactgttatgcctacttataaaggttacagaatatttttccataattttcttgtatagcagtgcagctttttcctttgtggtgtaaatagcaaagcaagcaagagttctattactaaacacagcatgactcaaaaaacttagcaattctgaaggaaagtccttggggtcttctacctttctcttcttttttggaggagtagaatgttgagagtcagcagtagcctcatcatcactagatggcatttcttctgagcaaaacaggttttcctcattaaaggcattccaccactgctcccattcatcagttccataggttggaatctaaaatacacaaacaattagaatcagtagtttaacacattatacacttaaaaattttatatttaccttagagctttaaatctctgtaggtagtttgtccaattatgtcacaccacagaagtaaggttccttcacaaagatccggaccaaagcggccatcgtgcctccccactcctgcagttcgggggcatggatgcgcggatagccgctgctggtttcctggatgccgacggatttgcactgccggtagaactccgcgaggtcgtccagcctcaggcagcagctgaaccaactcgcgaggggatcgagcccggggtgggcgaagaactccagcatgagatccccgcgctggaggatcatccagccggcgtcccggaaaacgattccgaagcccaacctttcatagaaggcggcggtggaatcgaaatctcgtgatggcaggttgggcgtcgcttggtcggtcatttcgaaccccagagtcccgctcagaagaactcgtcaagaaggcgatagaaggcgatgcgctgcgaatcgggagcggcgataccgtaaagcacgaggaagcggtcagcccattcgccgccaagctcttcagcaatatcacgggtagccaacgctatgtcctgatagcggtccgccacacccagccggccacagtcgatgaatccagaaaagcggccattttccaccatgatattcggcaagcaggcatcgcc

SEQ ID NO: 5562 - DNA, 2325 bp, Homo sapiens
  SITE (492): n equals a,t,g, or c
  SITE (827): n equals a,t,g, or c
  SITE (862): n equals a,t,g, or c
  SITE (867): n equals a,t,g, or c
  SITE (888): n equals a,t,g, or c
  SITE (933): n equals a,t,g, or c
  SITE (948): n equals a,t,g, or c
  SITE (949): n equals a,t,g, or c
  SITE (1189): n equals a,t,g, or c
  SITE (1233): n equals a,t,g, or c
  SITE (1291): n equals a,t,g, or c
  SITE (1443): n equals a,t,g, or c
  SITE (1445): n equals a,t,g, or c
  SITE (1467): n equals a,t,g, or c
  SITE (1471): n equals a,t,g, or c
  SITE (1486): n equals a,t,g, or c
  SITE (1487): n equals a,t,g, or c
  SITE (1492): n equals a,t,g, or c
  SITE (1503): n equals a,t,g, or c
  SITE (1509): n equals a,t,g, or c
  SITE (1511): n equals a,t,g, or c
  SITE (1532): n equals a,t,g, or c
  SITE (1538): n equals a,t,g, or c
  SITE (1763): n equals a,t,g, or c
  SITE (1842): n equals a,t,g, or c
atccagacatgataagatacattgatgagtttggacaaaccacaactagaatgcagtgaaaaaaatgctttatttgtgaaatttgtgatgctattgctttatttgtaaccattataagctgcaataaacaagttaacaacaacaattgcattcattttatgtttcaggttcagggggaggtgtgggaggttttttaaagcaagtaaaacctctacaaatgtggtatggctgattatgatctctagtcaaggcactatacatcaaatattccttattaacccctttacaaattaaaaagctaaaggtacacaatttttgagcatagttattaatagcagacactctatgcctgtgtggagtaagaaaaaacagtatgttatgattataactgttatgcctacttataaaggttacagaatatttttccataattttcttgtatagcagtgcagctttttcctttgtggtgtaaatagcaaagcaagcaagagngtctattactaaacacagcatgactcaaaaaacttagcaattctgaaggaaagtccttggggtcttctacctttctcttcttttttggaggagtagaatgttgagagtcagcagtagcctcatcatcactagatggcatttcttctgagcaaaacaggttttcctcattaaaggcattccaccactgctcccattcatcagttccataggttggaatctaaaatacacaaacaattagaatcagtagtttaacacattatacacttaaaaattttatatttaccttagagctttaaatctctgtaggtagtttgtccaattatgtcacaccacanaagtaaggttccttcacaaagatccggaccaaaancggcnatcgtgcctccccactcctgnagttcgggggcatggatgcgcggatagccgctgctggtttcctgnatgccgacggatttnnactgccggtagaactccgcgaggtcgtccagcctcaggcagcagctgaaccaactcgcgaggggatcgagcccggggtgggcgaagaactccagcatgagatccccgcgctggaggatcatccagccggcgtcccggaaaacgattccgaagcccaacctttcatagaaggcggcggtggaatcgaaatctcgtgatggcaggttgggcgtcgcttggtcggtcatttcgaaccccagantcccgctcagaagaactcgtgtaagaaggcgatagaaggcgatncgctgcgaatcgggagcggcgataccgtaaagcacgaggaagcggtcagcccattcgncgccaagctcttcagcaatatcacgggtagccaacgctatgtcctgatacggtccgccacacccagccggccacagtcgatgaatccagaaaagcggccattttccaccatgatattcggcaagcaggcatcgccatgggtcacgacgagancntcgccgtcgggcatgcgcgccntgancctggcgaacagttnngttgngcgcgagcccntgatgntnttcgtccagatcatcctgatngacaanaccggcttccatccgagtacgtgctcgctcgatgcgatgtttcgcttggtggtcgaatgggcaggtagccggatcaagcgtatgcagccgccgcattgcatcagccatgatggatactttctcggcaggagcaaggtgagatgacaggagatcctgccccggcacttcgcccaatagcagccagtcccttcccgcttcagtgacaacgtcgagcacagctgcgcnaggaacgcccgtcgtggccagccacgatagccgcgctgcctcgtcctgcagttcattcagggcaccggacaggtcggtnttgacaaaaagaaccgggcgcccctgcgctgacagccggaacacggcggcatcagagcagccgattgttctgttgtgcccagtcatagccgaatagcctctccacccaagcggccggagaacctgcgtgcaatccatcttgttcaatcatgcgaaacgatcctcatcctgtttcttgatcagatcttgatcccctgcgccatcagatccttggcggcaagaaagccatccagtttactttgcagggcttcccaaccttaccagagggcgccccagctggcaattccggttcgcttgctgtccataaaaccgcccagtctagctatcgccatgtaagcccactgcaagctacctgctttctctttgcgcttgacttccccttgtccagatagcccagtagctgacattcatccggggtcagcaccgtttctgcggactggctttcttacgtgttccgcttcctttagcagcccttgcgccctga

SEQ ID NO: 5563 - DNA, 1424 bp, Homo sapiens; identical to SEQ ID NO: 5561

SEQ ID NO: 5564 - DNA, 2210 bp, Homo sapiens
  SITE (1451): n equals a,t,g, or c
  SITE (1668): n equals a,t,g, or c
  SITE (1760): n equals a,t,g, or c
gaattcttgaagacgaaagggcctcgtgatacgcctatttttataggttaatgtcatgataataatggtttcttagacgtcaggtggcacttttcggggaaatgtgcgcggaacccctatttgtttatttttctaaatacattcaaatatgtatccgctcatgagacaataaccctgataaatgcttcaataatattgaaaaaggaagagtatgagtattcaacatttccgtgtcgcccttattcccttttttgcggcattttgccttcctgtttttgctcacccagaaacgctggtgaaagtaaaagatgctgaagatcagttgggtgcacgagtgggttacatcgaactggatctcaacagcggtaagatccttgagagttttcgccccgaagaacgttttccaatgatgagcacttttaaagttctgctatgtggcgcggtattatcccgtattgacgccgggcaagagcaactcggtcgccgcatacactattctcagaatgacttggttgagtactcaccagtcacagaaaagcatcttacggatggcatgacagtaagagaattatgcagtgctgccataaccatgagtgataacactgcggccaacttacttctgacaacgatcggaggaccgaagagctaaccgcttttttgcacaacatgggggatcatgtaactcgccttgatcgttgggaaccggagctgaatgaagccataccaaacgacgagcgtgacaccacgatgcctgcagcaatggcaacaacgttcgcaaactattaactggcgaactacttactctagcttcccggcaacaattaatagactggatggaggcggataaagttgcaggaccacttctgcgctcggcccttccggctggctggtttattgctgataaatctggagccggtgagcgtgggtctcgcggtatcattgcagcactggggccagatggtaagccctcccgtatcgtagttatctacacgacggggagtcaggcaactatggatgaacgaaatagacagatcgctgagataggtgcctcactgattaagcattggtaactgtcagaccaagtttactcatatatactttagattgatttaaaacttcatttttaatttaaaaggatctaggtgaagatcctttttgataatctcatgaccaaaatcccttaacgtgagttttcgttccactgagcgtcagaccccgtagaaaagatcaaaggatcttcttgagatcctttttttctgcgcgtaatctgctgcttgcaaacaaaaaaaccaccgctaccagcggtggtttgtttgccggatcaagagctaccaactctttttccgaaggtaactggcttcagcagagcgcagataccaaatactgtccttctagtgtagccgtagttaggccaccacttcaagaactctgtagcaccgcctacatacctngctctgctaatcctgttaccagtggctgctgccagtggcgataagtcgtgtcttaccgggttggactcaagacgatagttaccggataaggcgcagcggtcgggctgaacggggggttcgtgcacacagcccagcttggagcgaacgacctacaccgaactgagatacctacagcgtgagctatgagaaagcgccacgctttccgaagggagaaagncggacaggtatccggtaagcggcagggtcggaacaggagagcgcacgagggagcttccagggggaaacgcctggtatctttatagtcctgtngggtttcgccacctctgacttgagcgtcgatttttgtgatgctcgtcagggggcggagcctatggaaaaacgccagcaacgcggcctttttacggttcctggccttttgctggccttttgctcacatgttctttcctgcgttatcccctgattctgtggataaccgtattaccgcctttgagtgagctgataccgctcgccgcagccgaacgaccgagcgcagcgagtcagtgagcgaggaagcggaagagcgctgacttccgcgtttccagactttacgaaacacggaaaccgaagaccattcatgttgttgctcaggtcgcagacgttttgcagcagcagtcgcttcacgttcgctcgcgtatcggtgattcattctgctaaccagtaaggcaaccccgccagcctagccgggtcctcaacgacaggagcacgatcatgcgcacccgt

SEQ ID NO: 5565 - DNA, 2213 bp, Homo sapiens
  SITE (756): n equals a,t,g, or c
  SITE (1310): n equals a,t,g, or c
gaattcttgaagacgaaagggcctcgtgatacgcctatttttataggttaatgtcatgataataatggtttcttagacgtcaggtggcacttttcggggaaatgtgcgcggaacccctatttgtttatttttctaaatacattcaaatatgtatccgctcatgagacaataaccctgataaatgcttcaataatattgaaaaaggaagagtatgagtattcaacatttccgtgtcgcccttattcccttttttgcggcattttgccttcctgtttttgctcacccagaaacgctggtgaaagtaaaagatgctgaagatcagttgggtgcacgagtgggttacatcgaactggatctcaacagcggtaagatccttgagagttttcgccccgaagaacgttttccaatgatgagcacttttaaagttctgctatgtggcgcggtattatcccgtgttgacgccgggcaagagcaactcggtcgccgcatacactattctcagaatgacttggttgagtactcaccagtcacagaaaagcatcttacggatggcatgacagtaagagaattatgcagtgctgccataaccatgagtgataacactgcggccaacttacttctgacaacgatcggaggaccgaaggagctaaccgcttttttgcacaacatgggggatcatgtaactcgccttgatcgttgggaaccggagctgaatgaagccataccaaacgacgagcgtgacaccacgatgcctgnagcaatggcaacaacgttgcgcaaactattaactggcgaactacttactctaagcttcccggcaacaattaatagactggatggaggcggataaagttgcaggaccacttctgcgctcggcccttccggctggctggtttattgctgataaatctggagccggtgagcgtgggtctcgcggtatcattgcagcactggggccagatggtaagccctcccgtatcgtagttatctacacgacggggagtcaggcaactatggatgaacgaaatagacagatcgctgagataggtgcctcactgattaagcattggtaactgtcagaccaagtttactcatatatactttagattgatttaaaacttcatttttaatttaaaaggatctaggtgaagatcctttttgataatctcatgaccaaaatcccttaacgtgagttttcgttccactgagcgtcagaccccgtagaaaagatcaaaggatcttcttgagatcctttttttctgcgcgtaatctgctgcttgcaaacaaaaaaaccacgctaccagcggtgntttgtttgccggatcaagagctaccaactctttttccgaaggtaactggcttcagcagagcgcagataccaaatactgtccttctagtgtagccgtagttaggccaccacttcaagaactctgtagcaccgcctacatacctcgctctgctaatcctgttaccagtggctgctgccagtggcgataagtcgtgtcttaccgggttggactcaagacgatagttaccggataaggcgcagcggtcgggctgaacggggggttcgtgcacacagcccagcttggagcgaacgacctacaccgaactgagatacctacagcgtgagctatgagaaagcgccacgcttcccgaaggagaaaggcggacaggtatccggtaagcggcagggtcggaacaggagagcgcacgagggagcttccagggggaaacgcctggtatctttatagtcctgtcgggtttcgccacctctgacttgagcgtcgatttttgtgatgctcgtcaggggggcggagcctatggaaaaacgccagcaacgcggcctttttacggttcctggccttttgctggccttttgctcacatgttctttcctgcgttatcccctgattctgtggataaccgtattaccgcctttgagtgagctgataccgctcgccgcagccgaacgaccgagcgcagcgagtcagtgagcgaggaagcggaagagcgctgacttccgcgtttccagactttacgaaacacggaaaccgaagaccattcatgttgttgctcaggtcgcagacgttttgcagcaggcagtcgcttcacgttcgctcgcgtatcggtgattcattctgctaaccagtaaggcaaccccgccagcctagccgggtcctcaacgacaggagcacgatcatgcgcacccgt

SEQ ID NO: 5566 - DNA, 358 bp, Homo sapiens
agggagaaaggcggacaggtatccggtaagcggcagggtcggaacaggagagcgcacgagggagcttccagggggaaacgcctggtatctttatagtcctgtcgggtttcgccacctctgacttgagcgtcgatttttgtgatgctcgtcaggggggcggagcctatggaaaaacgccagcaacgcggcctttttacggttcctggccttttgctggccttttgctcacatgttctttcctgcgttatcccctgattctgtggataaccgtattaccgcctttgagtgagctgataccgctcgccgcagccgaacgaccgagcgcagcgagtcagtgagcgaggaagcggaagagcgc

SEQ ID NO: 5567 - DNA, 2215 bp, Homo sapiens
  SITE (849): n equals a,t,g, or c
  SITE (850): n equals a,t,g, or c
  SITE (924): n equals a,t,g, or c
  SITE (930): n equals a,t,g, or c
  SITE (1082): n equals a,t,g, or c
  SITE (1142): n equals a,t,g, or c
  SITE (1154): n equals a,t,g, or c
  SITE (1182): n equals a,t,g, or c
  SITE (1198): n equals a,t,g, or c
  SITE (1204): n equals a,t,g, or c
  SITE (1319): n equals a,t,g, or c
gaattcttgaagacgaaagggcctcgtgatacgcctatttttataggttaatgtcatgataataatggtttcttagacgtcaggtggcacttttcggggaaatgtgcgcggaacccctatttgtttatttttctaaatacattcaaatatgtatccgctcatgagacaataaccctgataaatgcttcaataatattgaaaaaggaagagtatgagtattcaacatttccgtgtcgcccttattcccttttttgcggcattttgccttcctgtttttgctcacccagaaacgctggtgaaagtaaaagatgctgaagatcagttgggtgcacgagtgggttacatcgaactggatctcaacagcggtaagatccttgagagttttcgccccgaagaacgttttccaatgatgagcacttttaaagttctgctatgtggcgcggtattatcccgtgttgacgccgggaaagagcaactcggtcgccgcatacactattctcagaatgacttggttgagtactcaccagtcacagaaaagcatcttacggatggcatgacagtaagagaattatgcagtgctgccataaccatgagtgataacactgcggccaacttacttctgacaacgatcggaggaccgaagagctaaccgcttttttgcaccaacatgggggatcatgtaactcgccttgatcgttgggaaccggagctgaatgaagccataccaaacgacgagcgtgacaccacgatgcctgtagcaatggcaacaacgttcggcaaactattaactggcgaactacttactctagcttcccggcaacaattaatagactggatggaggcggatanngttgcaggaccacttctgcgctcggcccttccggctggctggtttattgctgataaatctggagccggtgagcntgggtntcgcggtatcattgcagcactggggccagatggtaagccctcccgtatcgtagttatctacacgacggggagtcaaggcaactatggatgaacgaaatagacagatccgctgagataggtgcctcactgattaagcattggtaactgtcagnccaagtttactcatatatactttagattgatttaaaaccttcatttttaatttaaaaggntctaggtgaagntcctttttgataatctcatgaccaaaancccttaacgggagctntcggtnccactgagcgtcagaccccgtagaaaagttcaaaggttcttcttgagatcctttttttctgcgcgtaatctgctgcttgcaaacaaaaaaaccaccgctaccaggttttgctctntgccggatccaagagctaccaactctttttccgaagtaactggcttcagcagagcgcagataccaaatactgtccttctagtgtagccgtagttaggccaccacttcaagaactctgtagcaccgcctacatacctcgctctgctaatcctgttaccagtggctgctgcagtggcgataagtcgtgtcttaccgggttggactcaagacgatagttaccggataaggcgcagggtcgggctgaacggggggttcgtgcacacagcccagcttggagcgaacgacctacaccgaactgagatacctacagcgtgagctatgagaaagcgccacgcttcccgaagggagaaaggcggacaggtatccggtaagcggcagggtcggaacaggagagcgcacgagggagcttccagggggaaacgcctggtatctttatagtcctgtcgggtttcgccacctctgacttgagcgtcgatttttgtgatgctcgtcaggggggcggagcctatggaaaaacgccagcaacgcggcctttttacggttcctggccttttgctggccttttgctcacatgttctttcctgcgttatcccctgattctgtggataaccgtattaccgcctttgagtgagctgataccgctcgccgcagccgaacgaccgagcgcagcgagtcagtgagcgaggaagcggaagagcgctgacttccgcgtttccagactttacgaaacacggaaaccgaagaccattccatgttgttgctcaggtcgcagacgttttgcagcagcagtcgcttcacgttcgctcgcgtatcggtgattcattctgctaaccagtaaggcaaccccgccagcctagccgggtcctcaacgacaggagcacgatcatgcgcacccgt

SEQ ID NO: 5568 - DNA, 2212 bp, Homo sapiens
gaattcttgaagacgaaagggcctcgtgatacgcctatttttataggttaatgtcatgataataatggtttcttagacgtcaggtggcacttttcggggaaatgtgcgcggaacccctatttgtttatttttctaaatacattcaaatatgtatccgctcatgagacaataaccctgataaatgcttcaataatattgaaaaaggaagagtatgagtattcaacatttccgtgtcgcccttattcccttttttgcggcattttgccttcctgtttttgctcacccagaaacgctggtgaaagtaaaagatgctgaagatcagttgggtgcacgagtgggttacatcgaactggatctcaacagcggtaagatccttgagagttttcgccccgaagaacgttttccaatgatgagcacttttaaagttctgctatgtggcgcggtattatcccgtattgacgccgggcaagagcaactcggtcgccgcatacactattctcagaatgacttggttgagtactcaccagtcacagaaaagcatcttacggatggcatgacagtaagagaattatgcagtgctgccataaccatgagtgataacactgcggccaacttacttctgacaacgatcggaggaccgaaggagctaaccgcttttttgcacaacatgggggatcatgtaactcgccttgatcgttgggaaccggagctgaatgaagccataccaaacgacgagcgtgacaccacgatgcctgtagcaatggcaacaacgttgcgcaaactattaactggcgaactacttactctagcttcccggcaacaattaatagactggatggaggcggataaagttgcaggaccacttctgcgctcggcccttccggctggctggtttattgctgataaatctggagccggtgagcgtgggtctcgcggtatcattgcagcactggggccagatggtaagccctcccgtatcgtagttatctacacgacggggagtcaggcaactatggatgaacgaaatagacagatcgctgagataggtgcctcactgattaagcattggtaactgtcagaccaagtttactcatatatactttagattgatttaaaacttcatttttaatttaaaaggatctaggtgaagatcctttttgataatctcatgaccaaaatcccttaacgtgagttttcgttccactgagcgtcagaccccgtagaaaagatcaaaggatcttcttgagatcctttttttctgcgcgtaatctgctgcttgcaaacaaaaaaaccaccgctaccagcggtggtttgtttgccggatcaagagctaccaactctttttccgaaggtaactggcttcagcagagcgcagataccaaatactgtccttctagtgtagccgtagttaggccaccacttcaagaactctgtagcaccgcctacatacctcgctctgctaatcctgttaccagtggctgctgccagtggcgataagtcgtgtcttaccgggttggactcaagacgatagttaccggataaggcgcagcggtcgggctgaacggggggttcgtgcacacagcccagcttggagcgaacgacctacaccgaactgagatacctacagcgtgagctatgagaaagcgccacgcttccgaagggagaaaggcggacaggtatccggtaagcggcagggtcggaacaggagagcgcacgagggagcttccagggggaaacgcctggtatctttatagtcctgtcgggtttcgccacctctgacttgagcgtcgatttttgtgatgctcgtcaggggggcggagcctatggaaaaacgccagcaacgcggcctttttacggttcctggccttttgctggccttttgctcacatgttctttcctgcgttatcccctgattctgtggataaccgtattaccgcctttgagtgagctgataccgctcgccgcagccgaacgaccgagcgcagcgagtcagtgagcgaggaagcggaagagcgctgacttccgcgtttccagactttacgaaacacggaaaccgaagaccattcatgttgttgctcaggtcgcagacgttttgcagcagcagtcgcttcacgttcgctcgcgtatcggtgattcattctgctaaccagtaaggcaaccccgccagcctagccgggtcctcaacgacaggagcacgatcatgcgcacccgt

SEQ ID NO: 5569 - DNA, 2211 bp, Homo sapiens
  SITE (1306): n equals a,t,g, or c
gaattcttgaagacgaaagggcctcgtgatacgcctatttttataggttaatgtcatgataataatggtttcttagacgtcaggtggcacttttcggggaaatgtgcgcggaacccctatttgtttatttttctaaatacattcaaatatgtatccgctcatgagacaataaccctgataaatgcttcaataatattgaaaaaggaagagtatgagtattcaacatttccgtgtcgcccttattcccttttttgcggcattttgccttcctgtttttgctcacccagaaacgctggtgaaagtaaaagatgctgaagatcagttgggtgcacgagtgggttacatcgaactggatctcaacagcggtaagatccttgagagttttcgccccgaagaacgttttccaatgatgagcacttttaaagttctgctatgtggcgcggtattatcccgtattgacgccgggcaagagcaactcggtcgccgcatacactattctcagaatgacttggttgagtactcaccagtcacagaaaagcatcttacggatggcatgacagtaagagaattatgcagtgctgccataaccatgagtgataacactgcggccaacttacttctgacaacgatcggaggaccgaaggagctaaccgcttttttgcacaacatgggggatcatgtaactcgccttgatcgttgggaaccggagctgaatgaagccataccaaacgacgagcgtgacaccacgatgcctgcagcaatggcaacaacgttcgcaaactattaactggcgaactacttactctagcttcccggcaacaattaatagactggatggaggcggataaagttgcaggaccacttctgcgctcggcccttccggctggctggtttattgctgataaatctggagccggtgagcgtgggtctcgcggtatcattgcagcactggggccagatggtaagccctcccgtatcgtagttatctacacgacggggagtcaggcaactatggatgaacgaaatagacagatcgctgagataggtgcctcactgattaagcattggtaactgtcagaccaagtttactcatatatactttagattgatttaaaacttcatttttaatttaaaaggatctaggtgaagatcctttttgataatctcatgaccaaaatcccttaacgtgagttttcgttccactgagcgtcagaccccgtagaaaagatcaaaggatcttcttgagatcctttttttctgcgcgtaatctgctgcttgcaaacaaaaaaaccaccgctaccagcgntggtttgtttgccggatcaagagctaccaactctttttccgaaagtaactggcttcagcagagcgcagataccaaatactgtccttctagtgtagccgtagttaggccaccacttcaagaactctgtagcaccgccctacatacctcgctctgctaatcctgttaccagtggctgctgccagtggcgataagtcgtgtcttaccgggttggactcaagacgatagttaccggataaggcgcagcggtcgggctgaacggggggttcgtgcacacagcccagcttggagcgaacgacctacaccgaactgagatacctacagcgtgagctatgagaaagcgccacgcttcccgaagggagaaaggcggacaggtatccggtaagcggcagggtcggaacaggagagcgcacgagggagcttccagggggaaacgcctggtatctttatagtcctgtcgggtttcgccacctctgacttgagcgtcgatttttgtgatgctcgtcaggggggcggacctatggaaaaacgccagcaaccggcctttttacggttcctggccttttgctggccttttgctcacatgttctttcctgcgttatcccctgattctgtggataaccgtattaccgcctttgagtgagctgataccgctcgccgcagccgaacgaccgagcgcagcgagtcagtgagcgaggaagcggaagagcgctgacttccgcgtttccagactttacgaaacacggaaaccgaagaccattcatgttgttgctcaggtcgcagacgttttgcagcagcagtcgcttcacgttcgctcgcgtatcggtgattcattctgctaaccagtaaggcaaccccgccagcctagccgggtcctcaacgacaggagcacgatcatgcgcacccgt

SEQ ID NO: 5570 - DNA, 2213 bp, Homo sapiens
gaattcttgaagacgaaagggcctcgtgatacgcctatttttataggttaatgtcatgataataatggtttcttagacgtcaggtggcacttttcggggaaatgtgcgcggaacccctatttgtttatttttctaaatacattcaaatatgtatccgctcatgagacaataaccctgataaatgcttcaataatattgaaaaaggaagagtatgagtattcaacatttccgtgtcgcccttattcccttttttgcggcattttgccttcctgtttttgctcacccagaaacgctggtgaaagtaaaagatgctgaagatcagttgggtgcacgagtgggttacatcgaactggatctcaacagcggtaagatccttgagagttttcgccccgaagaacgttttccaatgatgagcacttttaaagttctgctatgtggcgcggtattatcccgtgttgacgccgggcaagagcaactcggtcgccgcatacactattctcagaatgacttggttgagtactcaccagtcacagaaaagcatcttacggatggcatgacagtaagagaattatgcagtgctgccataaccatgagtgataacactgcggccaacttacttctgacaacgatcggaggaccgaaggagctaaccgcttttttgcacaacatgggggatcatgtaactcgccttgatcgttgggaaccggagctgaatgaagccataccaaacgacgagcgtgacaccacgatgcctgcagcaatggcaacaacgttgcgcaaactattaactggcgaactacttactctagcttcccggcaacaattaatagactggatggaggcggataaagttgcaggaccacttctgcgctcggcccttccggctggctggtttattgctgataaatctggagccggtgagcgtgggtctcgcggtatcattgcagcactggggccagatggtaagccctcccgtatcgtagttatctacacgacggggagtcaggcaactatggatgaacgaaatagacagatcgctgagataggtgcctcactgattaagcattggtaactgtcagaccaagtttactcatatatactttagattgatttaaaacttcatttttaatttaaaaggatctaggtgaagatcctttttgataatctcatgaccaaaatcccttaacgtgagttttcgttccactgagcgtcagaccccgtagaaaagatcaaaggatcttcttgagatcctttttttctgcgcgtaatctgctgcttgcaaacaaaaaacccaccgctaccagcggtggtttgtttgccggatcaagagctaccaactctttttccgaaggtaactggcttcagcagagcgcagataccaaatactgtccttctagtgtagccgtagttaggccaccacttcaagaactctgtagcaccgcctacatacctcgctctgctaatcctgttaccagtggctgctgccagtggcgataagtcgtgtcttaccgggttggactcaagacgatagttaccggataaggcgcagcggtcgggctgaacggggggttcgtgcacacagcccagcttggagcgaacgacctacaccgaactgagatacctacagcgtgagctatgagaaagcgccacgcttcccgaagggagaaaggcggacaggtatccggtaagcggcagggtcggaacaggagagcgcacgagggagcttccagggggaaacgcctggtatctttatagtcctgtcgggtttcgccacctctgacttgagcgtcgatttttgtgatgctcgtcaggggggcggagcctatggaaaaacgccagcaacgcggcctttttacggttcctggccttttgctggccttttgctcacatgttctttcctgcgttatcccctgattctgtggataaccgtattaccgcctttgagtgagctgataccgctcgccgcagccgaacgaccgagcgcagcgagtcagtgagcgaggaagcggaagagcgctgacttccgcgtttccagactttacgaaacacggaaaccgaagaccattcatgttgttgctcaggtcgcagacgttttgcagcagcagtcgcttcacgttcgctcgcgtatcggtgattcattctgctaaccagtaaggcaaccccgccagcctagccgggtcctcaacgacaggagcacgatcatgcgcacccgt

SEQ ID NO: 5571 - DNA, 7752 bp, Homo sapiens
  SITE (3050): n equals a,t,g, or c
  SITE (3051): n equals a,t,g, or c
  SITE (3056): n equals a,t,g, or c
  SITE (3057): n equals a,t,g, or c
tcacgcctctaatcccagcactttgggagtccgaggcgggcagatcacgaggtcaggagttcgagaccagcctggctgacatggtgaaaccccatctctactaaaaatacaaaaattatcacgcctgtgatcccagcactttgggaggccgaggcaggcggatcatgaggtcaggagttcaagaccagcctggctgacatggtgaaaccccatctctactaaaaatacaaaaattatcacgcctgtgatcccagcactttgggagtctgaggcaggcagatcatgaggtcaggagttcgagaccagcctggctgacatggtgaaaccccatctctactaaaaatacaaaaattatcacggctgtgatcccagcactttgggagtccaaggcgggtggatcatgaggtcaggagttcgagacctgcctggccaatatggtgaaacctcatctccactaaaaatacaaaaattatcacatctgtaatcccagcactttgggagtccaaggcgggcagatcacgaggtcaggagttcgagaccagcctgaccaacatggggaaaccctgtctccactaaaaatacaaaaattatcacgcctgtaatcccagcactttgagaggctgaggcaggagaatcacttgaacccgggaggtggaggctgcaccgagccgagatcgcgccactgcactccagcctgggccacagagcaagactccatctcaaaaaaaaaaaaaaaaagagtcgatccgggggatggcgtccagctggactctgcagccttggtttccaccaaaggatggcccaggccaaggtgattcctcagggacaggcagctacaacaggaggggtcagctgagttctccagaatcttcctgaagccctggaagtggatccaggaacgcagccctttgggactgctcagaataggaatcctgctgggtgaggcattcaccacccatggggtgttccaaccaaggccagcaaggtcgtcaccgccagccacagagccccggaggagggggcggcactcaggcacccaccccggactgcacccaaacactcctgccacgggcttggcgcagcgggttggggggtgggcacggagctgcctgtggctccccatctgcctgtggacacgacagcggcctctccctgggtggggtcgcctttcccagtcctgaagctgcctgggaggtgcatccaggcacaatcttgcttttgagaagtgagggtggacttcttttcaagtctttccgcgtatcaggctttgcttttattttgttttatttcaagtcatgcccaccccgtcccgccagcccagcccctccacggccaccgctcacctgcgtccacacagccgcttcctttccacacacgtgatgcagcacacgctcttgtgtcttggagctgggtgattttaacaggttctcaaatattccctttgttcatcttaaaccagaagacgctgaatgtgtcattttcttattgcagctgcaggtgaacttgctgtccaaatttttgctgattgcaaaatcttgctatgagcagagaaacttcgcgacagccatgcagatcctgagcgggctggagcacctggccgtgaggcagtcccctgtgcgtccccctcgggccccaaggcgggggtgggtacccgcacggccgcaggaggctcacctgtgctttcatttcaggcctggagaattctgcctgcaaagatagcagaggtcatggaggagctgaaagccgtggaggtaccagcactttacgtggccgggcggctttggtcccccgaggccctctcctaaacgaactgctgtgcagagcctgccgcacccagacgcaggcaccacagagtgtgtgcaggtggcccagccagggtggcctcacggaggcttggagtcatctcccggcagcctctgttgccacctgggcagaggtgtcccacctgctcggtcccggggccttgctggtctgagttcctcacacagagcacaggtgcccagaggacagcactgaggtctgtggctggggcctgagcttgaccgacctggacctcctccaggacggcaggggtggcctcatgagatgatgaacaaggaattgctgctggaagtgaccagccatccccaaacatgactcagacgagtcccagagcagccacagcctgtccccgtcttgggtctcagagctcggcctcaagcccagccacagctgtccacgggtgggacggctcctgcatgtctttgctggacacgcagacacggggccctgctctggtcagccggggtctcatttagggaagctgggttacctggcacttcctggagtccagcagagagcaaggaaagggactcaccatttcagcagcaggaggcacaaaacctcccagcggctgtcagggccgtgaaagcttaagaccccgcaggtgtgagccaagtccaaccatccaggaacattcgggactggaagctaattcagagagccgggtagaccccgtgcgtggagaacgcaggaaccgctgggactggttggctgcgctggccccggctgaaggctcctgcactgaccacgccctgtctctccccggcccacgccccggctggaccaccaggtcttcctgaagagcgacagcctgtgtctgatggaagggcggcgcttccgggcgcagcccaccctgccctcggcccacctcctggccatgcacatccagcagctggagacaggcggcttcaccatgaccaacggggcccacaggtggagcaagctcaggtgaggaggggctcaggcggccgcgcgcccaggagaggaggggctcaggcggcgcgcgcccaggagaggaggggctcaggcggccgcgcgcccaggtgaggaggggctcagcggccgcgcgcccaggagaggaggggctcaggcgggcgcgcgcccaggagaggaggggctcaggcggccgcgcgcccaggtgaggaggggctcaggcgggcgcgcgcccaggagaggaggggctcaggcgggcgcgcgcccaggtgaggaggggctcaggtggccgcgcnnccagnngaggaggggctcagatgggcgcatgccaggtggggcacgctcaggtggcacctctcctcctgtccttgcttttcagaggcctgggtaccttgcccctcacttggcactcacagcctcagacctccctctacccaagataacctccagccacctccttctctgcaaatctggagcatttcctgcactcctgctgtccatggtcccaaaacactccccgtggtctctagggacccctgtgttgggacccaggcacactttccaccccaccctgagggtctctgcagcacagaggctgcccggcagcaacctgtcctgaccgctgggtgccacagtgtccctgctccccttgaaacccctctccctagagacatccaggtgggacccaggatcagtcctcagcctgttcctgtggtcctgctgtccacctgcccagcacctgggaccaactaccttgcacaccacctgggaggcgcagactggggctggctgtaaaacctaccaccacgacccacagggcttcacaccccaggccacacaggctcttccacctggtaaggcacaggggcccagcctctcctcggagccccaggcctgtgtccgatgaccctcaggtgcccacagccccaagctcggcctcactctctccctcaagacacaatctcccaccctcccgtctcatctcatcgcctgccgttgtccacacacggtcaggtggaggctgcccaggccacggcggctccaccctcccccacggtagatggcctcactttggggagcaatgctcagcggaccaggtgcccatggatcctcagcctgataggtgaaggtccccttcttagataggcaccaatttaaaaacaataattataatatgccataaatgtatgcttatcgtaagagatcagaaaacccatgtcagcaaaagagaagttaaaaacttaaggtaggccagacgcggcggctcacgcctgtaaccctaggtaggccgggcgcggtggctcacgccagtaactctaacactttggggggccgaggcaggcggatcacgaggtcaggagttcaagaccagcctggccaacatggtgaaaccccgtctctactaaaaatacaaaaaattagccgggcgcggtggcgggcgcctgtagtcccagctactcgggaggctgaggcaggagaatggcgggaacccgggaggcggagcttgcagtgagccgagatcgcgccaccgcactccagcctgggcgacagagagagactccgtctcaaaaaaaaaaaaaaaacttaaggtgatgctcaatcaggaaagaaaacaagccaagagtggcacttgctctccacagcgtccacgtgcgtatgtgagcgcctccagatctgcccttctcagcatccccatgtgtgtgagagcccatccaggcatgctcttcccggtgtgtgtgtgtgtgtgagcccatccaggcatgctcttcccggcgtgtgtgtgtgtgagagcccatccaggcatgctcttcccagtgtgtgtgtgtgtgtgagagcccatccaggcatgctcttcccggcgtgtgtgtgtgtgtgagagcccaaccaggcatgctcttcccggtgtgtgtgtgtgtgtgagcccatccaggcatgctcttcccggcatgtgtgtgtgtgtgtgtgtgagagcccatccaggcatgctgttcccggcgtgtgtgtgtgtgtgtgagagcccatccaggcatgctcttctcggcgtgtgtgtgtctgtgagagcccatccaggcatgctcttcccggcatgtgtgtgtgtgagagcccatccaggcatgctcttcccggcgtgtgtgtgcgtgtgtgtgagagcccatccaggcatgctcttcccggcgtgtgtgtgtgtgtgagagcccatccaggcatgctcttcccggcgtgtgtctgtgtgtgtgtgagagcccatccaggcatgctcttcccggcatgtgtgtgtgtgagagcccatccaggcatgctcttcccggcgtgtgtgtgtgtgtgtgagagcccatccaggcatgctcttcccggcgtgtgtgtgtgtgtgtgagagcccatccaggcatgctcttcccggcgtgtgtgtgtgtgtgagagcccatccaggcatgctcttcccggcatgtgtgtgtgtgagcccatccaggcatgctcttcccggcgtgtgtgtgagcccatccaggcatgctcttcccggcgtgtgtgtgtgtgtgtgagcccatccaggcatgctcttcccggcgtgtgtgtgtgtgtgtgagagagcccatccaggcatgctcttcccggcgtgtgtgtgtgtgagagcccatccaggcttggcctttctttgccgtaatggacgcccctttctttgtccctcacactgggcatgtggtgtttccatccaaaatcaggacagggcgtctgtctgtggcatcagtgtccccaggcctggctgagggctcctgctcgtgactggccagctttctccattatattctatggtgtgctggtcactgtcaaccagctgtcccaggcatccggtcctgggccccggccgtggcgattcccaggtgtgaatgtgaacgctctgcacggcagcagagagtcccttgcctgcctcgtcctctcagctgcagcccctgcggcagactgggcttgactcttcttgggacgctcagcagggaggagcctgagcctgcagggtttccataagcgtgtgtggactgaaatgtggatggatggacagtcagacagacggaaaggtctgagtagtgacctttccacctcgccaataaatacagacaacccacccttcagaatttacacggtgaaaagatttagtccaaatgattcctaagaacgcggggggactccctccccacggaagccgcgcccctgccctgtgcaaactaacgtctcttctttcctcaacggaaggaacatcgcaaaggtggtgagccaggtgcacgcgttccaggagaacccttacaccttcagccccgaccccaagctccagtcgtacctcaagcagaggattgcccgcttcagcggtgccgacatttccacactcgccgcagatagcagggccaacttccaccaggtctccagcgagaagcactcacggaagattcaggacaagctacggaggatgaaggctacattccagtagccgagctcgggcctggtgtggaattccagatccgaatccgactgtggggggcgggctgggaggtgggagccgcgtctcaggcccggccgttatcaaggcccctccgcccccgaaccctggggagctggaccaggaggtggaggctcaggggaccccatggggacaggcagagctggtctcctcccagcagacggagccaggacgggcacaagagtcttggaggtttgcgtgtttctgctagaattaaaaagttaaatttaaaaatgaaaatgaaagacagcttcccaggagttttgtgcctgtctgcgcctctcacacacagataagtggctcttacccagctctcagtgactcccccacaaaacagcaacagcctccaccgccaactcaacaaacttcagagtagctcctccctgagcaggtttctgagccagcctcggttggctgagcaacgaagggccaaagctgacctctgagtggccaactgcagctcccagggacttccgagacctccggtccgagaccctgcctgggttcaccccccacaacccagacccagaaccgctctccccttccctgcccagtgcccctcttccccagcccagacccccaggtgcccaaggcctgctgctggagcaggcaccttgggctgggcctgctcccccagggcccagggccccccagcttagaacagcccttggtgaggtggtcatgcccgggcaaaggccctgcttcctggaaaggacactcagagcagctccaagacagaggctctgtggcggggttccctgagagtgcccccacccatctcatgccccagggaccgccactgcccaccgcctccagcagccatgcatgtgcgcccgcagccctgcctccacagctcgccacacactcacgcttcgccagagacaggaagtgcgctgcctccacggccccttgcccttgctcaggttcttggaccccaggcagctggtgtggagccccttggccagggccatgggagtcccgcgcagtcagctccacattggcctctgcagctgggtgaccagagccccgggcacggcccagctccgtggggctctcacggtgccaatcacaagacccagggttgtgcttttgagttttagaattagtcattctttagagcagccagctagtggcatttctaggaaaactgtgacctgtgacaaatcgctgcatttttaatgtcaagatgtgttttcccacataaattcaccggagacatccgggccccgcttcgatgtaacatgagaggaagtcggcgtcctggccacgaaatgcagttcacttttttttaggcttttatatggattatgttttgctgacccacgcccgcattttcagattttgtatctaacagacagtgctcagtgcaaatcaacattccagcggtcaggactgaccccggggcagcactgggctcaggcttcagcgcgactgtccgcatggctccctcccgtcctggcaccaatttctgaataaagtcctttctacca

SEQ ID NO: 5572 - DNA, 2213 bp, Homo sapiens
gaattcttgaagacgaaagggcctcgtgatacgcctatttttataggttaatgtcatgataataatggtttcttagacgtcaggtggcacttttcggggaaatgtgcgcggaacccctatttgtttatttttctaaatacattcaaatatgtatccgctcatgagacaataaccctgataaatgcttcaataatattgaaaaaggaagagtatgagtattcaacatttccgtgtcgcccttattcccttttttgcggcattttgccttcctgtttttgctcacccagaaacgctggtgaaagtaaaagatgctgaagatcagttgggtgcacgagtgggttacatcgaactggatctcaacagcggtaagatccttgagagttttcgccccgaagaacgttttccaatgatgagcacttttaaagttctgctatgtggcgcggtattatcccgtattgacgccgggcaagagcaactcggtcgccgcatacactattctcagaatgacttggttgagtactcaccagtcacagaaaagcatcttacggatggcatgacagtaagagaattatgcagtgctgccataaccatgagtgataacactgcggccaacttacttctgacaacgatcggaggaccgaaggagctaaccgcttttttgcacaacatgggggatcatgtaactcgccttgatcgttgggaaccggagctgaatgaagccataccaaacgacgagcgtgacaccacgatgcctgcagcaatggcaacaacgttgcgcaaactattaactggcgaactacttactctagcttcccggcaacaattaatagactggatggaggcggataaagttgcaggaccacttctgcgctcggcccttccggctggctggtttattgctgataaatctggagccggtgagcgtgggtctcgcggtatcattgcagcactggggccagatggtaagccctcccgtatcgtagttatctacacgacggggagtcaggcaactatggatgaacgaaatagacagatcgctgagataggtgcctcactgattaagcattggtaactgtcagaccaagtttactcatatatactttagattgatttaaaacttcatttttaatttaaaaggatctaggtgaagatcctttttgataatctcatgaccaaaatcccttaacgtgagttttcgttccactgagcgtcagaccccgtagaaaagatcaaaggatcttcttgagatcctttttttctgcgcgtaatctgctgcttgcaaacaaaaaaaccaccgctaccagcggtggtttgtttgccggatcaagagctaccaactctttttccgaaggtaactggcttcagcagagcgcagataccaaatactgttcttctagtgtagccgtagttaggccaccacttcaagaactctgtagcaccgcctacatacctcgctctgctaatcctgttaccagtggctgctgccagtggcgataagtcgtgtcttaccgggttggactcaagacgatagttaccggataaggcgcagcggtcgggctgaacggggggttcgtgcacacagcccagcttggagcgaacgacctacaccgaactgagatacctacagcgtgagctatgagaaagcgccacgcttcccgaagggagaaaggcggacaggtatccggtaagcggcagggtcggaacaggagagcgcacgagggagcttccagggggaaacgcctggtatctttatagtcctgtcgggtttcgccacctctgacttgagcgtcgatttttgtgatgctcgtcagggggcggagcctatggaaaaacgccagcaacgcggcctttttacggttcctggccttttgctggccttttgctcacatgttctttcctgcgttatcccctgattctgtggataaccgtattaccgcctttgagtgagctgataccgctcgccgcaacccgaccgaccgagcgcagccagtcagtgagccaggaagcggaagagcgctgacttccgcgtttccagactttacgaaacacggaaaccgaagaccattcatgttgttgctcaggtcgcagacgttttgcagcagcagtcgcttcacgttcgctcgcgtatcggtgattcattctgctaaccagtaaggcaaccccgccagcctagccgggtcctcaacgacaggagcacgatcatgcgcacccgt

SEQ ID NO: 5573 - DNA, 794 bp, Homo sapiens
gcaggacccaacgctgcccgagatgcgccgcgtcggctgctggagatggcggacgcgatggatatgttctgccaagggttggtttgcgcattcacagttctccgcaagaattgattggctccaattcttggagtggtgaatccgttagcgaggtgccgccggcttccattcaggtcgaggtggcccggctccatgcaccgcgacgcaacgcggggaggcagacaaggtatagggcggcgcctacaatccatgccaacccgttccatgtgctcgccgaggcggcataaatcgccgtgacgatcagcggtccaatgatcgaagttaggctggtaagagccgcgagcgatccttgaagctgtccctgatggtcgtcatctacctgcctggacagcatggcctgcaacgcgggcatcccgatgccgccggaagcgagaagaatcataatggggaaggccatccagcctcgcgtcgcgaacgccagcaagacgtagcccagcgcgtcggccgccatgccggcgataatggcctgcttctcgccgaaacgtttggtggcgggaccagtgacgaaggcttgagcgagggcgtgcaagattccgaataccgcaagcgacaggccgatcatcgtcgcgctccagcgaaagcggtcctcgccgaaaatgacccagagcgctgccggcacctgtcctacgagttgcatgataaagaagacagtcataagtgcggcgacgatagtcatgccccgcgcccaccggaaggagctgactgggttgaaggctctcaagggcatcggtcga

SEQ ID NO: 5574 - DNA, 2206 bp, Homo sapiens
  SITE (1136): n equals a,t,g, or c
  SITE (1141): n equals a,t,g, or c
  SITE (1182): n equals a,t,g, or c
  SITE (1267): n equals a,t,g, or c
  SITE (1268): n equals a,t,g, or c
gaattcttgaagacgaaagggcctcgtgatacgcctatttttataggttaatgtcatgataataatggtttcttagacgtcaggtggcacttttcggggaaatgtgcgcggaacccctatttgtttatttttctaaatacattcaaatatgtatccgctcatgagacaataaccctgataaatgcttcaataatattgaaaaaggaagagtatgagtattcaacatttccgtgtcgcccttattcccttttttgcggcattttgccttcctgtttttgctcacccagaaacgctggtgaaagtaaaagatgctgaagatcagttgggtgcacgagtgggttacatcgaactggatctcaacagcggtaagatccttgagagttttcgccccgaagaacgttttccaatgatgagcacttttaaagttctgctatgtggcgcggtattatcccgtgttgaacgccgggcaagagcaactcggtcgccgcatacactattctcagaatgacttggttgagtactcaccagtcacagaaaagcatcttacggatggcatgacagtaagagaattatgcagtgctgccataaccatgagtgataacactgcggccaacttacttctgacaacgatcggaggaccgaaggagctaaccgcttttttgcacaacatgggggatcatgtaactcgccttgatcgttgggaaccggagctgaatgaagccataccaaacgacgagcgtgacaccacgatgcctgtcagcaatggcaacaacgttcgcaaactattaactggcgaactacttactctagcttcccggcaacaattaatagactggatggaggcggataaagttgcaggaccacttctgcgctcggccttccggctggctggtttattgctgataaatctggagccggtgagcgtgggtctcgcggtatcattgcagcactggggccagatggtaagccctcccgtatcgtagttatctcacggacaaggagtcaggcaactatggatgaacgaaatagacagatcgctgagataggtgcctcactgattaagcattggtaactgtcagaccaagtttactcatatatactttagattgatttaaaacttcatttttaatttaaanggatntaggtgaagatcctttttgataatctcatgaccaaaatccnttaacgtgagttttcgttccactgagcgtcagaccccgtagaaaagatcaaaggatcttcttgagatcctttttttctgcgcgtnntctgctgcttgcaaacaaaaaaaccaccgctaccagcggtggtttgtttgccggatcaagagctaccaactctttttccgaaggtaactggcttcagcagagcgcagataccaaatactgtccttctagtgtagccgtagttaggccaccacttcaagaactctgtagcaccgcctacataccctgctctgctaatcctgttaccagtggctgctgccagtggcgataagtcgtgtcttaccgggttggactcaagacgatagttaccggataaggcgcagcggtcgggctgaacggggggttcgtgcacacagcccagcttggagcgaacgacctacaccgaactgagatacctacagcgtgagctatgagaaacgccacacgttccgaagggagaaaggcggacaggtatccggtaagcgcagggtcggaacaggagagcgcacgagggagcttccaggggaaacgcctggtatctttatagtcctgtcggggtttcgccacctctgacttgagcgtcgatttttgtgatgctcgtcaggggggcggactatggaaaaacgcagcaacggcctttttacggttcctggccttttgctggccttttgctcacatgttctttcctgcgttatcccctgattctgtggataaccgtattaccgcctttgagtgagctgataccgctcgccgcagccgaacgaccgagcgcagcgagtcagtgagcgaggaagcggaagagcgctgacttccgcgtttccagactttacgaaacacggaaaccgaagaccattcatgttgttgctcaggtcgcagacgttttgcagcagcagtcgcttcacgttcgctcgcgtatcggtgatcattctgctaaccagtaagggcaaccccgccagcctagccgggtcctcaacgacaggagcacgatcatgcgcacccgt

SEQ ID NO: 5575 - DNA, 130 bp, Homo sapiens
gccaggcgtggtggtgggcactgtagtcccacctatttgggaggctgaggcaggagaatggtgtgaacccaggaggcggagcttgcagtgagctgagatcgtgccactgcactccggcctgggcaacaga

SEQ ID NO: 5576 - DNA, 2211 bp, Homo sapiens
  SITE (568): n equals a,t,g, or c
  SITE (1228): n equals a,t,g, or c
  SITE (1236): n equals a,t,g, or c
  SITE (1453): n equals a,t,g, or c
  SITE (1666): n equals a,t,g, or c
gaattcttgaagacgaaagggcctcgtgatacgcctatttttataggttaatgtcatgataataatggtttcttagacgtcaggtggcacttttcggggaaatgtgcgcggaacccctatttgtttatttttctaaatacattcaaatatgtatccgctcatgagacaataaccctgataaatgcttcaataatattgaaaaaggaagagtatgagtattcaacatttccgtgtcgcccttattcccttttttgcggcattttgccttcctgtttttgctcacccagaaacgctggtgaaagtaaaagatgctgaagatcagttgggtgcacgagtggttacatcgaactggatctcaacagcggtaagatccttgagagttttcgccccgaagaacgttttccaatgatgagcacttttaaagttctgctatgtggcgcggtattatcccgtgttgacgccgggcaagagcaactcggtcgccgcatacactattctcagaatgacttggttgagtaactcaccagtcacagaaaagcatcttacggatggcatgacagtaagaganttatgcagtgctgccataaccatgagtgataacactgcggccaacttacttctgacaacgatcggaggaccgaagagctaaccgcttttttgcacaacatgggggatcatgtaactcgccttgatcgttgggaaccggagctgaatgaagccataccaaacgacgagcgtgacaccacgatgcctgcagcaatggcaacaacgttcgcaaactattaactggcgaactacttactctagcttcccggcaacaattaatagactggatggaggcggataaagttgcaggaccacttctgcgctcggcccttccggctggctggtttattgctgataaatctggagccggtgagcgtgggtctcgcggtatcattgcagcactggggccagatggtaagccctcccgtatcgtaagttatctacacgacggggagtcaggcaactatggatgaacgaaatagacagatcgctgagataggtgcctcactgattaagcattggtaactgtcagaccaagtttactcatatatactttagattgatttaaaacttcatttttaatttaaaaggatctaggtgaagatcctttttgataatctcatgaccaaaatcccttaacgggagttttggttccactgagcgtcagaccccgtagaaaagntcaaaggntcttcttgagatccctttttttctgcgcgtaatctgctgcttgcaaacaaaaaacccaccgctaccagcggtggtttgtttgccggatcaagagctaccaactctttttccgaaggtaactggcttcagcagagcgcagataccaaatactgttctttctagtgtagccgtagttaggccaccacttcaagaactctgtagcaccgcctacataccntgctctgctaatcctgttaccagtggctgctgccagtggcgataagtcgtgtcttaccgggttggactcaagacgatagttaccggataaggcgcagcggtcgggctgaacggggggttcgtgcacacagcccagcttggagcgaacgacctacaccgaactgagatacctacagcgtgagctatgagaaagcgccacgttcccgaagggagnaaggcggacaggtatccggtaagcggcagggtcggaacaggagagcgcacgagggagcttccagggggaaacgctggtatctttatagtcctgtcgggtttcgccacctctgacttgagcgtcgatttttgtgatgctcgtcaggggggcggacctatggaaaaacgccagcaacgcggcctttttacggttcctggccttttgctggccttttgctcacatgttctttcctgcgttatcccctgattctgtggataaccgtattaccgcctttgagtgagctgataccgctcgccgcagccgaacgaccgagcgcagcgagtcagtgagcgaggaagcggaagagcgctgacttccgcgtttccagactttacgaaacacggaaaccgaagaccattcatgttgttgctcaggtcgcagacgttttgcagcagcagtcgcttcacgttcgctcgcgtatcggtgattcattctgctaaccagtaaggcaaccccgccagcctagccgggtcctcaacgacaggagcacgatcatgcgcacccgt

SEQ ID NO: 5577 - DNA, 2212 bp, Homo sapiens
gaattcttgaagacgaaagggcctcgtgatacgcctatttttataggttaatgtcatgataataatggtttcttagacgtcaggtggcacttttcggggaaatgtgcgcggaacccctatttgtttatttttctaaatacattcaaatatgtatccgctcatgagacaataaccctgataaatgcttcaataatattgaaaaaggaagagtatgagtattcaacatttccgtgtcgcccttattcccttttttgcggcattttgccttcctgtttttgctcacccagaaacgctggtgaaagtaaaagatgctgaagatcagttgggtgcacgagtgggttacatcgaactggatctcaacagcggtaagatccttgagagttttcgccccgaagaacgttttccaatgatgagcacttttaaagttctgctatgtggcgcggtattatcccgtgttgacgccgggcaagagcaactcggtcgccgcatacactattctcagaatgacttggttgagtactcaccagtcacagaaaagcatcttacggatggcatgacagtaagagaattatgcagtgctgccataaccatgagtgataacactgcggccaacttacttctgacaacgatcggaggaccgaaggagctaaccgcttttttgcacaacatgggggatcatgtaactcgccttgatcgttgggaaccggagctgaatgaagccataccaaacgacgagcgtgacaccacgatgcctgcagcaatggcaacaacgttgcgcaaactattaactggcgaactacttactctagcttcccggcaacaattaatagactggatggaggcggataaagttgcaggaccacttctgcgctcggcccttccggctggctggtttattgctgataaatctggagccggtgagcgtgggtctcgcggtatcattgcagcactggggccagatggtaagccctcccgtatcgtagttatctacacgacggggagtcaggcaactatggatgaacgaaatagacagatcgctgagataggtgcctcactgattaagcattggtaactgtcagaccaagtttactcatatatactttagattgatttaaaacttcatttttaatttaaaaggatctaggtgaagatcctttttgataatctcatgaccaaaatcccttaacgtgagttttcgttccactgagcgtcagaccccgtagaaaagatcaaaggatcttcttgagatcctttttttctgcgcgtaatctgctgcttgcaaacaaaaaaaccaccgctaccagcggtggtttgtttgccggatcaagagctaccaactctttttccgaagtaactggcttcagcagagcgcagataccaaatactgtccttctagtgtagccgtagttaggccaccacttcaagaactctgtagcaccgcctacatacctcgctctgctaatcctgttaccagtggctgctgccagtggcgataagtcgtgtcttaccgggttggactcaagacgatagttaccggataaggcgcagcggtcgggctgaacggggggttcgtgcacacagcccagcttggagcgaacgacctacaccgaactgagatacctacagcgtgagctatgagaaagcgccacgcttcccgaagggagaaaggcggacaggtatccggtaagcggcagggtcggaacaggagagcgcacgagggagcttccagggggaaacgcctggtatctttatagtcctgtcgggtttcgccacctctgacttgagcgtcgatttttgtgatgctcgtcaggggggcggagcctatggaaaaacgccagcaacgcggcctttttacggttcctggccttttgctggccttttgctcacatgttctttcctgcgttatcccctgattctgtggataaccgtattaccgcctttgagtgagctgataccgctcgccgcagccgaacgaccgagcgcagcgagtcagtgagcgaggaagcggaagagcgctgacttccgcgtttccagactttacgaaacacggaaaccgaagaccattcatgttgttgctcaggtcgcagacgttttgcagcagcagtcgcttcacgttcgctcgcgtatcggtgattcattctgctaaccagtaaggcaaccccgccagcctagccgggtcctcaacgacaggagcacgatcatgcgcacccgt

SEQ ID NO: 5578 - DNA, 2213 bp, Homo sapiens
  SITE (1151): n equals a,t,g, or c
  SITE (1200): n equals a,t,g, or c
  SITE (1212): n equals a,t,g, or c
  SITE (1231): n equals a,t,g, or c
  SITE (1304): n equals a,t,g, or c
  SITE (1305): n equals a,t,g, or c
  SITE (1701): n equals a,t,g, or c
  SITE (1712): n equals a,t,g, or c
  SITE (1720): n equals a,t,g, or c
  SITE (1840): n equals a,t,g, or c
gaattcttgaagacgaaagggcctcgtgatacgcctatttttataggttaatgtcatgataataatggtttcttagacgtcaggtggcacttttcggggaaatgtgcgcggaacccctatttgtttatttttctaaatacattcaaatatgtatccgctcatgagacaataaccctgataaatgcttcaataatattgaaaaaggaagagtatgagtattcaacatttccgtgtcgcccttattcccttttttgcggcattttgccttcctgtttttgctcacccagaaacgctggtgaaagtaaaagatgctgaagatcagttgggtgcacgagtgggttacatcgaactggatctcaacagcggtaagatccttgagagttttcgccccgaagaacgttttccaatgatgagcacttttaaagttctgctatgtggcgcggtattatcccgtgttgacgccgggcaagagcaactcggtcgccgcatacactattctcagaatgacttggttgagtactcaccagtcacagaaaagcatcttacggatggcatgacagtaagagaattatgcagtgctgccataaccatgagtgataacactgcggccaacttacttctgacaacgatcggaggaccgaaggagctaaccgcttttttgcacaacatgggggatcatgtaactcgccttgatcgttgggaaccggagctgaatgaagccataccaaacgacgagcgtgacaccacgatgcctgtagcaatggcaacaacgttgcgcaaactattaactggcgaactacttactctagcttcccggcaacaattaatagactggatggaggcggataaagttgcaggaccacttctgcgctcggccttccggctggctggtttattgctgataaatctggagccggtgagcgtgggtctcgcggtatcattgcagcactggggccagatggtaagccctcccgtatcgtagttatctacacgacggggagtcaggcaactatggatgaacgaaatagacagatcgctgagataggtgcctcactgattaagcattggtaactgtcagaccaagtttactcatatatactttagattgatttaaaacttcatttttaatttaaaaggatctaggtgaagancctttttgataatctcatgaccaaaatcccttaacgtgaggttttcgtnccactgagcgtnagaccccgtagaaaagatnaaaggatcttcttgagatcctttttttctgcgcgtaatctgctgcttgcaaacaaaaaaaccaccgctaccannggtggtttgtattgccggatcaagagctaccaactctttttccgaaggtaactggcttcagcagagcgcagataccaaatactgttcttctagtgtagccgtagttaggccaccacttcaagaactctgtagcaccgcctacataccttgctctgctaatcctgttaccagtggctgctgccagtggcgataagtcgtgtcttaccgggttggactcaagacgatagttaccggataaggcgcagcggtcgggctgaacggggggttcgtgcacacagcccagcttggagcgaacgacctacaccgaactgagatacctacagcgtgagctatgagaaagcgccacgcttcccgaagggagaaaggcggacaggtatccggtaagcggcagggtcngaacaggagancgcacganggagcttccagggggaaacgcctggtatctttatagtcctgtcgggtttcgccacctctgacttgagcgtcgatttttgtgatgctcgtcaggggggcggaacctatggaaaaacgccancaacgcggcctttttacggttcctggccttttgctggccttttgctcacatgttctttcctgcgttatcccctgattctgtggataaccgtattaccgcctttgagtgagctgataccgctcgccgcagccgaacgaccgagcgcagcgagtcagtgagcgaggaagcggaagagcgctgacttccgcgtttccagactttacgaaacacggaaaccgaagaccattcatgttgttgctcaggtcgcagcgttttgcagcagcagtcgcttcacgttcgctcgcgtatcggtgattcattctgctaaccagtaaggcaaccccgccagcctagccgggtcctcaacgacaggagcacgatcatgcgcacccgt

SEQ ID NO: 5579 - DNA, 2212 bp, Homo sapiens
gaattcttgaagacgaaagggcctcgtgatacgcctatttttataggttaatgtcatgataataatggtttcttagacgtcaggtggcacttttcggggaaatgtgcgcggaacccctatttgtttatttttctaaatacattcaaatatgtatccgctcatgagacaataaccctgataaatgcttcaataatattgaaaaaggaagagtatgagtattcaacatttccgtgtcgcccttattcccttttttgcggcattttgccttcctgtttttgctcacccagaaacgctggtgaaagtaaaagatgctgaagatcagttgggtgcacgagtgggttacatcgaactggatctcaacagcggtaagatccttgagagttttcgccccgaagaacgttttccaatgatgagcacttttaaagttctgctatgtggcgcggtattatcccgtattgacgccgggcaagagcaactcggtcgccgcatacactattctcagaatgacttggttgagtactcaccagtcacagaaaagcatcttacggatggcatgacagtaagagaattatgcagtgctgccataaccatgagtgataacactgcggccaacttacttctgacaacgatcggaggaccgaaggagctaaccgcttttttgcacaacatgggggatcatgtaactcgccttgatcgttgggaaccggagctgaatgaagccataccaaacgacgagcgtgacaccacgatgcctgtagcaatggcaacaacgttgcgcaaactattaactggcgaactacttactctagcttcccggcaacaattaatagactggatggaggcggataaagttgcaggaccacttctgcgctcggcccttccggctggctggtttattgctgataaatctggagccggtgagcgtgggtctcgcggtatcattgcagcactggggccagatggtaagccctcccgtatcgtagttatctacacgacggggagtcaggcaactatggatgaacgaaatagacagatcgctgagataggtgcctcactgattaagcattggtaactgtcagaccaagtttactcatatatactttagattgatttaaaacttcatttttaatttaaaaggatctaggtgaagatcctttttgataatctcatgaccaaaatcccttaacgtgagttttcgttccactgagcgtcagaccccgtagaaaagatcaaaggatcttcttgagatcctttttttctgcgcgtaatctgctgcttgcaaacaaaaaaaccaccgctaccagcggtggtttgtttgccggatcaagagctaccaactctttttccgaaggtaactggcttcagcagagcgcagataccaaatactgtccttctagtgtagccgtagttaggccaccacttcaagaactctgtagcaccgcctacatacctcgctctgctaatcctgttaccagtggctgctgccagtggcgataagtcgtgtcttaccgggttggactcaagacgatagttaccggataaggcgcagcggtcgggctgaacggggggttcgtgcacacagcccagcttggagcgaacgacctacaccgaactgagatacctacagcgtgagctatgagaaagcgccacgcttcccgaagggagaaaggcggacaggtatccggtaagcggcagggtcggaacaggagagcgcacgagggagcttccagggggaaacgcctggtatctttatagtcctgtcgggtttcgccacctctgacttgagcgtcgatttttgtgatgctcgtcaggggggcggagcctatggaaaaacgccagcaacgcgcctttttacggttcctggccttttgctggccttttgctcacatgttctttcctgcgttatcccctgattctgtggataaccgtattaccgcctttgagtgagctgataccgctcgccgcagccgaacgaccgagcgcagcgagtcagtgagcgaggaagcggaagagcgctgacttccgcgtttccagactttacgaaacacggaaaccgaagaccattcatgttgttgctcaggtcgcagacgttttgcagcagcagtcgcttcacgttcgctcgcgtatcggtgattcattctgctaaccagtaaggcaaccccgccagcctagccgggtcctcaacgacaggagcacgatcatgcgcacccgt

SEQ ID NO: 5580 - DNA, 3113 bp, Homo sapiens
gataggcacacacacgtgtgcacacacacacgtgcactctttcccatacacgatcaaactcacactcatttactcacgcacacttggtctcccccacacactttcttcctctctctctcttgcgcttccacacacacacttgcattctctctcactccctcagccaacatgccgctttctggacccaggctgaaatgtctggtgtgcagcgtgtcaaacctcattgttagggtctctagttacagcacatgcttcaaacatcaggtggcaatccttttcctaactcatcaggctgtgggcctgagctgctgacgccagctcctagcttggaaatgcttcttcctatttgtaaactcggaggagaagctcttgctaaagcgtcctgttctgatcattatgacttactgtaaagatcacgtgggagactgttactgagcttttccttatggaaaagcaggtgggaggggagctctacctgaaaatgcttcatgggtgctttaaagcctcccccacctcctcttcaccgcactgtgctccaggtcggagcatcagagaggggcagaggagggcaattgttgccgagagaaccgagatggtgttgagcactggaaaatgaattcctgtcttttttctccctgcaccccacgccttcctgctgcttctcctcgtcttcctcctccagtctaaagaatcctcgtctgtcttgagttgtgacatttcagcggatgacaaatacattgtaacaggctctggtgacaagaaggccacagtttatgaggtcatctactaaacaagaactccagcagggctgtcaaactctgggagaaaccgactcggctctgacagggagacccccaggcgaggggccccgaggatggcggaggatgggccgcaggcagccgagcgttcagggctgcgctccggccggctgagagggcacgtgccccgtcacagtctggactcctgggcctggattgatgtgtctcacagactcggaagggttctgctcctcctcctccccctgaacaatgctggcagttgctacaaatagatttattggaggcttatggctccggttcccccacagacccgctcatgagtctctgtttgttcttcccttttcttttgccctgtccctcaccttgggtcgggggtgctggagtggaccacaatgttgtgctgggggatgggggggtctctctttgccgattgtgcagtgcacaagatttgtgaaaaatgtaaataacagactcctattgcggactgatcagtgggagaggaggccccttcccaccggaaactctgagtgtgtatttcgcctgctgtatttgtaatccactcgtggtggtggcttttttttttttttttttttaaataaacagatgctctcacctgggaagaggagacagggaggggaaccaattgaagaaagaggagaaaagtcttagagtgtggaaaaggcaaccaggttggccgtaaggtgcctgctggaatgcgtgtgcctccacacgggtctgggcatccggactgataaccagccggccagactgagggatggaaggcactgagatgggggcccgtccaggcggacacccgcagaaatggagctttctgtggtctcttgcactctggctgcctcttgccctctctgtgtctctctttcttggtctctccctctctcctcctcagcctggtctttctctttggtgcacacttagttattgttgtgagcaatggaagttcaaaggaactccctctccagctcttctgaatcttgggacacagcctaaaaaggacaaaaagttagaagacagcatagcaactcagctcagggagctaccagagaaaaatagcaactgatgtgggtgctttttttttttttttaatttgaataaaaagaattagaagtgatgtccttttataaaatgccttctcccccttcccgcctacagtctcttcctctccccttagaggggggaaagtgtataaacctacagggttgtgagtctgaaaagaggatccccctcacccccaccctgggcagagcagtgggggttggggggtgggagagggggacacagatcctggcacactgtggatatttcttgcagattgcagtctcttgtggcccaaacaggttaggtagactatcgcctctggcaggtgccaccttttggtaccaacatgttctgaggtgttaggatttgggttgggttttttttgtttgttttttttttccttttggtctttttttttttctccttttaaagaaaagctaaaggccgctgtgagtcctggtggcaggctctccatggatgtagcatatcgaagataatttttatactgcatttttatggattattttgtaatgtgtgattccgtctgctgaggaggtgggaggggctccagggaaagccacccaccttcagtgaggttgctccccagctgagcgcaccgggcatgggatgtggaggctggcgacacaccctgtgcctctccaaggctgggcgcgtggggcgtccagagtctctctgggtctcagatgtccatctgccacctcttgttaaggctctagccagaagggagggtgagggtagaagaaagttattcccgaagaaaaaaagaatgaaaagtcattgtactgaactgtttttatatttttaaaagttactatttaaaggttggtttgattgttgcgtcttaattgcctctccccccagtttgccagtcccgccccccgccccccgggaaaacagccaggccactgttgctgtcacattctggagcctgggccagggccatttcccatcgatgtgagctcttctcatctcacagcattccctgcgctgcttccacccccttctccccttccagatacccagcatcgcagcagggatttcacaatcccatactgtgtcgcctcccatccaagcgccagggagggtggggggtaggagctaagacttcctctggacagatgggcagggcagagttcactgaggtgaaggaagaccacaggttaacaccaaagtattgtacagctgtcaatgcaaaacttttttggaaaaaaattaaacgtaatgaacttgaagcgaaactgcaaagtgtctgtg

SEQ ID NO: 5581 - DNA, 9674 bp, Homo sapiens
aactattgtctgttctgctttgttcttaataacactgaaacggttctaccatttaagtcccttgtttcatcacataccaatcctggtcttcctgggtctgaagtccctccctctctccctgccctttcccaccttactgaacccaaatcagaagcatccctgggcattctgcagccgtgtctgtccctgcaaattaagtgtgtttgaagtctgcgggccaccttcagatctcaatggctgcacctccctccttcaattcgggtctcactcaacctcagctttcccctcttgccacaggtttttcccactcggctttcacgtttgggattgagagccacatcagccagtccaacatcaatgggacgctagtgccaccggccgccctcatctccattctccagaagggcctgcagtatgtagaggccgagatcagtatcaacgaggtacgtagctgctgggcccggcccccaaacagcagagccctgggaagctgcaggagcttggaacacattggaagctaacatgcatttccctcaggcatttgggattaattccgcggcagggtgcagtggctcatgcctgtaatcccaggactttgggaggccgaggcaggaagtctacttgaccccaggagtttgagaccagcctggacaacatggtgtaacagcatttctacaaaaaacaattttttaattagcccagtgtggtggtacgcacctgtagccccagctctcgggaggctgaggtgagaggatcagatcacttaagcctgagaggttgaggctgcagtaagctataattgcaccagtacactccagcctgggcaatgcagtgagactccatctctaaaattaaaaaaaaaaaaaaaaaaggaagaagaagaaagtaagttgggttcttttccactttgtgttaataccggttgtgtggacacacagcagcaagcttccagtgcccctcccacatggctctgtgtttttgacttaaatgtagaatcactggctgttagttgatgtaaacacttacaccgccacatctgaaaaagatacggcagatcttcagctgctctgggcttcggagtggacgtttgccttgcacttaatgcagacttgctgtctcttcttgatttctggagcaggttggttagagaggggccccacacatggtcaggtggaatctgtatttcagcagaacccggcagagggcatcaccagaggctgcgtcagggcagagaggtgatggctctggtgttaatgaggatctcaagggatgccttcattaccgggctcgttgtagagcagatggggtaggaggatggaaaaataaatgcacattaaaactgtgcacttggcttggaacccctcccactttttacattggtccacagtgaggagttgtgccaattttataccaattttggttttaaaccacacacctcaccctctcttgtcccctcctattctggtctcatgattctgcagtgaagatccccttgacttctggggaataatgggatccacaacctttcttgccgccttcacctgagtccctattttatttttagagactgagtctcacactgttgcccaggctagggtgcagtggcacagtcatggcttactgcagcctcgacctcctgggctcaagtgatcctcctgtctcagcctcccaaagcactgggaccacagacagtccctgttactgatttctcagtcccctgcagcttcctccctctgcttctctttctcctactctgacccaggcgcgtgattctactgaacttttccatactgtaccgtcatccatcccacctggcagtcacattcttccaggattccctctgtcccgtctttctgggaactggtcttgcccttacaaacctttctccttcacagcatgttacactgctttaaaaaactcttttagaaaatcacaaagtaataatatcctgttctctttttcttttcttttctttttttttttttttttttttttaagacagggtctctctctgtcacccaggtgggagtacagtggtacaatcatagctcactacagcctcaacctcctggctcaaaagatcctcctgcctcagcctcctgagcagctggaacttataggtacacaccaccacgtccagataatttttttattttttgtagagatgaggtctcgctggtcttgaactcctgggctcaagcgatcctcccgcgatcctcccgccttggcctcccaaagtgctgggagtacaggcgtgagccactgtacccagtccctgttttctttcttgcacttctgcctgccatttttcgcaaagctgtggctttcgaaactccggtgttttttcctctcttgtgctcctttttccctggcaaaccccttcacactgtgtgcccgggatcttccactgactccttctggccctgtctagtttcctcactgcaaaacacacacgtgtgtatctaagaggacatgtctccaaggtccagccagccatcagatctcaaggcgcctgtgactctgtttttctctgctcattgccttctacctctcatctgttgagaagccttcatagttgccttccctcggcactccagattccagcactctaggggctaatgaaagactgtcccatttgtcacaatggtttctaatcattaaaaagtgagacgccaggggcggtagcacacatctgtaatcgcagcactttgggaagccaaggcaggagggttgcctgaggccagaagttctagaccagcctggccaatataatgagaccctatctctacataaaataaaaaaaattagccaggtgcagtggcacatgctcgtaaccccagctactcggaggctaaggcaggaagatcagtttggtccaggagtttgaggctgcagtgagccatgactgtgcccctgcactccagcctggatgacagagcgagaccccgtctctaaggaaaaaagagagacagtgtgcccgcggagtttaaatgaggacatgttgttactactttggacagttaccgcgttttgtcatgggcttgttcatttgggtgtgaacatatgaaggaggaagggggtgtgggagcgtcttgacccatcggtcaccattgtccactccatggccagaatcaagggccaagagtgcctgaggaggtgatgcagctagttctttacataggttgtattgttttctttattttgaatattgtcttgtaatcagaaatcatctggagtgatgtttcatttagttattcttcagctgaaacctgagcctttcagttcttcctcacttctgaagtaattcaggttcagagcatataaacatgtgtttgcacatccagatacaaccccaaggcttactgaggttcacctgattcgaatatctggcgtgtttcacaaggaaagaacctcctgctgtatttttaaacgtgtgtggaaagttttccatggtaaacggaaatcagagaatcaaagaatggtcaaaaaaacatgaatcaaaacaaaatgatgtcaattgtgtcatggctatggttagtctaaccctgaacccaaggagtcatttcaagtagcagcaagtgcctattttattaaatcccctggacagatggacttggaatccaggcctaaatgctgtgtgcatctcatttgggctctgcttctgaagcgttaccctcccatataatggatggtcatttgcagagattttgcacagtcgcgatagcacgtgggcaggtcttctccaccgcagcactcagtatttggggctgcgtgtttctctgtggtggggccatcctgggcactgttggatgttgagcagcgtccctgggctccacccaccagatgccaggagcacctctcctcccttagttgtaacagccaaaaaagtctccagacgttgcctaatgccccccaaggagtcacagtcaccccccgcccccgccacgttgagaattgtgccatcagggatagcactttctgtcaagaataaatggcctttttgtcctcaatgccccaattgggtttgacactcagaacaaccatcacacttagttcttaccaacagtttgtcgtgtccccttccctgcccaccgtgggatcccttcaccccaggctccaggtccatgccgcttcccccgtggccccctggttgctgggagccagctgtttacgccccacttccctgcgcttctcctgcccagagagcagaggccattcccagagccctcacccccgtgagctgacagctgtaccttggcttgcttccccaggatggcacagtgttcgacggccgccccatagagtccctgtcactgatagacgccgtgatgcccgacgtggtgcagacgcggcagcaggcattccgagagaagctcgctcagcagcaagccagtgcggcggcggcggcggctgcggccacggcagcagcgacagcagccaccacgacctcagccggcgtttcccaccaaaatccatcgaagaacagagaggccacggtgaatggggaagagaacagagcacattcagtcagtgagtgcaggggctctgggagttcggtgggcctctctgggttcattgttttcttcttgggcaaatccgaatgccttcttaaaaacctgcctgctataaatgtcttagaagctgctctctagtgtttgcttacgatctggccggaagaacttcccgttccattttttccatcacaacccttggacctgagcttcttcaccctcatcttcaactttaggaaatcgtgctgcgcctgctaatctgagaactctcatgtaacacatgattattgcccgtgataaacaaaagtgtttcattcatggacacctttagtctcagcctccagccttccatgttgagggtttttggccaaattatggtataattattgagcttgcagttcctgccaagggcactgggccccagagactgggcataggcttatttggtctttgcaaaaccccaggacatcagtccctgttaggtgattgcctgtgagtatgtggccagtcagagagcccaaaattctacccagagaacctgctccacttagacatactgctctatacacccgtagggacgccacttcagggtgcaagttcagagcgagcatatgtgccgtgcatggcgcaccgtgtgcgcgcatgcacttgcatgcacaggtatgcatgggtgcatatgtatgttgtacatgtgtatatctgcatgtgtatgtgcctgtgtctgtgtgcaagtgtgtatgcatgcgtgtgcgtgtatgtgtgcgtgtgtgcgtgtgtgcgtgcacgcgtatatgcgtgtgcgcacctgtgttcctgtgcgtgtgtgtgcacaagtttgtgtgcgtgtgtgtgcgcacgcacgcacacctgtgcatggtgtagtgtatgtgtgtgtgttcttccttatttgaaagttgttgccctcggagcagccatgcagcccagcagtccttgaagatcgagctgactatgacgttgctgtcttacctggtacgtcttggctccacaacttcctggtgtgtagagagccagccggctgcctctgatgaggctgcagcccgagccaagccctgtgacaagttaccatccacaggcaccagctaaaaaattcttggagaagcagatccagcatttaatggaaggttcacagattgttaataacgtttctattgcaatagggtgacagaaaggccacctgcctcaggtaaaaggaaaagacctcttaccagccttctattgataaggtccacaattgtggggcaggaaaagaagagtctggccctcctcctctgtgcatgtggccagagttcaccctggttgaacttctggaacagccaccccaacccccttctcaaaccctgcatcttgtgcctgacccacagcccagtctatggagacaggagcattggaaggccgcattttgataagaatgaaaatactggctgtcactcctgcctggagttaccaggccccctgccactgcgtggctggctaagatgccagtttccctcttgccatcaccagggacagtgggtctgccacatgcagaaagatgtttttcctctcttccagccagatgacactttcagagcatggaagaaacaccaacattgaagagtcccattgttgtttgaatcttttgtatcaggcttctcgagctaagcaggaccaccaggcgttttcttattttttacataaacagcactcctactcagtgacacgtaacctaagatcacattgcttctgtttcctgggttttccaccagagcacctttacgaaagacatatgacaaagcatgctcaattcctcaccgtattgtgaaactgttaaccatggctaattgtttgatgatcaggctatattgctcctttctcaggagcataaaccagggtctagcaaactttctttacagggacagacagtaaatgtcccaggctttgagggtcatgcagtctctgtcacagctgctgaagtctgtcagagtgcaaaaacagctgtgagagtcagctcaggctgccgtaacaaaaggccacacaccaggctgtttaagaatttgctctcacagttctggaggctggaggaccaagatcaaggtgtgggcagggctggttcctttgcgaggcctctctccttggcttgtagagactgtcttctctccatgtcttcacgtgctcgttcctctggttgtgtctgtgtcctgatctcctcttctcataaggacaccagtcccactgggttagggcccacccttgtgacctccttttaccctgctcaccttttcaaaagccctatctccaaatacagccacattctgaggcccctggaaattggggcttcaagatatgaattttagggggacatagtttagcccataacagtagccatagacaatttgaaaacatgggcagtggctgtgtgccagtcacactttatttatgcagaagcagccagggactaggtttggatcatgggctgtagttagctggccccagttacaaaaaataactgtcacccaggctggggtacagtggcacaatcatagctcactacagcctcaatctcttgggctcaagtgatcctcccaccgcagcctcctgagtagctgggactacaggtgtgcaccaccagggctggctaacttcttgttgttgttgttgttgttgtttttatagagatggggtcttgctatgttgcccaggctgctgttgaactcctggtctcaagcagtcctccctcctcagcctcctgaggcactgggattttaggtgtgagccactgcacttagcaaactgtttttattcctcaatgaaatttagagactgtcaaaatgtaaagaaacctaaaatatttactaaattgcactaaagccacgatttcgttagaatcatcagaggtaggccgggcgtggtggctcacgcctgtaattccagcattttgggaggctggggcaggtggatcacttgaggccaggagtttgagaccgaccctggcaacatggtgaaaccccgcctctactaaaaatacaaaaattagcctggtgtggtggcacatgcctgtaatcccagctgcttgagaggctgaggcatgagaattgcttgaacctgggagacggaggttgcagtgagccgaggtcgtgccactgcactccagcctgggcgacagagcaagattccgtctcaaaaaaaaaaaaaaaaaaagaaaaggaatcatcagaggtagtatttagtacataaaaaaaatgtttctggaaacaaaagagccctttaagtgtgtttctcttgtattggtaagccacttgtctctttgtgtttgctgtgacagataatcacgcgaagccaatggaaatagatggagaggttgagattccatccagcaaagccacagtccttcggggccatgagtctgaggtgttcatttgtgcctggaatcctgtcagtgatttgctagcctccgggtaaggatgtcagggtggggggcgctccagagttggggagatgggagatgcaagctgctcgcccttctctggagttctgcctaaaggaacacacactccccttcttaccccggtgtgtgggcagaccaaggaatgggtggctctatgagccacttctctacatgtctcatattgtggagaagccatagttccaagtcgttttctccatgtggtggtgaggaacacagcagcacttaaattaccaaatgcaaagatggcaaagagggaaacagggatccagagggatgaaaaagacagaagagcatgtgctgaagatgccctctggccagagagcaagctgtggagagcttcttatcccatttgaaccaaacaccagaggctcctgtgtttttattctgtagatctggagactcaactgcaaggatatggaacctgaatgagaatagcaacgggggctccacccagctcgtgttgaggcactgtatacgagaggggggccatgacgtcccgagtaacaaagacgtcacctcactggactggaatgtaagcatcttccaccccctgggcactttgaaattggtaaaatcggccagccaccaggcaggggctgcagcaatggagcccatgcagacataggaggcaggtggtcctgtgtgctcagcccccactctgatgggctgccagagaggtgttcttggcttctttttttattttgagacggagtcttgctctgttgcccaggctggaatgcagtggtgtgatctcagctcactgcaacttctgcctcctgggttcaagcgattctctttcctcagcttcccgaatagctgggattacaggctcatgccaccacacctggctaatttttgtatttttagtagagatggggtttcaccatgtcggccaggctgctctcgcactcctgacccaatgtgatccgcctgcctcagcctcccaaagtgctgggattataggcgtgagccactgcccccggccagtcttggcttctaagagctattaacaaggctgcatttggcaggcagtgagctgtgtattcagtagccgtatctttgcacgtgagcatgccttagcaaaatgagcctgtggcctcatggtgggaaggtaggctgggagccccaaggtagttcttctggagagatacgtcgtgcagcccaggaaaggtgattctccaccttgggatttcagcaccaggtgttctgtgcattgacacatgggatgcacacagtttgactgctttttattttctgcaaggtcttacgatagctttcagcatggtattttcaattctgtcattaaagaacacgcagtggcaaatggttccagtgtacctggatcctcggagaggctctccgagctgcttcggtgctgccgctcctaagttgtttttgtggggttttgtctctttctggccctcagaccaatggaacactcttggctacgggttcatatgacggttttgcaagaatatggacggaagatggtgagttctgtgtccctcgtgctggggtcgggtaagaggagctgccgaacttaacccttgagtgaacagaccatgacattgaggtcaacatgtttgtttttactaacaggtaacctggccagcaccttaggccaacataaaggccccatctttgccttgaaatggaaccgaaaggggaattacattttgagtgctggtgtagacaaa

SEQ ID NO: 5582 - DNA, 550 bp, Homo sapiens
aatctccacattgcatttgtcagttgctggaaggagccacgtggtatggggcgtgccctgcctgaacttgcacccactgaggggtgagtggcacaggctgtgtgtgttcttcaggcttcggctttcctcatttgataaactgctgcttcccaccgtagaccgcagatttctctgagtaggagtcaagcaacctggctacaagggcacgctcttccgatggcccacagagccaggttagaattgacttgctctgcacctgggcagggctgcagggagacacggtagtgttaactccaggtgcatgtaaaagccatcaatggggtgggaacccaagggcaaagagtaaggggacgcagactccatcctgggcccgagtctgatccagccagcaacctcggcctctgtgcatttcactttcctcacttgtccagcgacaaggctggctggagtcatgagcggagacagccttcatggaacagttgtgcgttcccgagactcagcaggaattctaagtcatggctttggaaaagaagcattatctagaattgag

SEQ ID NO: 5583 - DNA, 1457 bp, Homo sapiens; identical to SEQ ID NO: 5548
  SITE (761): n equals a,t,g, or c
  SITE (940): n equals a,t,g, or c
  SITE (952): n equals a,t,g, or c
  SITE (1226): n equals a,t,g, or c
  SITE (1248): n equals a,t,g, or c
  SITE (1263): n equals a,t,g, or c
  SITE (1270): n equals a,t,g, or c
  SITE (1276): n equals a,t,g, or c
  SITE (1277): n equals a,t,g, or c
  SITE (1278): n equals a,t,g, or c
  SITE (1280): n equals a,t,g, or c
  SITE (1281): n equals a,t,g, or c
  SITE (1284): n equals a,t,g, or c
  SITE (1285): n equals a,t,g, or c
  SITE (1289): n equals a,t,g, or c
  SITE (1290): n equals a,t,g, or c
  SITE (1291): n equals a,t,g, or c
  SITE (1293): n equals a,t,g, or c
  SITE (1297): n equals a,t,g, or c
  SITE (1298): n equals a,t,g, or c
  SITE (1301): n equals a,t,g, or c
  SITE (1306): n equals a,t,g, or c
  SITE (1308): n equals a,t,g, or c
  SITE (1309): n equals a,t,g, or c
  SITE (1313): n equals a,t,g, or c
  SITE (1314): n equals a,t,g, or c
  SITE (1315): n equals a,t,g, or c
  SITE (1316): n equals a,t,g, or c
  SITE (1320): n equals a,t,g, or c

SEQ ID NO: 5584 - DNA, 1423 bp, Homo sapiens; identical to SEQ ID NO: 5550
  SITE (1212): n equals a,t,g, or c

SEQ ID NO: 5585 - DNA, 1425 bp, Homo sapiens; identical to SEQ ID NO: 5551

SEQ ID NO: 5586 - DNA, 5701 bp, Homo sapiens; identical to SEQ ID NO: 5553

SEQ ID NO: 5587 - DNA, 8167 bp, Homo sapiens; identical to SEQ ID NO: 5554
  SITE (2740): n equals a,t,g, or c

SEQ ID NO: 5588 - DNA, 5697 bp, Homo sapiens; identical to SEQ ID NO: 5555

SEQ ID NO: 5589 - DNA, 1625 bp, Homo sapiens; identical to SEQ ID NO: 5556

SEQ ID NO: 5590 - DNA, 5620 bp, Homo sapiens; identical to SEQ ID NO: 5557
  SITE (5105): n equals a,t,g, or c
  SITE (5106): n equals a,t,g, or c
  SITE (5539): n equals a,t,g, or c
  SITE (5540): n equals a,t,g, or c
  SITE (5547): n equals a,t,g, or c
  SITE (5549): n equals a,t,g, or c
  SITE (5558): n equals a,t,g, or c
  SITE (5561): n equals a,t,g, or c
  SITE (5562): n equals a,t,g, or c
  SITE (5563): n equals a,t,g, or c
  SITE (5565): n equals a,t,g, or c
  SITE (5569): n equals a,t,g, or c
  SITE (5578): n equals a,t,g, or c
  SITE (5581): n equals a,t,g, or c

SEQ ID NO: 5591 - DNA, 1359 bp, Homo sapiens; identical to SEQ ID NO: 5558

SEQ ID NO: 5592 - DNA, 5715 bp, Homo sapiens; identical to SEQ ID NO: 5559
  SITE (2073): n equals a,t,g, or c
  SITE (2081): n equals a,t,g, or c
  SITE (2082): n equals a,t,g, or c
  SITE (3445): n equals a,t,g, or c
  SITE (3446): n equals a,t,g, or c
  SITE (3449): n equals a,t,g, or c
  SITE (3454): n equals a,t,g, or c
  SITE (3455): n equals a,t,g, or c
  SITE (3458): n equals a,t,g, or c
  SITE (3461): n equals a,t,g, or c
  SITE (3465): n equals a,t,g, or c
  SITE (3466): n equals a,t,g, or c
  SITE (3467): n equals a,t,g, or c
  SITE (3475): n equals a,t,g, or c
  SITE (3481): n equals a,t,g, or c
  SITE (3483): n equals a,t,g, or c
  SITE (3499): n equals a,t,g, or c
  SITE (3570): n equals a,t,g, or c
  SITE (3571): n equals a,t,g, or c
  SITE (4610): n equals a,t,g, or c
  SITE (4615): n equals a,t,g, or c
  SITE (5057): n equals a,t,g, or c
  SITE (5058): n equals a,t,g, or c
  SITE (5181): n equals a,t,g, or c
  SITE (5454): n equals a,t,g, or c
  SITE (5459): n equals a,t,g, or c
  SITE (5461): n equals a,t,g, or c
  SITE (5504): n equals a,t,g, or c
  SITE (5545): n equals a,t,g, or c
  SITE (5546): n equals a,t,g, or c
  SITE (5550): n equals a,t,g, or c
  SITE (5591): n equals a,t,g, or c
  SITE (5594): n equals a,t,g, or c
  SITE (5599): n equals a,t,g, or c
  SITE (5600): n equals a,t,g, or c
  SITE (5616): n equals a,t,g, or c
  SITE (5641): n equals a,t,g, or c
  SITE (5644): n equals a,t,g, or c
  SITE (5651): n equals a,t,g, or c
  SITE (5697): n equals a,t,g, or c

SEQ ID NO: 5593 - DNA, 1425 bp, Homo sapiens; identical to SEQ ID NO: 5560
  SITE (805): n equals a,t,g, or c

SEQ ID NO: 5594 - DNA, 1424 bp, Homo sapiens; identical to SEQ ID NO: 5561

SEQ ID NO: 5595 - DNA, 2325 bp, Homo sapiens; identical to SEQ ID NO: 5562
  SITE (492): n equals a,t,g, or c
  SITE (827): n equals a,t,g, or c
  SITE (862): n equals a,t,g, or c
  SITE (867): n equals a,t,g, or c
  SITE (888): n equals a,t,g, or c
  SITE (933): n equals a,t,g, or c
  SITE (948): n equals a,t,g, or c
  SITE (949): n equals a,t,g, or c
  SITE (1189): n equals a,t,g, or c
  SITE (1233): n equals a,t,g, or c
  SITE (1291): n equals a,t,g, or c
  SITE (1443): n equals a,t,g, or c
  SITE (1445): n equals a,t,g, or c
  SITE (1467): n equals a,t,g, or c
  SITE (1471): n equals a,t,g, or c
  SITE (1486): n equals a,t,g, or c
  SITE (1487): n equals a,t,g, or c
  SITE (1492): n equals a,t,g, or c
  SITE (1503): n equals a,t,g, or c
  SITE (1509): n equals a,t,g, or c
  SITE (1511): n equals a,t,g, or c
  SITE (1532): n equals a,t,g, or c
  SITE (1538): n equals a,t,g, or c
  SITE (1763): n equals a,t,g, or c
  SITE (1842): n equals a,t,g, or c

SEQ ID NO: 5596 - DNA, 1424 bp, Homo sapiens; identical to SEQ ID NO: 5561

SEQ ID NO: 5597 - DNA, 2213 bp, Homo sapiens; identical to SEQ ID NO: 5565
  SITE (756): n equals a,t,g, or c
  SITE (1310): n equals a,t,g, or c

SEQ ID NO: 5598 - DNA, 2215 bp, Homo sapiens; identical to SEQ ID NO: 5567
  SITE (849): n equals a,t,g, or c
  SITE (850): n equals a,t,g, or c
  SITE (924): n equals a,t,g, or c
  SITE (930): n equals a,t,g, or c
  SITE (1082): n equals a,t,g, or c
  SITE (1142): n equals a,t,g, or c
  SITE (1154): n equals a,t,g, or c
  SITE (1182): n equals a,t,g, or c
  SITE (1198): n equals a,t,g, or c
  SITE (1204): n equals a,t,g, or c
  SITE (1319): n equals a,t,g, or c

SEQ ID NO: 5599 - DNA, 2212 bp, Homo sapiens; identical to SEQ ID NO: 5568

SEQ ID NO: 5600 - DNA, 2213 bp, Homo sapiens; identical to SEQ ID NO: 5570

SEQ ID NO: 5601 - DNA, 7752 bp, Homo sapiens; identical to SEQ ID NO: 5571
  SITE (3050): n equals a,t,g, or c
  SITE (3051): n equals a,t,g, or c
  SITE (3056): n equals a,t,g, or c
  SITE (3057): n equals a,t,g, or c

SEQ ID NO: 5602 - DNA, 2213 bp, Homo sapiens; identical to SEQ ID NO: 5572

SEQ ID NO: 5603 - DNA, 794 bp, Homo sapiens; identical to SEQ ID NO: 5573

SEQ ID NO: 5604 - DNA, 2206 bp, Homo sapiens; identical to SEQ ID NO: 5574
  SITE (1136): n equals a,t,g, or c
  SITE (1141): n equals a,t,g, or c
  SITE (1182): n equals a,t,g, or c
  SITE (1267): n equals a,t,g, or c
  SITE (1268): n equals a,t,g, or c

SEQ ID NO: 5605 - DNA, 130 bp, Homo sapiens; identical to SEQ ID NO: 5575

SEQ ID NO: 5606 - DNA, 2211 bp, Homo sapiens; identical to SEQ ID NO: 5576
  SITE (568): n equals a,t,g, or c
  SITE (1228): n equals a,t,g, or c
  SITE (1236): n equals a,t,g, or c
  SITE (1453): n equals a,t,g, or c
  SITE (1666): n equals a,t,g, or c

SEQ ID NO: 5607 - DNA, 2212 bp, Homo sapiens; identical to SEQ ID NO: 5577

SEQ ID NO: 5608 - DNA, 2213 bp, Homo sapiens; identical to SEQ ID NO: 5578
  SITE (1151): n equals a,t,g, or c
  SITE (1200): n equals a,t,g, or c
  SITE (1212): n equals a,t,g, or c
  SITE (1231): n equals a,t,g, or c
  SITE (1304): n equals a,t,g, or c
  SITE (1305): n equals a,t,g, or c
  SITE (1701): n equals a,t,g, or c
  SITE (1712): n equals a,t,g, or c
  SITE (1720): n equals a,t,g, or c
  SITE (1840): n equals a,t,g, or c

SEQ ID NO: 5609 - DNA, 2212 bp, Homo sapiens; identical to SEQ ID NO: 5579

SEQ ID NO: 5610 - DNA, 312 bp, Homo sapiens
gtcctgggccgggcgcggtggctcacgcctgtaatcccagcactttgggaggccgaggcgggcggatcacgaggtcaggagatcgagacgatcccggctaaaacggtgaaaccccgtctctactaaaaatacaaaaaattagccgggcgtagtggcgggcgcctgtagtcccagctacttgggaggctgaggcaggagaatggcgtgaacccgggaggcggagcttgcagtgagccgagatcccgccactgcactccagcctgggggacagagcgagactccgtctcaaaaaaaaaaaaaaaaaagactgtc

SEQ ID NO: 5611 - DNA, 300 bp, Homo sapiens
gctcacgcctgtaatcccagcactttgggaggccgaggcgggcggatcacgaggtcaggagatcgagaccatcctggctaacacggtgaaaccccatctctactaaaaatacaaaaaattagccgggcgtggtagcgggcgcctgtagtcccagctactcgggaggctgaggcaggagaatggcgtgaacccgggaggcggagcttgcagtgagccgagatcgcgccactgcactccagcctgggcgacagagcgagactccgtctcaaaaaaaaaaaaaaaaaaaaaaaaaaaaattaa

SEQ ID NO: 5612 - DNA, 183 bp, Homo sapiens
gaaaaatttagccgggcgtggtggcgggcgcatgtagtcccggctactcgggaggctgaggcaggagaatggcgtgaacccgggaggcggagcttgcagtgagccgagatggcgccactgcactccagcctgggcgacagagcgagactccgtctcaaaaaaaaaaaaaaaaataataatgaa

SEQ ID NO: 5613 - DNA, 322 bp, Homo sapiens
cggccgggcgcggtggctgacgcctgtaatcccagcactttgggaggccgaggcgggcggatcacgaggtcaggagatcgagaccatcctggctaacacggtgaaaccccgtctctactaaaaatacaaaaaattagccgggcgtggtagcgggcgcctgtagtcccagctactcgggaggctgaggcaggagaatggcgtgaacccgggaggcggagctttcagtgagccgagatcgcgccactgcactccagcctgggcgacagagcgagactccgtctcaaaaaaaaaaaaaaaaaaaaaaaaaaaaaaaaaaaaattc

SEQ ID NO: 5614 - DNA, 279 bp, Homo sapiens
cactttgggaggccgaggcgggcggatcacgaggtcaggagatcgagaccattctggctaacacggtgaaaccccgtctctactaaaaatacaaaaaattagccgggcgtggtagcgggcgcctgtagtcccagctactcgggaggctgaggcaggagaatggcgtgaacccgggaggcggagcttgcagtgagccgagatcgcgccactgcactccagcctgggcgacagagcgagactccgtctcaaaaaaaaaaaaaaaaaaaaaaaaaaaaaaga

SEQ ID NO: 5615 - DNA, 168 bp, Homo sapiens
ggcgtggtggggggcgcctgtagtcccagctactgggaaggctgaggcaggagaatggcgtgaacccgggaggcggagcttgtagtgagccgagatcgtgccactgcactccagcctgggagacagagcgagactccgtctcaaaaaaaaaaaaaaaaaaaaaagatg

SEQ ID NO: 5616 - DNA, 193 bp, Homo sapiens; identical to SEQ ID NO: 5435

SEQ ID NO: 5617 - DNA, 175 bp, Homo sapiens
cgggcgtagtggcgggcgcctgtagtcccagctacttgggaggctgaggcaggagaatggcgtgaacccgggaggcggagcttgcagtgagccgagattgcgccactgcactccagcctgggcgacagagcgagactccgtctcaaaaaaaaaaaaaaaaaaaaaaaaaaatcac

SEQ ID NO: 5618 - DNA, 190 bp, Homo sapiens
atcactgggcgtagtggcgggcgcctgtagtcccagctacttgggaggctgaggcaggagaatggcgtgaacccgggaggcggagcttgcagtgagccgagatcccgccactgcactccagcctgggcgacagagcgagactccgtctcaaaaaaaaaaaaaaaaaaaaaaaaaaaaaaaaaaaaagaaa

SEQ ID NO: 5619 - DNA, 316 bp, Homo sapiens
aatttgttcaattcggccgggcgcggtggctcacgcctgtaatcccagcactttgggaggccgaggcgggcggatcacgaggtcaggagatcgagaccatcccggctaaaacggtgaaaccccgtctctactaaaaatacaaaaaattagccgggcgtagtggcgggcgcctgtagtcccagctacttgggaggctgaggcaggagaatggcgtgaacccgggaggcggagcttgcagtgagccgagatcccgccactgcactccagcctgggcgacagagcgagactccgtctcaaaaaaaaaaaaaaaaatttg

SEQ ID NO: 5620 - DNA, 57 bp, Homo sapiens
tgcactccagcctgggggacagagcgagactccgtctcaaaaaaaaaaaaaaaaaga

SEQ ID NO: 5621 - DNA, 45 bp, Homo sapiens
ccagcctgggggacagagcgagactccgtctcaaaaaaaaaaaaa

SEQ ID NO: 5622 - DNA, 2298 bp, Homo sapiens
cgaacatgggctctttaatctgtaccacgcaatggacggtgccagccatttgcacgtgctggttgtcaaggaatacgagatggcaatttataagaaatattggcccaaccacatcatgctggtgctccccagtatcttcaacagtgctggagttggtgagtgtcctttaacatcatctactcagtcaaactcctgtgaacgaacacttgagagagtgttctagagacaaaagttaaacatgtgacatcaggccttttacttttggacttttaaagctattttcattttgtctgacttttttatgcagtcttcccccgctacccgcacccagtgtttggttatccatttaatcgatattttctttctttctttctctctttttttttttttttttttttgagatggagtctcgttctgtcatccaggctggagtgcaacggcatgatctcgactcactgcagcctttgtcttacgggttcaagcgattctcctgcctcagctacccgagtagctggaattacaggcgccagccatgacgcccggctaatttttgtgtttttgtagagacggggtttcaccatgttggccaggctggtcttaaactcctgacctcaggtgactggcctgcctcggccccccaaactgctgggattataggcgtgagccactgcgcctggccaaattgatattttcaatggttagagaagaaagcataagaaagcaaatttgtgttccacctggagaggagtgttttcctccctgtagttttctctccctagcccatgggctgtgttttgtgacaggtgattcatgtcaggaaggtcggggctggcttgtctgggcggccccgacagcaggtctgcctggggtctgtctgctgtgggtgtgggtgcaggtcagtcctgagtccaggtgctttgcccactgcaggtgctgctcatttcctcatcaaggagctgtcctaccataacctggagctcgagcggaaccggcaggaggagctgggaatcaagccgcaggacatctggcctttcattgtgatctctgatgactcctgcgtgatgtggaacgtggtggatgtcaactctgctggggagagaagcaggtgaggtaacctgagagcaccacctcctgccaccctacgaatgatgaccaacgagtgtgccctctttgtatggggaatgtgcccacccctggaagaccggagggcctctcatagtagaaggggtggttgtggttgtggttcccagagtcctgggtgtggtaaaagtgagctcatgtgccaagcctggcttgcttttaattttaaaaaattgttattgggccgggcgcggtggctcatgcctgtaatcccagcactttgggaggctgaggtgggtggatcacgaggtcaggagatcgagaccatcctggctaacacggtgaaaccctgtctctactaaaaatacaaaaaaatttagctgggcgtggtggcgggcgcctgtagtcccagctacttgggaggctgaggcagaagcatggcgtgaacccgggaggcggagcttgtagtaagtggagatggcgccactgcactccagcctggcagacagagcgagactccgtctaaaaaaaaaaaaaagaaagaaaaaaattgttattgaagtataatgcagaaaatcacactatccatttagtataatatatagacaaaaaagaaagtataatacatatacagaacttttcccaagctaagcacattcatttaacctactccgatattaagaaagggacattgctgcccccccagaaactcccttcctgctgccccagccccacccctcctcactagcctgactgctgactcctagctttatttttatttgctgtgtggctttaggcaaatggctaaatcatgttgggttctagtttccttgtctgcgattaatacctatgccatggagttgttgtgagaattgactaaattatggtctgcaaatgtgttcagcacatagcagaaatgagcgcccgtgggaagcgcccagcagggtgcctggccctggggggactgtgcgggcaccggcccgtccaggtgttcacggcagtctgagagccggtgccacactgcctggtcccaaggaccttgctgctgctcgtgtgtcagcctagggactcactctccctccttggagcagggagttctcctggtcggaaaggaacgtgtctttgaagcacatcatgcagcacatcgaggcggcccccgacatcatgcactacgccctgctgggcctgcggaagtggtccagcaagacccgggccagc

SEQ ID NO: 5623 - DNA, 5088 bp, Homo sapiens
  SITE (5): n equals a,t,g, or c
  SITE (6): n equals a,t,g, or c
  SITE (7): n equals a,t,g, or c
  SITE (8): n equals a,t,g, or c
  SITE (9): n equals a,t,g, or c
  SITE (10): n equals a,t,g, or c
  SITE (11): n equals a,t,g, or c
  SITE (12): n equals a,t,g, or c
  SITE (13): n equals a,t,g, or c
  SITE (14): n equals a,t,g, or c
  SITE (15): n equals a,t,g, or c
  SITE (16): n equals a,t,g, or c
  SITE (17): n equals a,t,g, or c
  SITE (18): n equals a,t,g, or c
  SITE (19): n equals a,t,g, or c
  SITE (20): n equals a,t,g, or c
  SITE (21): n equals a,t,g, or c
  SITE (22): n equals a,t,g, or c
  SITE (23): n equals a,t,g, or c
  SITE (24): n equals a,t,g, or c
  SITE (25): n equals a,t,g, or c
  SITE (26): n equals a,t,g, or c
  SITE (27): n equals a,t,g, or c
  SITE (28): n equals a,t,g, or c
  SITE (29): n equals a,t,g, or c
  SITE (30): n equals a,t,g, or c
  SITE (31): n equals a,t,g, or c
  SITE (32): n equals a,t,g, or c
  SITE (33): n equals a,t,g, or c
  SITE (34): n equals a,t,g, or c
  SITE (35): n equals a,t,g, or c
  SITE (36): n equals a,t,g, or c
  SITE (37): n equals a,t,g, or c
  SITE (38): n equals a,t,g, or c
  SITE (39): n equals a,t,g, or c
  SITE (40): n equals a,t,g, or c
  SITE (41): n equals a,t,g, or c
  SITE (42): n equals a,t,g, or c
  SITE (43): n equals a,t,g, or c
  SITE (44): n equals a,t,g, or c
  SITE (45): n equals a,t,g, or c
  SITE (46): n equals a,t,g, or c
  SITE (47): n equals a,t,g, or c
  SITE (48): n equals a,t,g, or c
  SITE (49): n equals a,t,g, or c
  SITE (50): n equals a,t,g, or c
  SITE (51): n equals a,t,g, or c
  SITE (52): n equals a,t,g, or c
  SITE (53): n equals a,t,g, or c
  SITE (54): n equals a,t,g, or c
  SITE (55): n equals a,t,g, or c
  SITE (56): n equals a,t,g, or c
  SITE (57): n equals a,t,g, or c
  SITE (58): n equals a,t,g, or c
  SITE (59): n equals a,t,g, or c
  SITE (60): n equals a,t,g, or c
  SITE (61): n equals a,t,g, or c
  SITE (62): n equals a,t,g, or c
  SITE (63): n equals a,t,g, or c
  SITE (64): n equals a,t,g, or c
  SITE (65): n equals a,t,g, or c
  SITE (66): n equals a,t,g, or c
  SITE (67): n equals a,t,g, or c
  SITE (68): n equals a,t,g, or c
  SITE (69): n equals a,t,g, or c
  SITE (70): n equals a,t,g, or c
  SITE (71): n equals a,t,g, or c
  SITE (72): n equals a,t,g, or c
  SITE (73): n equals a,t,g, or c
  SITE (74): n equals a,t,g, or c
  SITE (75): n equals a,t,g, or c
  SITE (76): n equals a,t,g, or c
  SITE (77): n equals a,t,g, or c
  SITE (78): n equals a,t,g, or c
  SITE (79): n equals a,t,g, or c
  SITE (80): n equals a,t,g, or c
  SITE (81): n equals a,t,g, or c
  SITE (82): n equals a,t,g, or c
  SITE (83): n equals a,t,g, or c
  SITE (84): n equals a,t,g, or c
  SITE (85): n equals a,t,g, or c
  SITE (86): n equals a,t,g, or c
  SITE (87): n equals a,t,g, or c
  SITE (88): n equals a,t,g, or c
  SITE (89): n equals a,t,g, or c
  SITE (90): n equals a,t,g, or c
  SITE (91): n equals a,t,g, or c
  SITE (92): n equals a,t,g, or c
  SITE (93): n equals a,t,g, or c
  SITE (94): n equals a,t,g, or c
  SITE (95): n equals a,t,g, or c
  SITE (96): n equals a,t,g, or c
  SITE (97): n equals a,t,g, or c
  SITE (98): n equals a,t,g, or c
  SITE (99): n equals a,t,g, or c
  SITE (100): n equals a,t,g, or c
  SITE (101): n equals a,t,g, or c
  SITE (102): n equals a,t,g, or c
  SITE (103): n equals a,t,g, or c
  SITE (104): n equals a,t,g, or c
  SITE (105): n equals a,t,g, or c
  SITE (106): n equals a,t,g, or c
  SITE (107): n equals a,t,g, or c
  SITE (108): n equals a,t,g, or c
  SITE (109): n equals a,t,g, or c
  SITE (110): n equals a,t,g, or c
  SITE (111): n equals a,t,g, or c
  SITE (112): n equals a,t,g, or c
  SITE (113): n equals a,t,g, or c
  SITE (114): n equals a,t,g, or c
  SITE (115): n equals a,t,g, or c
  SITE (116): n equals a,t,g, or c
  SITE (117): n equals a,t,g, or c
  SITE (118): n equals a,t,g, or c
  SITE (119): n equals a,t,g, or c
  SITE (120): n equals a,t,g, or c
  SITE (121): n equals a,t,g, or c
  SITE (122): n equals a,t,g, or c
  SITE (123): n equals a,t,g, or c
  SITE (124): n equals a,t,g, or c
  SITE (125): n equals a,t,g, or c
  SITE (126): n equals a,t,g, or c
  SITE (127): n equals a,t,g, or c
  SITE (128): n equals a,t,g, or c
  SITE (129): n equals a,t,g, or c
  SITE (130): n equals a,t,g, or c
  SITE (131): n equals a,t,g, or c
  SITE (132): n equals a,t,g, or c
  SITE (133): n equals a,t,g, or c
  SITE (134): n equals a,t,g, or c
  SITE (135): n equals a,t,g, or c
  SITE (136): n equals a,t,g, or c
  SITE (137): n equals a,t,g, or c
  SITE (138): n equals a,t,g, or c
  SITE (139): n equals a,t,g, or c
  SITE (140): n equals a,t,g, or c
  SITE (141): n equals a,t,g, or c
  SITE (142): n equals a,t,g, or c
  SITE (143): n equals a,t,g, or c
  SITE (144): n equals a,t,g, or c
  SITE (145): n equals a,t,g, or c
  SITE (146): n equals a,t,g, or c
  SITE (147): n equals a,t,g, or c
  SITE (148): n equals a,t,g, or c
  SITE (149): n equals a,t,g, or c
  SITE (150): n equals a,t,g, or c
  SITE (151): n equals a,t,g, or c
  SITE (152): n equals a,t,g, or c
  SITE (153): n equals a,t,g, or c
  SITE (154): n equals a,t,g, or c
  SITE (155): n equals a,t,g, or c
  SITE (156): n equals a,t,g, or c
  SITE (157): n equals a,t,g, or c
  SITE (158): n equals a,t,g, or c
  SITE (159): n equals a,t,g, or c
  SITE (160): n equals a,t,g, or c
  SITE (161): n equals a,t,g, or c
  SITE (162): n equals a,t,g, or c
  SITE (163): n equals a,t,g, or c
  SITE (164): n equals a,t,g, or c
  SITE (165): n equals a,t,g, or c
  SITE (166): n equals a,t,g, or c
  SITE (167): n equals a,t,g, or c
  SITE (168): n equals a,t,g, or c
  SITE (169): n equals a,t,g, or c
  SITE (170): n equals a,t,g, or c
  SITE (171): n equals a,t,g, or c
  SITE (172): n equals a,t,g, or c
  SITE (173): n equals a,t,g, or c
  SITE (174): n equals a,t,g, or c
  SITE (175): n equals a,t,g, or c
  SITE (176): n equals a,t,g, or c
  SITE (177): n equals a,t,g, or c
  SITE (178): n equals a,t,g, or c
  SITE (179): n equals a,t,g, or c
  SITE (180): n equals a,t,g, or c
  SITE (181): n equals a,t,g, or c
  SITE (182): n equals a,t,g, or c
  SITE (183): n equals a,t,g, or c
  SITE (184): n equals a,t,g, or c
  SITE (185): n equals a,t,g, or c
  SITE (186): n equals a,t,g, or c
  SITE (187): n equals a,t,g, or c
  SITE (188): n equals a,t,g, or c
  SITE (189): n equals a,t,g, or c
  SITE (190): n equals a,t,g, or c
  SITE (191): n equals a,t,g, or c
  SITE (192): n equals a,t,g, or c
  SITE (193): n equals a,t,g, or c
  SITE (194): n equals a,t,g, or c
  SITE (195): n equals a,t,g, or c
  SITE (196): n equals a,t,g, or c
  SITE (197): n equals a,t,g, or c
  SITE (198): n equals a,t,g, or c
  SITE (199): n equals a,t,g, or c
  SITE (200): n equals a,t,g, or c
  SITE (201): n equals a,t,g, or c
  SITE (202): n equals a,t,g, or c
  SITE (203): n equals a,t,g, or c
  SITE (204): n equals a,t,g, or c
  SITE (205): n equals a,t,g, or c
  SITE (206): n equals a,t,g, or c
  SITE (207): n equals a,t,g, or c
  SITE (208): n equals a,t,g, or c
  SITE (209): n equals a,t,g, or c
  SITE (210): n equals a,t,g, or c
  SITE (211): n equals a,t,g, or c
  SITE (212): n equals a,t,g, or c
  SITE (213): n equals a,t,g, or c
  SITE (214): n equals a,t,g, or c
  SITE (215): n equals a,t,g, or c
  SITE (216): n equals a,t,g, or c
  SITE (217): n equals a,t,g, or c
  SITE (218): n equals a,t,g, or c
  SITE (219): n equals a,t,g, or c
  SITE (220): n equals a,t,g, or c
  SITE (221): n equals a,t,g, or c
  SITE (222): n equals a,t,g, or c
  SITE (223): n equals a,t,g, or c
  SITE (224): n equals a,t,g, or c
  SITE (225): n equals a,t,g, or c
  SITE (226): n equals a,t,g, or c
  SITE (227): n equals a,t,g, or c
  SITE (228): n equals a,t,g, or c
  SITE (229): n equals a,t,g, or c
  SITE (230): n equals a,t,g, or c
  SITE (231): n equals a,t,g, or c
  SITE (232): n equals a,t,g, or c
  SITE (233): n equals a,t,g, or c
  SITE (234): n equals a,t,g, or c
  SITE (235): n equals a,t,g, or c
  SITE (236): n equals a,t,g, or c
  SITE (237): n equals a,t,g, or c
  SITE (238): n equals a,t,g, or c
  SITE (239): n equals a,t,g, or c
  SITE (240): n equals a,t,g, or c
  SITE (241): n equals a,t,g, or c
  SITE (242): n equals a,t,g, or c
  SITE (243): n equals a,t,g, or c
  SITE (244): n equals a,t,g, or c
  SITE (245): n equals a,t,g, or c
  SITE (246): n equals a,t,g, or c
  SITE (247): n equals a,t,g, or c
  SITE (248): n equals a,t,g, or c
  SITE (249): n equals a,t,g, or c
  SITE (250): n equals a,t,g, or c
  SITE (251): n equals a,t,g, or c
  SITE (252): n equals a,t,g, or c
  SITE (253): n equals a,t,g, or c
  SITE (254): n equals a,t,g, or c
  SITE (255): n equals a,t,g, or c
  SITE (256): n equals a,t,g, or c
  SITE (257): n equals a,t,g, or c
  SITE (258): n equals a,t,g, or c
  SITE (259): n equals a,t,g, or c
  SITE (260): n equals a,t,g, or c
  SITE (261): n equals a,t,g, or c
  SITE (262): n equals a,t,g, or c
  SITE (263): n equals a,t,g, or c
  SITE (264): n equals a,t,g, or c
  SITE (265): n equals a,t,g, or c
  SITE (266): n equals a,t,g, or c
  SITE (267): n equals a,t,g, or c
  SITE (268): n equals a,t,g, or c
  SITE (269): n equals a,t,g, or c
  SITE (270): n equals a,t,g, or c
  SITE (271): n equals a,t,g, or c
  SITE (272): n equals a,t,g, or c
  SITE (273): n equals a,t,g, or c
  SITE (274): n equals a,t,g, or c
  SITE (275): n equals a,t,g, or c
  SITE (276): n equals a,t,g, or c
  SITE (277): n equals a,t,g, or c
  SITE (278): n equals a,t,g, or c
  SITE (279): n equals a,t,g, or c
  SITE (280): n equals a,t,g, or c
  SITE (281): n equals a,t,g, or c
  SITE (282): n equals a,t,g, or c
  SITE (283): n equals a,t,g, or c
  SITE (284): n equals a,t,g, or c
  SITE (285): n equals a,t,g, or c
  SITE (286): n equals a,t,g, or c
  SITE (287): n equals a,t,g, or c
  SITE (288): n equals a,t,g, or c
  SITE (289): n equals a,t,g, or c
  SITE (290): n equals a,t,g, or c
  SITE (291): n equals a,t,g, or c
  SITE (292): n equals a,t,g, or c
  SITE (293): n equals a,t,g, or c
  SITE (294): n equals a,t,g, or c
  SITE (295): n equals a,t,g, or c
  SITE (296): n equals a,t,g, or c
  SITE (297): n equals a,t,g, or c
  SITE (298): n equals a,t,g, or c
  SITE (299): n equals a,t,g, or c
  SITE (300): n equals a,t,g, or c
  SITE (301): n equals a,t,g, or c
  SITE (302): n equals a,t,g, or c
  SITE (303): n equals a,t,g, or c
  SITE (304): n equals a,t,g, or c
  SITE (3943): n equals a,t,g, or c
  SITE (3944): n equals a,t,g, or c
  SITE (3945): n equals a,t,g, or c
  SITE (3946): n equals a,t,g, or c
  SITE (3947): n equals a,t,g, or c
  SITE (3948): n equals a,t,g, or c
  SITE (3949): n equals a,t,g, or c
  SITE (3950): n equals a,t,g, or c
  SITE (3951): n equals a,t,g, or c
  SITE (3952): n equals a,t,g, or c
  SITE (3953): n equals a,t,g, or c
  SITE (3954): n equals a,t,g, or c
  SITE (3955): n equals a,t,g, or c
  SITE (3956): n equals a,t,g, or c
  SITE (3957): n equals a,t,g, or c
  SITE (3958): n equals a,t,g, or c
  SITE (3959): n equals a,t,g, or c
  SITE (3960): n equals a,t,g, or c
  SITE (3961): n equals a,t,g, or c
  SITE (3962): n equals a,t,g, or c
  SITE (3963): n equals a,t,g, or c
  SITE (3964): n equals a,t,g, or c
  SITE (3965): n equals a,t,g, or c
  SITE (3966): n equals a,t,g, or c
  SITE (3967): n equals a,t,g, or c
  SITE (3968): n equals a,t,g, or c
  SITE (3969): n equals a,t,g, or c
  SITE (3970): n equals a,t,g, or c
  SITE (3971): n equals a,t,g, or c
  SITE (3972): n equals a,t,g, or c
  SITE (3973): n equals a,t,g, or c
  SITE (3974): n equals a,t,g, or c
  SITE (3975): n equals a,t,g, or c
  SITE (3976): n equals a,t,g, or c
  SITE (3977): n equals a,t,g, or c
  SITE (3978): n equals a,t,g, or c
  SITE (3979): n equals a,t,g, or c
  SITE (3980): n equals a,t,g, or c
  SITE (3981): n equals a,t,g, or c
  SITE (3982): n equals a,t,g, or c
  SITE (3983): n equals a,t,g, or c
  SITE (3984): n equals a,t,g, or c
  SITE (3985): n equals a,t,g, or c
  SITE (3986): n equals a,t,g, or c
  SITE (3987): n equals a,t,g, or c
  SITE (3988): n equals a,t,g, or c
  SITE (3989): n equals a,t,g, or c
  SITE (3990): n equals a,t,g, or c
  SITE (3991): n equals a,t,g, or c
  SITE (3992): n equals a,t,g, or c
  SITE (3993): n equals a,t,g, or c
  SITE (3994): n equals a,t,g, or c
  SITE (3995): n equals a,t,g, or c
  SITE (3996): n equals a,t,g, or c
  SITE (3997): n equals a,t,g, or c
  SITE (3998): n equals a,t,g, or c
  SITE (3999): n equals a,t,g, or c
  SITE (4000): n equals a,t,g, or c
  SITE (4001): n equals a,t,g, or c
  SITE (4002): n equals a,t,g, or c
  SITE (4003): n equals a,t,g, or c
  SITE (4004): n equals a,t,g, or c
  SITE (4005): n equals a,t,g, or c
  SITE (4006): n equals a,t,g, or c
  SITE (4007): n equals a,t,g, or c
  SITE (4008): n equals a,t,g, or c
  SITE (4009): n equals a,t,g, or c
  SITE (4010): n equals a,t,g, or c
  SITE (4011): n equals a,t,g, or c
  SITE (4012): n equals a,t,g, or c
  SITE (4013): n equals a,t,g, or c
  SITE (4014): n equals a,t,g, or c
  SITE (4015): n equals a,t,g, or c
  SITE (4016): n equals a,t,g, or c
  SITE (4017): n equals a,t,g, or c
  SITE (4018): n equals a,t,g, or c
  SITE (4019): n equals a,t,g, or c
  SITE (4020): n equals a,t,g, or c
  SITE (4021): n equals a,t,g, or c
  SITE (4022): n equals a,t,g, or c
  SITE (4023): n equals a,t,g, or c
  SITE (4024): n equals a,t,g, or c
  SITE (4025): n equals a,t,g, or c
  SITE (4026): n equals a,t,g, or c
  SITE (4027): n equals a,t,g, or c
  SITE (4028): n equals a,t,g, or c
  SITE (4029): n equals a,t,g, or c
  SITE (4030): n equals a,t,g, or c
  SITE (4031): n equals a,t,g, or c
  SITE (4032): n equals a,t,g, or c
  SITE (4033): n equals a,t,g, or c
  SITE (4034): n equals a,t,g, or c
  SITE (4035): n equals a,t,g, or c
  SITE (4036): n equals a,t,g, or c
  SITE (4037): n equals a,t,g, or c
  SITE (4038): n equals a,t,g, or c
  SITE (4039): n equals a,t,g, or c
  SITE (4040): n equals a,t,g, or c
  SITE (4041): n equals a,t,g, or c
  SITE (4042): n equals a,t,g, or c
  SITE (4043): n equals a,t,g, or c
  SITE (4044): n equals a,t,g, or c
  SITE (4045): n equals a,t,g, or c
  SITE (4046): n equals a,t,g, or c
  SITE (4047): n equals a,t,g, or c
  SITE (4048): n equals a,t,g, or c
  SITE (4049): n equals a,t,g, or c
  SITE (4050): n equals a,t,g, or c
  SITE (4051): n equals a,t,g, or c
  SITE (4052): n equals a,t,g, or c
  SITE (4053): n equals a,t,g, or c
  SITE (4054): n equals a,t,g, or c
  SITE (4055): n equals a,t,g, or c
  SITE (4056): n equals a,t,g, or c
  SITE (4057): n equals a,t,g, or c
  SITE (4058): n equals a,t,g, or c
  SITE (4059): n equals a,t,g, or c
  SITE (4060): n equals a,t,g, or c
  SITE (4061): n equals a,t,g, or c
  SITE (4062): n equals a,t,g, or c
  SITE (4063): n equals a,t,g, or c
  SITE (4064): n equals a,t,g, or c
  SITE (4065): n equals a,t,g, or c
  SITE (4066): n equals a,t,g, or c
  SITE (4067): n equals a,t,g, or c
  SITE (4068): n equals a,t,g, or c
  SITE (4069): n equals a,t,g, or c
  SITE (4070): n equals a,t,g, or c
  SITE (4071): n equals a,t,g, or c
  SITE (4072): n equals a,t,g, or c
  SITE (4073): n equals a,t,g, or c
  SITE (4074): n equals a,t,g, or c
  SITE (4075): n equals a,t,g, or c
  SITE (4076): n equals a,t,g, or c
  SITE (4077): n equals a,t,g, or c
  SITE (4078): n equals a,t,g, or c
  SITE (4079): n equals a,t,g, or c
  SITE (4080): n equals a,t,g, or c
  SITE (4081): n equals a,t,g, or c
  SITE (4082): n equals a,t,g, or c
  SITE (4083): n equals a,t,g, or c
  SITE (4084): n equals a,t,g, or c
  SITE (4085): n equals a,t,g, or c
  SITE (4086): n equals a,t,g, or c
  SITE (4087): n equals a,t,g, or c
  SITE (4088): n equals a,t,g, or c
  SITE (4089): n equals a,t,g, or c
  SITE (4090): n equals a,t,g, or c
  SITE (4091): n equals a,t,g, or c
  SITE (4092): n equals a,t,g, or c
  SITE (4093): n equals a,t,g, or c
  SITE (4094): n equals a,t,g, or c
  SITE (4095): n equals a,t,g, or c
  SITE (4096): n equals a,t,g, or c
  SITE (4097): n equals a,t,g, or c
  SITE (4098): n equals a,t,g, or c
  SITE (4099): n equals a,t,g, or c
  SITE (4100): n equals a,t,g, or c
  SITE (4101): n equals a,t,g, or c
  SITE (4102): n equals a,t,g, or c
  SITE (4103): n equals a,t,g, or c
  SITE (4104): n equals a,t,g, or c
  SITE (4105): n equals a,t,g, or c
  SITE (4106): n equals a,t,g, or c
  SITE (4107): n equals a,t,g, or c
  SITE (4108): n equals a,t,g, or c
  SITE (4109): n equals a,t,g, or c
  SITE (4110): n equals a,t,g, or c
  SITE (4111): n equals a,t,g, or c
  SITE (4112): n equals a,t,g, or c
  SITE (4113): n equals a,t,g, or c
  SITE (4114): n equals a,t,g, or c
  SITE (4115): n equals a,t,g, or c
  SITE (4116): n equals a,t,g, or c
  SITE (4117): n equals a,t,g, or c
  SITE (4118): n equals a,t,g, or c
  SITE (4119): n equals a,t,g, or c
  SITE (4120): n equals a,t,g, or c
  SITE (4121): n equals a,t,g, or c
  SITE (4122): n equals a,t,g, or c
  SITE (4123): n equals a,t,g, or c
  SITE (4124): n equals a,t,g, or c
  SITE (4125): n equals a,t,g, or c
  SITE (4126): n equals a,t,g, or c
  SITE (4127): n equals a,t,g, or c
  SITE (4128): n equals a,t,g, or c
  SITE (4129): n equals a,t,g, or c
  SITE (4130): n equals a,t,g, or c
  SITE (4131): n equals a,t,g, or c
  SITE (4132): n equals a,t,g, or c
  SITE (4133): n equals a,t,g, or c
  SITE (4134): n equals a,t,g, or c
  SITE (4135): n equals a,t,g, or c
  SITE (4136): n equals a,t,g, or c
  SITE (4137): n equals a,t,g, or c
  SITE (4138): n equals a,t,g, or c
  SITE (4139): n equals a,t,g, or c
  SITE (4140): n equals a,t,g, or c
  SITE (4141): n equals a,t,g, or c
  SITE (4142): n equals a,t,g, or c
  SITE (4143): n equals a,t,g, or c
  SITE (4144): n equals a,t,g, or c
  SITE (4145): n equals a,t,g, or c
  SITE (4146): n equals a,t,g, or c
  SITE (4147): n equals a,t,g, or c
  SITE (4148): n equals a,t,g, or c
  SITE (4149): n equals a,t,g, or c
  SITE (4150): n equals a,t,g, or c
  SITE (4151): n equals a,t,g, or c
  SITE (4152): n equals a,t,g, or c
  SITE (4153): n equals a,t,g, or c
  SITE (4154): n equals a,t,g, or c
  SITE (4155): n equals a,t,g, or c
  SITE (4156): n equals a,t,g, or c
  SITE (4157): n equals a,t,g, or c
  SITE (4158): n equals a,t,g, or c
  SITE (4159): n equals a,t,g, or c
  SITE (4160): n equals a,t,g, or c
  SITE (4161): n equals a,t,g, or c
  SITE (4162): n equals a,t,g, or c
  SITE (4163): n equals a,t,g, or c
  SITE (4164): n equals a,t,g, or c
  SITE (4165): n equals a,t,g, or c
  SITE (4166): n equals a,t,g, or c
  SITE (4167): n equals a,t,g, or c
  SITE (4168): n equals a,t,g, or c
  SITE (4169): n equals a,t,g, or c
  SITE (4170): n equals a,t,g, or c
  SITE (4171): n equals a,t,g, or c
  SITE (4172): n equals a,t,g, or c
  SITE (4173): n equals a,t,g, or c
  SITE (4174): n equals a,t,g, or c
  SITE (4175): n equals a,t,g, or c
  SITE (4176): n equals a,t,g, or c
  SITE (4177): n equals a,t,g, or c
  SITE (4178): n equals a,t,g, or c
  SITE (4179): n equals a,t,g, or c
  SITE (4180): n equals a,t,g, or c
  SITE (4181): n equals a,t,g, or c
  SITE (4182): n equals a,t,g, or c
  SITE (4183): n equals a,t,g, or c
  SITE (4184): n equals a,t,g, or c
  SITE (4185): n equals a,t,g, or c
  SITE (4186): n equals a,t,g, or c
  SITE (4187): n equals a,t,g, or c
  SITE (4188): n equals a,t,g, or c
  SITE (4189): n equals a,t,g, or c
  SITE (4190): n equals a,t,g, or c
  SITE (4191): n equals a,t,g, or c
  SITE (4192): n equals a,t,g, or c
  SITE (4193): n equals a,t,g, or c
  SITE (4194): n equals a,t,g, or c
  SITE (4195): n equals a,t,g, or c
  SITE (4196): n equals a,t,g, or c
  SITE (4197): n equals a,t,g, or c
  SITE (4198): n equals a,t,g, or c
  SITE (4199): n equals a,t,g, or c
  SITE (4200): n equals a,t,g, or c
  SITE (4201): n equals a,t,g, or c
  SITE (4202): n equals a,t,g, or c
  SITE (4203): n equals a,t,g, or c
  SITE (4204): n equals a,t,g, or c
  SITE (4205): n equals a,t,g, or c
  SITE (4206): n equals a,t,g, or c
  SITE (4207): n equals a,t,g, or c
  SITE (4208): n equals a,t,g, or c
  SITE (4209): n equals a,t,g, or c
  SITE (4210): n equals a,t,g, or c
  SITE (4211): n equals a,t,g, or c
  SITE (4212): n equals a,t,g, or c
  SITE (4213): n equals a,t,g, or c
  SITE (4214): n equals a,t,g, or c
  SITE (4215): n equals a,t,g, or c
  SITE (4216): n equals a,t,g, or c
  SITE (4217): n equals a,t,g, or c
  SITE (4218): n equals a,t,g, or c
  SITE (4219): n equals a,t,g, or c
  SITE (4220): n equals a,t,g, or c
  SITE (4221): n equals a,t,g, or c
  SITE (4222): n equals a,t,g, or c
  SITE (4223): n equals a,t,g, or c
  SITE (4224): n equals a,t,g, or c
  SITE (4225): n equals a,t,g, or c
  SITE (4226): n equals a,t,g, or c
  SITE (4227): n equals a,t,g, or c
  SITE (4228): n equals a,t,g, or c
  SITE (4229): n equals a,t,g, or c
  SITE (4230): n equals a,t,g, or c
  SITE (4231): n equals a,t,g, or c
  SITE (4232): n equals a,t,g, or c
  SITE (4233): n equals a,t,g, or c
  SITE (4234): n equals a,t,g, or c
  SITE (4235): n equals a,t,g, or c
  SITE (4236): n equals a,t,g, or c
  SITE (4237): n equals a,t,g, or c
  SITE (4238): n equals a,t,g, or c
  SITE (4239): n equals a,t,g, or c
  SITE (4240): n equals a,t,g, or c
  SITE (4241): n equals a,t,g, or c
  SITE (4242): n equals a,t,g, or c
  SITE (4243): n equals a,t,g, or c
  SITE (4244): n equals a,t,g, or c
  SITE (4245): n equals a,t,g, or c
  SITE (4246): n equals a,t,g, or c
  SITE (4247): n equals a,t,g, or c
  SITE (4248): n equals a,t,g, or c
  SITE (4249): n equals a,t,g, or c
  SITE (4250): n equals a,t,g, or c
  SITE (4251): n equals a,t,g, or c
  SITE (4252): n equals a,t,g, or c
  SITE (4253): n equals a,t,g, or c
  SITE (4254): n equals a,t,g, or c
  SITE (4255): n equals a,t,g, or c
  SITE (4256): n equals a,t,g, or c
  SITE (4257): n equals a,t,g, or c
  SITE (4258): n equals a,t,g, or c
  SITE (4259): n equals a,t,g, or c
  SITE (4260): n equals a,t,g, or c
  SITE (4261): n equals a,t,g, or c
  SITE (4262): n equals a,t,g, or c
  SITE (4263): n equals a,t,g, or c
  SITE (4264): n equals a,t,g, or c
  SITE (4265): n equals a,t,g, or c
  SITE (4266): n equals a,t,g, or c
  SITE (4267): n equals a,t,g, or c
  SITE (4268): n equals a,t,g, or c
  SITE (4269): n equals a,t,g, or c
  SITE (4270): n equals a,t,g, or c
  SITE (4271): n equals a,t,g, or c
  SITE (4272): n equals a,t,g, or c
  SITE (4273): n equals a,t,g, or c
  SITE (4274): n equals a,t,g, or c
  SITE (4275): n equals a,t,g, or c
  SITE (4276): n equals a,t,g, or c
  SITE (4277): n equals a,t,g, or c
  SITE (4278): n equals a,t,g, or c
  SITE (4279): n equals a,t,g, or c
  SITE (4280): n equals a,t,g, or c
  SITE (4281): n equals a,t,g, or c
  SITE (4282): n equals a,t,g, or c
  SITE (4283): n equals a,t,g, or c
  SITE (4284): n equals a,t,g, or c
  SITE (4285): n equals a,t,g, or c
  SITE (4286): n equals a,t,g, or c
  SITE (4287): n equals a,t,g, or c
  SITE (4288): n equals a,t,g, or c
  SITE (4289): n equals a,t,g, or c
  SITE (4290): n equals a,t,g, or c
  SITE (4291): n equals a,t,g, or c
  SITE (4292): n equals a,t,g, or c
  SITE (4293): n equals a,t,g, or c
  SITE (4294): n equals a,t,g, or c
  SITE (4295): n equals a,t,g, or c
  SITE (4296): n equals a,t,g, or c
  SITE (4297): n equals a,t,g, or c
  SITE (4298): n equals a,t,g, or c
  SITE (4299): n equals a,t,g, or c
  SITE (4300): n equals a,t,g, or c
  SITE (4301): n equals a,t,g, or c
  SITE (4302): n equals a,t,g, or c
  SITE (4303): n equals a,t,g, or c
  SITE (4304): n equals a,t,g, or c
  SITE (4305): n equals a,t,g, or c
  SITE (4306): n equals a,t,g, or c
  SITE (4307): n equals a,t,g, or c
  SITE (4308): n equals a,t,g, or c
  SITE (4309): n equals a,t,g, or c
  SITE (4310): n equals a,t,g, or c
  SITE (4311): n equals a,t,g, or c
  SITE (4312): n equals a,t,g, or c
  SITE (4313): n equals a,t,g, or c
  SITE (4314): n equals a,t,g, or c
  SITE (4315): n equals a,t,g, or c
  SITE (4316): n equals a,t,g, or c
  SITE (4317): n equals a,t,g, or c
  SITE (4318): n equals a,t,g, or c
  SITE (4319): n equals a,t,g, or c
  SITE (4320): n equals a,t,g, or c
  SITE (4321): n equals a,t,g, or c
  SITE (4322): n equals a,t,g, or c
  SITE (4323): n equals a,t,g, or c
  SITE (4324): n equals a,t,g, or c
  SITE (4325): n equals a,t,g, or c
  SITE (4326): n equals a,t,g, or c
  SITE (4327): n equals a,t,g, or c
  SITE (4328): n equals a,t,g, or c
  SITE (4329): n equals a,t,g, or c
  SITE (4330): n equals a,t,g, or c
  SITE (4331): n equals a,t,g, or c
  SITE (4332): n equals a,t,g, or c
  SITE (4333): n equals a,t,g, or c
  SITE (4334): n equals a,t,g, or c
  SITE (4335): n equals a,t,g, or c
  SITE (4336): n equals a,t,g, or c
  SITE (4337): n equals a,t,g, or c
  SITE (4338): n equals a,t,g, or c
  SITE (4339): n equals a,t,g, or c
  SITE (4340): n equals a,t,g, or c
  SITE (4341): n equals a,t,g, or c
  SITE (4342): n equals a,t,g, or c
  SITE (4343): n equals a,t,g, or c
  SITE (4344): n equals a,t,g, or c
  SITE (4345): n equals a,t,g, or c
  SITE (4346): n equals a,t,g, or c
  SITE (4347): n equals a,t,g, or c
  SITE (4348): n equals a,t,g, or c
  SITE (4349): n equals a,t,g, or c
  SITE (4350): n equals a,t,g, or c
  SITE (4351): n equals a,t,g, or c
  SITE (4352): n equals a,t,g, or c
  SITE (4353): n equals a,t,g, or c
  SITE (4354): n equals a,t,g, or c
  SITE (4355): n equals a,t,g, or c
  SITE (4356): n equals a,t,g, or c
  SITE (4357): n equals a,t,g, or c
  SITE (4358): n equals a,t,g, or c
  SITE (4359): n equals a,t,g, or c
  SITE (4360): n equals a,t,g, or c
  SITE (4361): n equals a,t,g, or c
  SITE (4362): n equals a,t,g, or c
  SITE (4363): n equals a,t,g, or c
  SITE (4364): n equals a,t,g, or c
  SITE (4365): n equals a,t,g, or c
  SITE (4366): n equals a,t,g, or c
  SITE (4367): n equals a,t,g, or c
  SITE (4368): n equals a,t,g, or c
  SITE (4369): n equals a,t,g, or c
  SITE (4370): n equals a,t,g, or c
  SITE (4371): n equals a,t,g, or c
  SITE (4372): n equals a,t,g, or c
  SITE (4373): n equals a,t,g, or c
  SITE (4374): n equals a,t,g, or c
  SITE (4375): n equals a,t,g, or c
  SITE (4376): n equals a,t,g, or c
  SITE (4377): n equals a,t,g, or c
  SITE (4378): n equals a,t,g, or c
  SITE (4379): n equals a,t,g, or c
  SITE (4380): n equals a,t,g, or c
  SITE (4381): n equals a,t,g, or c
  SITE (4382): n equals a,t,g, or c
  SITE (4383): n equals a,t,g, or c
  SITE (4384): n equals a,t,g, or c
  SITE (4385): n equals a,t,g, or c
  SITE (4386): n equals a,t,g, or c
  SITE (4387): n equals a,t,g, or c
  SITE (4388): n equals a,t,g, or c
  SITE (4389): n equals a,t,g, or c
  SITE (4390): n equals a,t,g, or c
  SITE (4391): n equals a,t,g, or c
  SITE (4392): n equals a,t,g, or c
  SITE (4393): n equals a,t,g, or c
  SITE (4394): n equals a,t,g, or c
  SITE (4395): n equals a,t,g, or c
  SITE (4396): n equals a,t,g, or c
  SITE (4397): n equals a,t,g, or c
  SITE (4398): n equals a,t,g, or c
  SITE (4399): n equals a,t,g, or c
  SITE (4400): n equals a,t,g, or c
  SITE (4401): n equals a,t,g, or c
  SITE (4402): n equals a,t,g, or c
  SITE (4403): n equals a,t,g, or c
  SITE (4404): n equals a,t,g, or c
  SITE (4405): n equals a,t,g, or c
  SITE (4406): n equals a,t,g, or c
  SITE (4407): n equals a,t,g, or c
  SITE (4408): n equals a,t,g, or c
  SITE (4409): n equals a,t,g, or c
  SITE (4410): n equals a,t,g, or c
  SITE (4411): n equals a,t,g, or c
  SITE (4412): n equals a,t,g, or c
  SITE (4413): n equals a,t,g, or c
  SITE (4414): n equals a,t,g, or c
  SITE (4415): n equals a,t,g, or c
  SITE (4416): n equals a,t,g, or c
  SITE (4417): n equals a,t,g, or c
  SITE (4418): n equals a,t,g, or c
  SITE (4419): n equals a,t,g, or c
  SITE (4420): n equals a,t,g, or c
  SITE (4421): n equals a,t,g, or c
  SITE (4422): n equals a,t,g, or c
  SITE (4423): n equals a,t,g, or c
  SITE (4424): n equals a,t,g, or c
  SITE (4425): n equals a,t,g, or c
  SITE (4426): n equals a,t,g, or c
  SITE (4427): n equals a,t,g, or c
  SITE (4428): n equals a,t,g, or c
  SITE (4429): n equals a,t,g, or c
  SITE (4430): n equals a,t,g, or c
  SITE (4431): n equals a,t,g, or c
  SITE (4432): n equals a,t,g, or c
  SITE (4433): n equals a,t,g, or c
  SITE (4434): n equals a,t,g, or c
  SITE (4435): n equals a,t,g, or c
  SITE (4436): n equals a,t,g, or c
  SITE (4437): n equals a,t,g, or c
  SITE (4438): n equals a,t,g, or c
  SITE (4439): n equals a,t,g, or c
  SITE (4440): n equals a,t,g, or c
  SITE (4441): n equals a,t,g, or c
  SITE (4442): n equals a,t,g, or c
  SITE (4443): n equals a,t,g, or c
  SITE (4444): n equals a,t,g, or c
  SITE (4445): n equals a,t,g, or c
  SITE (4446): n equals a,t,g, or c
  SITE (4447): n equals a,t,g, or c
  SITE (4448): n equals a,t,g, or c
  SITE (4449): n equals a,t,g, or c
  SITE (4450): n equals a,t,g, or c
  SITE (4451): n equals a,t,g, or c
  SITE (4452): n equals a,t,g, or c
  SITE (4453): n equals a,t,g, or c
  SITE (4454): n equals a,t,g, or c
  SITE (4455): n equals a,t,g, or c
  SITE (4456): n equals a,t,g, or c
  SITE (4457): n equals a,t,g, or c
  SITE (4458): n equals a,t,g, or c
  SITE (4459): n equals a,t,g, or c
  SITE (4460): n equals a,t,g, or c
  SITE (4461): n equals a,t,g, or c
  SITE (4462): n equals a,t,g, or c
  SITE (4463): n equals a,t,g, or c
  SITE (4464): n equals a,t,g, or c
  SITE (4465): n equals a,t,g, or c
  SITE (4466): n equals a,t,g, or c
  SITE (4467): n equals a,t,g, or c
  SITE (4468): n equals a,t,g, or c
  SITE (4469): n equals a,t,g, or c
  SITE (4470): n equals a,t,g, or c
  SITE (4471): n equals a,t,g, or c
  SITE (4472): n equals a,t,g, or c
  SITE (4473): n equals a,t,g, or c
  SITE (4474): n equals a,t,g, or c
  SITE (4475): n equals a,t,g, or c
  SITE (4476): n equals a,t,g, or c
  SITE (4477): n equals a,t,g, or c
  SITE (4478): n equals a,t,g, or c
  SITE (4479): n equals a,t,g, or c
  SITE (4480): n equals a,t,g, or c
  SITE (4481): n equals a,t,g, or c
  SITE (4482): n equals a,t,g, or c
  SITE (4483): n equals a,t,g, or c
  SITE (4484): n equals a,t,g, or c
  SITE (4485): n equals a,t,g, or c
  SITE (4486): n equals a,t,g, or c
  SITE (4487): n equals a,t,g, or c
  SITE (4488): n equals a,t,g, or c
  SITE (4489): n equals a,t,g, or c
  SITE (4490): n equals a,t,g, or c
  SITE (4491): n equals a,t,g, or c
  SITE (4492): n equals a,t,g, or c
  SITE (4493): n equals a,t,g, or c
  SITE (4494): n equals a,t,g, or c
  SITE (4495): n equals a,t,g, or c
  SITE (4496): n equals a,t,g, or c
  SITE (4497): n equals a,t,g, or c
  SITE (4498): n equals a,t,g, or c
  SITE (4499): n equals a,t,g, or c
  SITE (4500): n equals a,t,g, or c
  SITE (4501): n equals a,t,g, or c
  SITE (4502): n equals a,t,g, or c
  SITE (4503): n equals a,t,g, or c
  SITE (4504): n equals a,t,g, or c
  SITE (4505): n equals a,t,g, or c
  SITE (4506): n equals a,t,g, or c
  SITE (4507): n equals a,t,g, or c
  SITE (4508): n equals a,t,g, or c
  SITE (4509): n equals a,t,g, or c
  SITE (4510): n equals a,t,g, or c
  SITE (4511): n equals a,t,g, or c
  SITE (4512): n equals a,t,g, or c
  SITE (4513): n equals a,t,g, or c
  SITE (4514): n equals a,t,g, or c
  SITE (4515): n equals a,t,g, or c
  SITE (4516): n equals a,t,g, or c
  SITE (4517): n equals a,t,g, or c
  SITE (4518): n equals a,t,g, or c
  SITE (4519): n equals a,t,g, or c
  SITE (4520): n equals a,t,g, or c
  SITE (4521): n equals a,t,g, or c
  SITE (4522): n equals a,t,g, or c
  SITE (4523): n equals a,t,g, or c
  SITE (4524): n equals a,t,g, or c
  SITE (4525): n equals a,t,g, or c
  SITE (4526): n equals a,t,g, or c
  SITE (4527): n equals a,t,g, or c
  SITE (4528): n equals a,t,g, or c
  SITE (4529): n equals a,t,g, or c
  SITE (4530): n equals a,t,g, or c
  SITE (4531): n equals a,t,g, or c
  SITE (4532): n equals a,t,g, or c
  SITE (4533): n equals a,t,g, or c
  SITE (4534): n equals a,t,g, or c
  SITE (4535): n equals a,t,g, or c
  SITE (4536): n equals a,t,g, or c
  SITE (4537): n equals a,t,g, or c
  SITE (4538): n equals a,t,g, or c
  SITE (4539): n equals a,t,g, or c
  SITE (4540): n equals a,t,g, or c
  SITE (4541): n equals a,t,g, or c
  SITE (4542): n equals a,t,g, or c
  SITE (4543): n equals a,t,g, or c
  SITE (4544): n equals a,t,g, or c
  SITE (4545): n equals a,t,g, or c
  SITE (4546): n equals a,t,g, or c
  SITE (4547): n equals a,t,g, or c
  SITE (4548): n equals a,t,g, or c
  SITE (4549): n equals a,t,g, or c
  SITE (4550): n equals a,t,g, or c
  SITE (4551): n equals a,t,g, or c
  SITE (4552): n equals a,t,g, or c
  SITE (4553): n equals a,t,g, or c
  SITE (4554): n equals a,t,g, or c
  SITE (4555): n equals a,t,g, or c
  SITE (4556): n equals a,t,g, or c
  SITE (4557): n equals a,t,g, or c
  SITE (4558): n equals a,t,g, or c
  SITE (4559): n equals a,t,g, or c
  SITE (4560): n equals a,t,g, or c
  SITE (4561): n equals a,t,g, or c
  SITE (4562): n equals a,t,g, or c
  SITE (4563): n equals a,t,g, or c
  SITE (4564): n equals a,t,g, or c
  SITE (4565): n equals a,t,g, or c
  SITE (4566): n equals a,t,g, or c
  SITE (4567): n equals a,t,g, or c
  SITE (4568): n equals a,t,g, or c
  SITE (4569): n equals a,t,g, or c
  SITE (4570): n equals a,t,g, or c
  SITE (4571): n equals a,t,g, or c
  SITE (4572): n equals a,t,g, or c
  SITE (4573): n equals a,t,g, or c
  SITE (4574): n equals a,t,g, or c
  SITE (4575): n equals a,t,g, or c
  SITE (4576): n equals a,t,g, or c
  SITE (4577): n equals a,t,g, or c
  SITE (4578): n equals a,t,g, or c
  SITE (4579): n equals a,t,g, or c
  SITE (4580): n equals a,t,g, or c
  SITE (4581): n equals a,t,g, or c
  SITE (4582): n equals a,t,g, or c
  SITE (4583): n equals a,t,g, or c
  SITE (4584): n equals a,t,g, or c
  SITE (4585): n equals a,t,g, or c
  SITE (4586): n equals a,t,g, or c
  SITE (4587): n equals a,t,g, or c
  SITE (4588): n equals a,t,g, or c
  SITE (4589): n equals a,t,g, or c
  SITE (4590): n equals a,t,g, or c
  SITE (4591): n equals a,t,g, or c
  SITE (4592): n equals a,t,g, or c
  SITE (4593): n equals a,t,g, or c
  SITE (4594): n equals a,t,g, or c
  SITE (4595): n equals a,t,g, or c
  SITE (4596): n equals a,t,g, or c
  SITE (4597): n equals a,t,g, or c
  SITE (4598): n equals a,t,g, or c
  SITE (4599): n equals a,t,g, or c
  SITE (4600): n equals a,t,g, or c
  SITE (4601): n equals a,t,g, or c
  SITE (4602): n equals a,t,g, or c
  SITE (4603): n equals a,t,g, or c
  SITE (4604): n equals a,t,g, or c
  SITE (4605): n equals a,t,g, or c
  SITE (4606): n equals a,t,g, or c
  SITE (4607): n equals a,t,g, or c
  SITE (4608): n equals a,t,g, or c
  SITE (4609): n equals a,t,g, or c
  SITE (4610): n equals a,t,g, or c
  SITE (4611): n equals a,t,g, or c
  SITE (4612): n equals a,t,g, or c
  SITE (4613): n equals a,t,g, or c
  SITE (4614): n equals a,t,g, or c
  SITE (4615): n equals a,t,g, or c
  SITE (4616): n equals a,t,g, or c
  SITE (4617): n equals a,t,g, or c
  SITE (4618): n equals a,t,g, or c
  SITE (4619): n equals a,t,g, or c
  SITE (4620): n equals a,t,g, or c
  SITE (4621): n equals a,t,g, or c
  SITE (4622): n equals a,t,g, or c
  SITE (4623): n equals a,t,g, or c
  SITE (4624): n equals a,t,g, or c
  SITE (4625): n equals a,t,g, or c
  SITE (4626): n equals a,t,g, or c
  SITE (4627): n equals a,t,g, or c
  SITE (4628): n equals a,t,g, or c
  SITE (4629): n equals a,t,g, or c
  SITE (4630): n equals a,t,g, or c
  SITE (4631): n equals a,t,g, or c
  SITE (4632): n equals a,t,g, or c
  SITE (4633): n equals a,t,g, or c
  SITE (4634): n equals a,t,g, or c
  SITE (4635): n equals a,t,g, or c
  SITE (4636): n equals a,t,g, or c
  SITE (4637): n equals a,t,g, or c
  SITE (4638): n equals a,t,g, or c
  SITE (4639): n equals a,t,g, or c
  SITE (4640): n equals a,t,g, or c
  SITE (4641): n equals a,t,g, or c
  SITE (4642): n equals a,t,g, or c
  SITE (4643): n equals a,t,g, or c
  SITE (4644): n equals a,t,g, or c
  SITE (4645): n equals a,t,g, or c
  SITE (4646): n equals a,t,g, or c
  SITE (4647): n equals a,t,g, or c
  SITE (4648): n equals a,t,g, or c
  SITE (4649): n equals a,t,g, or c
  SITE (4650): n equals a,t,g, or c
  SITE (4651): n equals a,t,g, or c
  SITE (4652): n equals a,t,g, or c
  SITE (4653): n equals a,t,g, or c
  SITE (4654): n equals a,t,g, or c
  SITE (4655): n equals a,t,g, or c
  SITE (4656): n equals a,t,g, or c
  SITE (4657): n equals a,t,g, or c
  SITE (4658): n equals a,t,g, or c
  SITE (4659): n equals a,t,g, or c
  SITE (4660): n equals a,t,g, or c
  SITE (4661): n equals a,t,g, or c
  SITE (4662): n equals a,t,g, or c
  SITE (4663): n equals a,t,g, or c
  SITE (4664): n equals a,t,g, or c
  SITE (4665): n equals a,t,g, or c
  SITE (4666): n equals a,t,g, or c
  SITE (4667): n equals a,t,g, or c
  SITE (4668): n equals a,t,g, or c
  SITE (4669): n equals a,t,g, or c
  SITE (4670): n equals a,t,g, or c
  SITE (4671): n equals a,t,g, or c
  SITE (4672): n equals a,t,g, or c
  SITE (4673): n equals a,t,g, or c
  SITE (4674): n equals a,t,g, or c
  SITE (4675): n equals a,t,g, or c
  SITE (4676): n equals a,t,g, or c
  SITE (4677): n equals a,t,g, or c
  SITE (4678): n equals a,t,g, or c
  SITE (4679): n equals a,t,g, or c
  SITE (4680): n equals a,t,g, or c
  SITE (4681): n equals a,t,g, or c
  SITE (4682): n equals a,t,g, or c
  SITE (4683): n equals a,t,g, or c
  SITE (4684): n equals a,t,g, or c
  SITE (4685): n equals a,t,g, or c
  SITE (4686): n equals a,t,g, or c
  SITE (4687): n equals a,t,g, or c
  SITE (4688): n equals a,t,g, or c
  SITE (4689): n equals a,t,g, or c
  SITE (4690): n equals a,t,g, or c
  SITE (4691): n equals a,t,g, or c
  SITE (4692): n equals a,t,g, or c
  SITE (4693): n equals a,t,g, or c
  SITE (4694): n equals a,t,g, or c
  SITE (4695): n equals a,t,g, or c
  SITE (4696): n equals a,t,g, or c
  SITE (4697): n equals a,t,g, or c
  SITE (4698): n equals a,t,g, or c
  SITE (4699): n equals a,t,g, or c
  SITE (4700): n equals a,t,g, or c
  SITE (4701): n equals a,t,g, or c
  SITE (4702): n equals a,t,g, or c
  SITE (4703): n equals a,t,g, or c
  SITE (4704): n equals a,t,g, or c
  SITE (4705): n equals a,t,g, or c
  SITE (4706): n equals a,t,g, or c
  SITE (4707): n equals a,t,g, or c
  SITE (4708): n equals a,t,g, or c
  SITE (4709): n equals a,t,g, or c
  SITE (4710): n equals a,t,g, or c
  SITE (4711): n equals a,t,g, or c
  SITE (4712): n equals a,t,g, or c
  SITE (4713): n equals a,t,g, or c
  SITE (4714): n equals a,t,g, or c
  SITE (4715): n equals a,t,g, or c
  SITE (4716): n equals a,t,g, or c
  SITE (4717): n equals a,t,g, or c
  SITE (4718): n equals a,t,g, or c
  SITE (4719): n equals a,t,g, or c
  SITE (4720): n equals a,t,g, or c
  SITE (4721): n equals a,t,g, or c
  SITE (4722): n equals a,t,g, or c
  SITE (4723): n equals a,t,g, or c
  SITE (4724): n equals a,t,g, or c
  SITE (4725): n equals a,t,g, or c
  SITE (4726): n equals a,t,g, or c
  SITE (4727): n equals a,t,g, or c
  SITE (4728): n equals a,t,g, or c
  SITE (4729): n equals a,t,g, or c
  SITE (4730): n equals a,t,g, or c
  SITE (4731): n equals a,t,g, or c
  SITE (4732): n equals a,t,g, or c
  SITE (4733): n equals a,t,g, or c
  SITE (4734): n equals a,t,g, or c
  SITE (4735): n equals a,t,g, or c
  SITE (4736): n equals a,t,g, or c
  SITE (4737): n equals a,t,g, or c
  SITE (4738): n equals a,t,g, or c
  SITE (4739): n equals a,t,g, or c
  SITE (4740): n equals a,t,g, or c
  SITE (4741): n equals a,t,g, or c
  SITE (4742): n equals a,t,g, or c
  SITE (4743): n equals a,t,g, or c
  SITE (4744): n equals a,t,g, or c
  SITE (4745): n equals a,t,g, or c
  SITE (4746): n equals a,t,g, or c
  SITE (4747): n equals a,t,g, or c
  SITE (4748): n equals a,t,g, or c
  SITE (4749): n equals a,t,g, or c
  SITE (4750): n equals a,t,g, or c
  SITE (4751): n equals a,t,g, or c
  SITE (4752): n equals a,t,g, or c
  SITE (4753): n equals a,t,g, or c
  SITE (4754): n equals a,t,g, or c
  SITE (4755): n equals a,t,g, or c
  SITE (4756): n equals a,t,g, or c
  SITE (4757): n equals a,t,g, or c
  SITE (4758): n equals a,t,g, or c
  SITE (4759): n equals a,t,g, or c
  SITE (4760): n equals a,t,g, or c
  SITE (4761): n equals a,t,g, or c
  SITE (4762): n equals a,t,g, or c
  SITE (4763): n equals a,t,g, or c
  SITE (4764): n equals a,t,g, or c
  SITE (4765): n equals a,t,g, or c
  SITE (4766): n equals a,t,g, or c
  SITE (4767): n equals a,t,g, or c
  SITE (4768): n equals a,t,g, or c
  SITE (4769): n equals a,t,g, or c
  SITE (4770): n equals a,t,g, or c
  SITE (4771): n equals a,t,g, or c
  SITE (4772): n equals a,t,g, or c
  SITE (4773): n equals a,t,g, or c
  SITE (4774): n equals a,t,g, or c
  SITE (4775): n equals a,t,g, or c
  SITE (4776): n equals a,t,g, or c
  SITE (4777): n equals a,t,g, or c
  SITE (4778): n equals a,t,g, or c
  SITE (4779): n equals a,t,g, or c
  SITE (4780): n equals a,t,g, or c
  SITE (4781): n equals a,t,g, or c
  SITE (4782): n equals a,t,g, or c
  SITE (4783): n equals a,t,g, or c
  SITE (4784): n equals a,t,g, or c
  SITE (4785): n equals a,t,g, or c
  SITE (4786): n equals a,t,g, or c
  SITE (4787): n equals a,t,g, or c
  SITE (4788): n equals a,t,g, or c
  SITE (4789): n equals a,t,g, or c
  SITE (4790): n equals a,t,g, or c
  SITE (4791): n equals a,t,g, or c
  SITE (4792): n equals a,t,g, or c
  SITE (4793): n equals a,t,g, or c
  SITE (4794): n equals a,t,g, or c
  SITE (4795): n equals a,t,g, or c
  SITE (4796): n equals a,t,g, or c
  SITE (4797): n equals a,t,g, or c
  SITE (4798): n equals a,t,g, or c
  SITE (4799): n equals a,t,g, or c
  SITE (4800): n equals a,t,g, or c
  SITE (4801): n equals a,t,g, or c
  SITE (4802): n equals a,t,g, or c
  SITE (4803): n equals a,t,g, or c
  SITE (4804): n equals a,t,g, or c
  SITE (4805): n equals a,t,g, or c
  SITE (4806): n equals a,t,g, or c
  SITE (4807): n equals a,t,g, or c
  SITE (4808): n equals a,t,g, or c
  SITE (4809): n equals a,t,g, or c
  SITE (4810): n equals a,t,g, or c
  SITE (4811): n equals a,t,g, or c
  SITE (4812): n equals a,t,g, or c
  SITE (4813): n equals a,t,g, or c
  SITE (4814): n equals a,t,g, or c
  SITE (4815): n equals a,t,g, or c
  SITE (4816): n equals a,t,g, or c
  SITE (4817): n equals a,t,g, or c
  SITE (4818): n equals a,t,g, or c
  SITE (4819): n equals a,t,g, or c
  SITE (4820): n equals a,t,g, or c
  SITE (4821): n equals a,t,g, or c
  SITE (4822): n equals a,t,g, or c
  SITE (4823): n equals a,t,g, or c
  SITE (4824): n equals a,t,g, or c
  SITE (4825): n equals a,t,g, or c
  SITE (4826): n equals a,t,g, or c
  SITE (4827): n equals a,t,g, or c
  SITE (4828): n equals a,t,g, or c
  SITE (4829): n equals a,t,g, or c
  SITE (4830): n equals a,t,g, or c
  SITE (4831): n equals a,t,g, or c
  SITE (4832): n equals a,t,g, or c
  SITE (4833): n equals a,t,g, or c
  SITE (4834): n equals a,t,g, or c
  SITE (4835): n equals a,t,g, or c
  SITE (4836): n equals a,t,g, or c
  SITE (4837): n equals a,t,g, or c
  SITE (4838): n equals a,t,g, or c
  SITE (4839): n equals a,t,g, or c
  SITE (4840): n equals a,t,g, or c
  SITE (4841): n equals a,t,g, or c
  SITE (4842): n equals a,t,g, or c
  SITE (4843): n equals a,t,g, or c
  SITE (4844): n equals a,t,g, or c
  SITE (4845): n equals a,t,g, or c
  SITE (4846): n equals a,t,g, or c
  SITE (4847): n equals a,t,g, or c
  SITE (4848): n equals a,t,g, or c
  SITE (4849): n equals a,t,g, or c
  SITE (4850): n equals a,t,g, or c
  SITE (4851): n equals a,t,g, or c
  SITE (4852): n equals a,t,g, or c
  SITE (4853): n equals a,t,g, or c
  SITE (4854): n equals a,t,g, or c
  SITE (4855): n equals a,t,g, or c
  SITE (4856): n equals a,t,g, or c
  SITE (4857): n equals a,t,g, or c
  SITE (4858): n equals a,t,g, or c
  SITE (4859): n equals a,t,g, or c
  SITE (4860): n equals a,t,g, or c
  SITE (4861): n equals a,t,g, or c
  SITE (4862): n equals a,t,g, or c
  SITE (4863): n equals a,t,g, or c
  SITE (4864): n equals a,t,g, or c
  SITE (4865): n equals a,t,g, or c
  SITE (4866): n equals a,t,g, or c
  SITE (4867): n equals a,t,g, or c
  SITE (4868): n equals a,t,g, or c
  SITE (4869): n equals a,t,g, or c
  SITE (4870): n equals a,t,g, or c
  SITE (4871): n equals a,t,g, or c
  SITE (4872): n equals a,t,g, or c
  SITE (4873): n equals a,t,g, or c
  SITE (4874): n equals a,t,g, or c
  SITE (4875): n equals a,t,g, or c
  SITE (4876): n equals a,t,g, or c
  SITE (4877): n equals a,t,g, or c
  SITE (4878): n equals a,t,g, or c
  SITE (4879): n equals a,t,g, or c
  SITE (4880): n equals a,t,g, or c
  SITE (4881): n equals a,t,g, or c
  SITE (4882): n equals a,t,g, or c
  SITE (4883): n equals a,t,g, or c
  SITE (4884): n equals a,t,g, or c
  SITE (4885): n equals a,t,g, or c
  SITE (4886): n equals a,t,g, or c
  SITE (4887): n equals a,t,g, or c
  SITE (4888): n equals a,t,g, or c
  SITE (4889): n equals a,t,g, or c
  SITE (4890): n equals a,t,g, or c
  SITE (4891): n equals a,t,g, or c
  SITE (4892): n equals a,t,g, or c
tattnnnnnnnnnnnnnnnnnnnnnnnnnnnnnnnnnnnnnnnnnnnnnnnnnnnnnnnnnnnnnnnnnnnnnnnnnnnnnnnnnnnnnnnnnnnnnnnnnnnnnnnnnnnnnnnnnnnnnnnnnnnnnnnnnnnnnnnnnnnnnnnnnnnnnnnnnnnnnnnnnnnnnnnnnnnnnnnnnnnnnnnnnnnnnnnnnnnnnnnnnnnnnnnnnnnnnnnnnnnnnnnnnnnnnnnnnnnnnnnnnnnnnnnnnnnnnnnnnnnnnnnnnnnnnnnnnnnnnnnnnnnnnnnnnnnnnnnnnnnntgagatagaatctcactctgttgcccaggctggggtgcagtggtgcgatctcagctccccacaacctctgcctccagggttcaagcaattctcctgcctcagcctcctgagtatctgggattacaggcatgcaccactacgcttggctaatttttgtatttttagtagagacggggtttcaccatgttggccaggctggtcttgaactcctgacctcaggtgattcgcccgccttggcctcccaaagtgctgggattacaggcatgagccaccgtgcctggctgaaagttcattttcaatagcatagtccagaccattttttttctaaatgtgctaccagaatcaaagaaataataacattccattaaaacaaataaaatggcattaaattaaatgttctgcataatttaagagccctgaccaattttagtcttttttttttttttgagacagagtctcactgtgtcgcccaggctggagtgcagtggtacgatcttggctcactgcagcctccacctcctgggttcaagtgattctcctgcctcaacctcccgagcagctgggattacaggcatgtgccaccatacctggctaatttttatatctttagtagagatggggtttcaccatgttggccaggctggtctcaaactcttgacctcaggtgatctgcccgcctcggcctcccaaagtgctggcattacaggcatgagtcactgcgcctggcctagtctattattaacaaataaaaattttaatacataaaaatggatggatattttctagagccttaattaagtaattcactccaaatgtcttttttttttttttttttagctagtaagtggagacactttgaaacatggtgcttaaaaaaaaacacactacctacctggtgggctgtttcatggtgaaataacttattctgtataatttgaatgcaattcagatactatgtagatgttaaaaagctaagttaacataaaatgtacatcatgaaacgtcaccttacttgacggcattaatacattttttccactaaaatacttgtaaccatggccatcagtatgaagaaaaattttaaacacgatgaaaggtggaaacgtttcacctctaaatctgaaataaagataaaaatttagttatttggcatcaggttttgggctcagttgcttttcccccttatacttaagatagttcatatagtttcttgcatacagggtaaaggctatgtcagagcatgtaaagaactggtaatgaaatggatcacataggatgtaagacccacactttggtgtactcacaactattctcatacctgtgtaagactgaatacagaatgggagatgagagctactctcatggcaacttttagccacagagtcatgcctcggtttctttacataacaaatgtaaataagaataacacatttactttgtaattaagttctgagaagttacaagaatttaaaaaatccatatctaagatttcctcatattaactaagtacttcttgaaataaatcagcatagatacattacctgaatctaattttacactgcatagtaggatccttaataagcttagcctctaagggggccactttcttcagtatttcatgtgttacatagaattcctgaaataaaggacagtgctgtaaaaggaaagcagtatcccacccagacacaatttatggactataacagaggcaacgtggtaaagtgaacattatgctggacttggagttctgaaggggtgggtttttgttttggcacctccacttactatctgtgtagccttgagccagttacttaatcattttggcctccaactttggttatctgtcccttttagagatcaaaggcactattatttccctatgacagcacttttcacaatatattataattacttatcaacttgtctgtgcctcctactagactgtaagcttcatgaaggtagggatggtggcttttctctttaccactatattcctagcatctaatacagtgcctggaacacagcagatgcttaagaagtatttgttgaatgaatcactgtaagatgaggatgataatagtaataagttactagcttttaagcaccttttatgtaccatatactactatgttaggtgccttatatacattagctcatttaatccttacatcagcaacactatgagaattttttgtttgttttgagacagagtctcgctccgtcgcccaggctcgagtgcggtggcatgatctcggctcactgcaacctccgcctcccaggttcaagcgattctcctgcctcagcctcccgagtagctgggactacaggcacctgccaccacgcccggctaattttgtattttttcagtagagacggggtttcaccatattggccaggctggcctggaactcctgaccttgtgagccgcacgcctcagcctcccaaagtgctgggattacaggtgtgagccaccactcaggctgcagtgcaatggcatgatctcggctcaccgcaacctccacctcccaggttcaagtgattctcctgctcagcctcctgagtagctggaattacaggcatgcgccaccatgcctggctaattttgtatttttaatagagatggggtttcttcatgttggtcaggctggtctcgagctcccgacttcaggtgatccacccgcctcagcctcccaaagtgctgggattacaggcgtgagccactgcacctggcccattatgagaatattatcacgcctattttacagatgagaaggctgaggctcagggaatttttgtaatttataaaaaggcatacaggtagtgaatggggaagccaggattcatttagttctgtttgactctaaagtcccaactctttcccccaaacaaccccaaccaaccccgttatgcctatgataatcacataaaaatgtacactaaagagcttttaggctgggcactgcggctcacgcctataatcctggcactttgggaggccaaagcgggaggatcacctgaggtcaagagttcgagaccaacctggtcaacatggtgaaaccccatctctactaaaaatacaaaaattagccaggcgtgatggcaggcgcctgtagtccaagctatttgggaggctgaagcaggagaatcgcttgaacccgggaggcagaggttgcagggagccgagatcgtgccactgcactccagcctgggtgacagagcaagactctgctcaaaataaataaataaatagcttttaaaaggacaaagcattattaatttaaggtattaaagtattactataacagataaaaaagaatttccttctgttacaaaagtctaaaaatactatgaaaccagcattataaaattaaatacaagttccatattcaaagacaatggataatagacctgaaatgccaggagtttacctgggtgggttttctctgaagtattcagacggagtcttgctctgtcgcccaggctggagtgcagtggctcaaactcggctcactataacctccacctccccggttcaaggtagctgggattacaggcgcacaccaccatgcccggctaatttttttgtatttttaggagagacggggtattcaccatggtgaccggactggtctcgaactnnnnnnnnnnnnnnnnnnnnnnnnnnnnnnnnnnnnnnnnnnnnnnnnnnnnnnnnnnnnnnnnnnnnnnnnnnnnnnnnnnnnnnnnnnnnnnnnnnnnnnnnnnnnnnnnnnnnnnnnnnnnnnnnnnnnnnnnnnnnnnnnnnnnnnnnnnnnnnnnnnnnnnnnnnnnnnnnnnnnnnnnnnnnnnnnnnnnnnnnnnnnnnnnnnnnnnnnnnnnnnnnnnnnnnnnnnnnnnnnnnnnnnnnnnnnnnnnnnnnnnnnnnnnnnnnnnnnnnnnnnnnnnnnnnnnnnnnnnnnnnnnnnnnnnnnnnnnnnnnnnnnnnnnnnnnnnnnnnnnnnnnnnnnnnnnnnnnnnnnnnnnnnnnnnnnnnnnnnnnnnnnnnnnnnnnnnnnnnnnnnnnnnnnnnnnnnnnnnnnnnnnnnnnnnnnnnnnnnnnnnnnnnnnnnnnnnnnnnnnnnnnnnnnnnnnnnnnnnnnnnnnnnnnnnnnnnnnnnnnnnnnnnnnnnnnnnnnnnnnnnnnnnnnnnnnnnnnnnnnnnnnnnnnnnnnnnnnnnnnnnnnnnnnnnnnnnnnnnnnnnnnnnnnnnnnnnnnnnnnnnnnnnnnnnnnnnnnnnnnnnnnnnnnnnnnnnnnnnnnnnnnnnnnnnnnnnnnnnnnnnnnnnnnnnnnnnnnnnnnnnnnnnnnnnnnnnnnnnnnnnnnnnnnnnnnnnnnnnnnnnnnnnnnnnnnnnnnnnnnnnnnnnnnnnnnnnnnnnnnnnnnnnnnnnnnnnnnnnnnnnnnnnnnnnnnnnnnnnnnnnnnnnnnnnnnnnnnnnnnnnnnnnnnnnnnnnnnnnnnnnnnnnnnnnnnnnnnnnnnnnnnnnnnnnnnnnnnnnnnnnnnnnnnnnnnnnnnnnnnnnnnnnnnnnnnnnnnnnnnnnnnnnnnnnnnnnnnnnnnnnnnnnnnnnaaaaaaaaaattagctgggcatggcggcacgcacctgtagtcccagctactagggaggcggaggcaggataatcccttgaacctgggtggtggaggttgcagtgagccaagatcatgcccctgcactccagcctgggcaacagagtgagacttcatctcaaaaaagaaaagaaaaaaaagagtatcactaataata

SEQ ID NO: 5624 - DNA, 214 bp, Homo sapiens
ttctgtttgttagttttccttctaacagtcaggcccctcttctgcaggtctgctggagtttgctgggggtccactccagaccctgtttgcctgggtatcaccagcagaggctgcagaacagcaaagattgctgcctgctccttcctctggaagcttcgtcccagaggggcacccagcagatgccagccagagctctcctgtatgaggtgtctgt

SEQ ID NO: 5625 - DNA, 102 bp, Homo sapiens
ttttttttttttttttttttgagacggagtctcgctctgtcgcccaggctggagtgcagtggcacgatctcggctcactgcaagctctgcctcccgggttca

SEQ ID NO: 5626 - DNA, 228 bp, Homo sapiens
tcgaggtcaggagattgagaccatcctggctaacatggtgaaaccccatctctactaaaaatacaaaaaaaattagccgggcgtggtggcgggagcctgtagtcccagctactcgggaggttgaggcaggagaatggcgtgaacctgggaggcggagcttgtagtgagccaagatcatgccactgcactccagcctgggcgacagagcgagactccgtctcaaaaaaa

SEQ ID NO: 5627 - DNA, 13327 bp, Homo sapiens
tgttcttttttttttttttttttttttttttttttttttttttctttttttttttttttcttttttattggagggagggagcaagcaagactgagagatgaaacaaagatacacagagaccctcccagagacaatgccagtcctaggctctgcacagtccaccccccgcccaccatctccccaggtctgggccctgtgccaggcacttggaggaaggctggatttggccaagcagggacaggcaggagggtggaccacattcctgaacagtctgttccaaatacagccccaacctcactgctcccaccaccgcagccctggcccatccaggccagagtctgccccctctagcccatgccctaggatgggggttgggggggatagatgagagaatgagggataagtttgtctgtcgtcatggcctggcctcagacagggacttgggggactggataccagggggttcagcagcatgggcacagaacatttgggggcatctgggagccagtgccttggggatagagatggtagattcagggcaggacataatatggaggtacaaggggatcaacatgcagaaaggcaccctgaagaactaaggagaggcacagaagtgccagactgatggacacccagaagccagggaaattgaaggcagatctggggaacaagcatagtacacagggtcctaagagtaatggaagtgacaagggctcaggtgtgagctcctaggaatcacaggcacagagcacaggaatgccaggggtgtctttagaagtgtatttgagccaggcgcagtggcctgtagtctcaacacctcgggaggccgaggcaggcggatcacctgaggtcagtagcttgagatctgcctggccaacacggtgaaactccgtctctactaaaaatacaaaaattagccaggcctagtggtgcatgcctgtaatcccagctactcaggaggctgaaacaggagaatcttgaacctgggaggtggaggttgcagtgagccgagatcccactgctgcactccagcctgggcaacaagagtgaaactctaagaagggaaaaaaaaaaaacagaagtggtgtatttgagagtcggtgtgtatttaggaatcagaggtacagggtacagcgttcaggggacccagaggtggcccggagattgaggaatacacacttacaggccaagtaaattggactcaaaggtgctaggggctcaggagggtgcacctgttgtccaggtgtgttgccatgaaaatgctggtgcacgaaagttgctaagtaagacaggctgaggcagacacacaaaaaaagccagggggagccagggcacagctccactagggctgggggcggggtggagacgtcgggttggggaatccacggaatgagcagcccggagacgcccactcctcccacatcgggtctccgccccgctccacccctaagaccccttggaaatcaaatagaggtgaaggggtgcaggcgtggagaattgcaggcatgtcgcgggtatcgctgcgctgctgttgtggcttctggtgctggcgccggcgtggtgggggtagggtgggtgccgcgctcagatgcgggggtccctacctccccggcccaggccgctcccattgctggggaacttgcagctgcagtccggaggcctggaccgcgcactccattcccgacaggaatgggggaacggaattctggattcgtgaaggtggggctggggactagaactcctcctgaatgaagacagctgagggtttgtactctatgatcctgaggaaggacaggaaggatgagtgctccggactgctgagtactaggaaaggagaatagggagtggagagcctggggccgggacactgggtcgtaacgaaggagcccagagcaggaaatcaggttgtgggaagaggggagcagggggtctgttctggttcagggtgggcaggctgagtactgagggcccaggagacgactctgagggtgcaggaggctgggaagctggacttccaggtcctaagggaagaaggaagtgggggcctggactcctggatctcagggaggaaggagctggggatttgaattcctgggcctgaggaatgagggtctgagacgaggactcctgggtctgaaggaagagggagctgggggcaatggctccgatgaggaaccctatgggcacccgctgagcaccggctacccgtagctctccggccgctggggccgggtgttcacagtgcggctgggcccgcgccctgcggtggggctgtgcggctacgcagcgctgcgggacgcgttagtgctacaggcggatgcggtctctggccgcgggtccatggcagtcttcgaacgcttcacacgcggaaacagtgaggccccggcgctggacttgccggcccggacgctccaggctgggcgggtaaatggtagaggcgggcaaatgggggcggggcctaatagagactccagctaatgaggtgcaaacggccgagagagggcggggcggcgctaaagcgtaaggttagaatggaggttcatcctgcagccaacaggagaaaagagcctaagagtcaaagcccgagagccagcctaggtcagggatggagcccagcaaaggcggggccaatgtgtggatagggcacttggaggtctggtaaagaagcaaagggaacgaagccggccgcaggagtcggaggcccctaaagggatgtagccagtgacccggcgcttcctggatagggcgtggccggctccccggcccgcctcctttcccgtccccaccacaggaatcttgttttctaaccggccgtgctggtggacactgcgcaattttgcacttggagcgcttaagaagttcgggttgggtacgcggaccgtcgaggcgcgcgtcctggaggaggcggcttgtctgctagacgaatttcaagccaccattgcttcggcctggccgggagagcggaagggcctggtgtgggagagtcccttgcactgccaagacggggccactggaaggtatttgggtggaagaaagccagtaagcccatggggctggctgggggcaggaccacgcgttatgaccaccgtcctgttcctacccccaggagccccgtttgaccccgtgcggctactggataatgctgtatccaatgttatctgttcttgtcttcgggaaccgctatcgctatggggacccggagttcctgaggctcctgaacctcttcagtgacaacttctgcatcattagttccagatggggcgaggtgagagggccggccacaatctttccttggtgcgtccagccttatgccaaatcccgagtacacagacctacctacaatggatcattagaatgggacagattcctggaagagttctagaacatccagtatcaaagtcctagtccaatctccctgtagggaaactaaggcctagtggccttgtgcagggcccatgttgagacagaccctgtctctccagatgtacatttgcctgtccctcatggactggctcccgggcccgcaccaccgaatcttccgaaacttttcggagctgcgggtcatctctgagcaaattcaacgacactggcagatgcggcagccagcggagccccgcgatttcattgattgcttgaccagatgggtaaggcatgggtcccagctctctaaactctatccatgccgcccaccaacaggtgcctggcacgcggcagcacatctcctctgcccacagtaacagcaggacccggagagccatttccaggagtagacgtcggtaatgacgacgcattttttttttggcgtcaccgaaaccacgagcaccaccctgtgctatgggctcctcattctgcttaagtacctagaggtggcaggtgtgcaacccggagagacccagaatgggaggctgcagtctggggatggctggagggtcctggaagtgcgcagctcacagcctcccccggcctgagccaaggtgcaggagctggaccctgtggtagggtggaggcccgccccaagcctggactatcgcgtgtgcctgccctacgccaacgcagtgctgctcgagatccagtgcttcatcagcgtggtgcccctgggctgccgcgcaccctcaccctcgacacccacctgcacagccactgtctgcccaaaggtacccactgagtctggggatcccgtgcgggacccgggtgcatgagatcagccagaatcagcaggtgtgcgctgtgcagaccaaaacacaatcagttacccctggagcaggaaggcagctctgccttcccttaggctttttgttgttgttgtttgagacggagtctggctctgtcattcaggctagaatgcagtggcatgatcttggctcactgcaacctccacttcctgggttcaagcgattgtcctgcctcagcctcctgagtacctggtattacaggcacccaccaccacgcctggctaatttttgtatttttagtagagacaggtttcgccatgttggccaggctggtctcgaacttctgacctcaagtgatctgtcctcagcctcccagagtgctgggattacaggcgtgagctacttgcccggcctattcccttgggcttttaaaaagcgtcttggatggaggtggtgcaggtgctcaccaagcccgcaggtaacccaagttgcatgtatccccagggcacttttgtgattcccctgcttgtgactgcacaccgggaccccactcaattcaaagacccagactgcttcaaccctaccaacttcctggacaagggcaagttccagggcaatgatgctttcatgccctttgcctcaggtgcaggcagaggaggaaggggaccagcctggactggctctggggtacctggtgctcactgtgcacctgtgtacccggcaaagcagatgtgcctgggcacaggcctggcccactcgggtatcttcctattccttacggccaccttacagaggttctgcctgctccctgtggtacgccctggcaccatcaacctcacctgcagtgcactggcctgggcagtgtccccccagacttccagctccagccagtggcctgctgaggtcaggctccactatggtgggctcactggccctcaaacctccataccctcctcggtcaataaaggccctaaattgcagatggagtcagatgtgtgcagctctgaggtaaacttttatttcttggctgacaggacttccacacccatgctcctcctggcaccttttactctgcccaagcagtggcagcccagtccaaaaggtgcctgccatggccaaaggggttggggagtcacttcacattccaggctggaggagtgagaggacttgggggtactcctcccaccccattgccagcaagaggccatgactcacctcaaccccaagtcctgcatcctggtgggaagtgacaatgcctcctcccagctctccatacctaatggggtcatgaccagacagggtaggacccaggcccccagcttcagttggtaacggtggcctccacggctgccccctgtccaggtgacaaccccagcccccatgatggggcagcaaaggtctcttctcctccttggtcctcagcaacagacagagccctccacaccaggcaggacagaggcaaagtcagaagcagcagcggtggcagggaaggagcagccagcacaggcccagggctctcctgaagtcatttaagctgtctgccatgcggctctgggactggccactaggtgggcgtaggcggctgtgatacaggtacttggacacctttctgtcctgatgctgggggtgagaggggacaggagacagtgagtcatcagaaggacaaagaagccagggaaacctggggagatggggagaggaccaggaagaaatggggctcctgttggggtaccaggagagtgggctaaggaaggtgggcagagatgaagaaaaatgagtggtgggatttaacaagaggctgatgagggggatggggtggcatcaggcccaagagggcccacagaataggaaggactgaagggagggaagcaggtacctagctgatacttgtctttggctgctgcccgctccttggcatcaaaataccagacagtgatggcgtacctggagaccagggtggttggacattagttttctgcaattccagctaccatatccacacacactaggcggccatccttttgagccacccggttctgctcccacctaggccccctctcaatacttcgtcgctccctagtcactctgaggctctgacaggacattgtcacagggggagcacctgggtgcgtctccagaagtacaggtcatacctggtggcataggctggcttcacctcgtgggggttccgccggtcagaccagaaaatgagcaaccggtcaaagagtggctcgatgttggctaccacgggccggccctcagggaagatctgcagcaggccgccatgcacctgggggcaggccaaaggatgaggctagctggtacggccaggagccgctgcctcccacggtgccccgggagcccactaggaggcgcagcgtctgcctgcatcactccctcccacccctcgggctctcaaagtgaatgacaacccagagactgcatcaccatggagatgggcaggaagctactaaagacaggaaaagggggaaagtgttcattacaaggccgggtggggctgggcagacagcaccattcccggaaagaggggagttcccaccacacagtccgctagagaggaggaggtgccatttcccaggaagagccggcagatcgcactgcccgctgtgtgttgagaagagaaacaggagaatgccagaatctgggctgagagtggaaaatggagtggacgcacgccacccccgccccagccctagccccagcgccaccctcaccctcaccctcacccctaccttaacgtcccagttctgattcaggtaatagatacaggtgatgcagcgcccatcgccgtggggattgtcaacgtgccttacgtacccgagcccgttgcctgggtaacacgccaccatggcctggcagggatggagggaggtaggtttactggggctaggcaggcacatcttagagaagcagccatgaattacctattttcccacccctccttgccccatcttccccatgactccttgggtcaagggttccaagctcctgccccaaaagactttctttttcagccaaaatcccatccccaagtctatcagaaacctcagctcctgggcctcaagagcccactccctcccaacacacatacctggggcctggcacccagctagggctcaattagtaacagagtttgatttgtttcaagataccccaaaccccacctcagccatttcagtagaataataccaatttaaacattttcaggtgtgcaaggaggtggcctcacagccctagaccaggaattcttacccttggctgtggagtggagccccctggggagctctgaggttctgaagtacctggcctaaggaagggcctgaaattggtaaagcttcccaggtaattctaccatgcagcaatgttaagaactgctgccctggactacaaagaatccccactaaattatctgtcccatagacctccgaacaggagccaaaagctacagtctgaatagaaagacctaattccaactccaaggataatttgctgggtaaccctagccagttccaacacctgaatgggcctcaactgcctgatgtgtacagcaggggtaataaacactgctgtttacagcggtagcaattaatctctctgagaacataacttgggaggttctggagccccaactcctggagatctaacaggactcattgcagggcttggtttctctgtctacagggttctttcctctgcctgacagttgccactcccctgacccagccctacaatgctgtggccagggccccgggatgtttgtcatcagggagctggcagaaaggtggctgagaggtaaaggaaatggcccagccacttctgcagacacaattccctggttcaagtctcagtgctgccacatgagctgtggcatcaggcaggtgacttcctggtctcaggttcctcatccatggatccaatggagctcacagctatttcacaggttgttgtggaacaagtgaacaagataacaagtgtctgggaagacagccagcacagtgcctgccacatggagaactggagcacaggctgaaatgccatttaaaaattttaaaaggtccctgtcccaccctctgcccaaagtcactgcagtggcaagatgaggtagcacacaaaaaggggaggactggcacaaggacccttcaacttctccccagcccggaccatctgtcttgacctctctgccctgacctctctgccctggtacaactctgctggcgtccattccccacgaatgctcagctacacctatgggcccggcccagcaagacagtcccaagataaacattcacgatcaaacatcagtggccactgccacaacaggatgcttgccaagcacgcacgccacagcagactgggactgcttcaattcctcaccctccgcagacgcctcccaacacattatcccagggctcaccctctgtggtggatgttaagctgctctgcattaaccatgtgcacctcatccaccagaccttgccctggaaagagagggctgccaccatctactgccacctagcagtgggaagctgacaaccttctctctggcagcaccagagtacaattagtgagaaggccccccagggaaaaccctaatggctacacttcaaggttcaggagggggcaccttctttgcactgctcactccctatggaagggtcggcactctgagcaaccacctcactgggagaagaattgggccatggtccaggaggcttagaaacagtgagttactgactagagatgggcaagacctccccaattaggaatccaatcagagattacactgatgatgcacgtggatgggtggcagggaaggggtccagtgctgcaccctcttcccacaattcatccccacacagcagccagagcccctcctctccaggtcttcactccatcctgagaaaatacaagattcccaaccacagcctcaaaggcccccaacctcatgtgcctctcccatcactctgctccatgcctcaacaggctgagctcatcgccaccacaaggcctcagcactggcctgggacactcttccttctgaccctctttgttattcaggattcagagaccaagggtcaccttgagtactccggctgattgtccgttccactcctagcaacatggcatcagcacaggcacctgtttacctagtactgccctggaaggcagccacagggaagcccctggggccaggttggtctccccagtgcccagtgcagtacctgcagactggagtgcactgctctgggcctcctctgcaccccagccctgctatgtttcctcctgccctgtacattctcacacagcgcctcccaccaagcacatgggactcacacagaaacaggaacctgctctttagggccccacccttcccccacatatacacaccttgggggtgaaagcatcctctggccccaaggaaagtatctacttcctgccctcacaggggaaggcctcaggaaacttgctctccacccctcccacctaggggagggacaggtgggaccagggccaggagaccaaagacttaaaggctattggtgacaatctgcctgccaagagccccacccccactacacacacaccccagtcagaagcctgtgactgtcccacctccaagctgctcttcaaggagcaaaccaagcaagctggactctccctggggtcccctctggtagcccttgctgccagtgggagtcaactctctcccacctacaggtcaacggagcacctgtccccaaccagggagttgggggaaggaaggatgacacaggagctccactcagaacgactaagaagcacgtttctactggctctagccacactggtgatccatgtccccacggcaactgctgcagcccacctgagcaccccacagccttactctggagtacaggagagagtccagatggggcccatctaaaagcgggaaagcctggagttgctgtctcactggggaggggagggctcctcccctatgttctcagtccagcctggcctgtccttacttccctaggacaatcaaggtcacctagggctaaaaaagtccaaacacgccccttccccaatcctcgctggggccctgtccccaaccacatagaaagtgggcaccagaggcaccaaaacacaagagatcttctcctactctcccctccccaaactgccagactcactggggatgtaacctggttttcgtattccgtggatcagcaaattgaggctcagagcagtgtcccatctgggccactcagcccttctggtctccccctgacgaggacgacagccaacctggggtgaagatgctgagccagggaggccactgatcccgcccgcacaggagccaagcccagggaggggccggctctggctcagctatcaagtaacgggagggagagggaagtagaacaagttccagctggggtggggaggaaacaggccttggccccgggggagcccctggtccctgagccagctccagcctgagaggaaagccacacagaagcagaacccaagatgggatctgcaggaggaggcagaggacatcaggagctcagcctcacgcctgcagggcacaacactgcccgtgccatcagccagccaggcatcactgtgttgagcagtgggcactccccacagggccttgtccaaaggacaccaagccttggactcaaggccaggcccccacaccacccatgaagacaatgatcctgtcagcagcccggaaaggccctatggaccactgtcctgtgctgggctcctgaccccaggttcctgaacaggcagctggaggccatgaggccttgacaactgcccggaaactccaagcaaatgagcatttgtcttaagagaggatctgtggcctctgacagattctcaaaaagacccaggctccaaaataccattaagaactattgttctaaagcaaaaagaaaaagggactaagaacaaacacataaaggcagaggaagagacagacatgggtagggaggaagtgacacacaggacagggggaatggagggcagggactgggacagtgaagggtgggagacatggggatgagctccacctgggccaacaggcagccacccagtaccacccccaggagactgtcctcgatgcagatgccacagtggggacccagggcacaatgcagtccagggccaagcactcggcccagcgggcagcacccctttccttccctcagcccagggctcactcatcacagccaccctcccccttctgcttctcctgccttggagacaggatggatggactagaaacatgggccagcaaacagggatggacgacaggagcacagggaaggatgtggacagggacagacagcaacagagaacggccaggtgaactgtgtgcctatctacatccccgtgcttggtctggggccacagactgacaccaggaggccatgaaccccaccaaggtccacgctgtgaatgtcagcagctctcatgagtttaagagggttcctggcaaagtcaagaaccactgtggcgatgcttgaaggcagcatgctcgttaagagtcatcaccactccctaatctcaagtacccagggacacaaacacgcagaaggccgcagggtcctctgcctaggaaaaccagagacctctgttcacttgtttatctgctgaccttccctccactattgtcctgtgaccctgccaaatccccctctgcgagaaacacccaagaatgatcaataaaaaaagaaaagaaaaaaaaaaaaaaaaaaaaaagaaccactgtggctccaggacaaactcctagcttatcaggtgcacacattaaggcccgtagggaggataaagacccccccaagtccccacaagtaagcatacccactccactgaactgcctaaaccttctgtgacctcccagaagcctgtctccaaacccactgtgctcagagcactgaatgctgcaaaccagggtgctgcaaagcccctccaaagaggcccccacctagccttaccttggtgcgcccgttgatgacatagctgcccagccgccctgcgcagtggcggatgacggcgtccacatgggccatgagggcaccaatgcttcgacagcctggttcatggccttccacccaggcaatctggtccccacggatgctgcgcggcgggatcgccctctggctcactagctgcccgtctcgcaggcgcccaccccgtttgagggcctccacctcggccagcacgcgaccgcccagtgctgcccccaggaagctgtccttgacgcagatgccgtagtaccgcatgcagggcacgatatagtccagggccaggcgctcgggcgcagagggcagcgcctcctccatcagcccagcactggcctcaccactgccactgctgcagctgcagctcatgccaccctcccgctctgcctcctggttctcttgcctggcccagggccgtttgctgggtgaaggggcatccccaccatcctcggcccatttccgtttgggggcctcaggccgtgcgccctgggctgccaatcgctggcaccccttggtgaccagcgctgcagcgccttcactctgcagcggccgcagctcaccaccatcctgcccgccaaaaccgtcccgaagagggctggcagtggtagaggtggctgtggctctgggggtcccactccctgccgaggcctcactaggcactcctggacagtggtaggaggggagcaggggacagggcaggtaactctccactcccatcctggcccggccaggctcaggctccaagggctctgacgaagaccctggtaactgagggagagcctgacttaggggctgcggctggcacgggctgtccatggcagcagtgtcttcatcccccgggcatggagggcaccgcccgggcccatggtgccaccctcctccgcctcctcctccgcctccacttgatgcagctgggggccaccgggcctggcgtggggcagggtgaggcagggcagacagcaagagctcttctcgtgccctgggggttgcttgctggtccccaagtcctctgcggtccctaagggcttgggaagggacccttcagggtggctagagaaaggaaaaaaaaaaagggatgtgagagaaactagagacaggcaggcaggggaaagc

SEQ ID NO: 5628 - DNA, 1186 bp, Homo sapiens; identical to SEQ ID NO: 5461

SEQ ID NO: 5629 - DNA, 1182 bp, Homo sapiens; identical to SEQ ID NO: 5462

SEQ ID NO: 5630 - DNA, 8165 bp, Homo sapiens; identical to SEQ ID NO: 5463

SEQ ID NO: 5631 - DNA, 8159 bp, Homo sapiens; identical to SEQ ID NO: 5464
  SITE (835): n equals a,t,g, or c

SEQ ID NO: 5632 - DNA, 1001 bp, Homo sapiens; identical to SEQ ID NO: 5465

SEQ ID NO: 5633 - DNA, 832 bp, Homo sapiens; identical to SEQ ID NO: 5466

SEQ ID NO: 5634 - DNA, 409 bp, Homo sapiens
gggcgcggcgctccggggtcggcggtgggcggcgggccgcgagccggcgatcgaagcgggcagctcgcgcctgagtcatggacttcccctggcccctcctctaccactcccactccctcgccggacccccccgccggggctagcgtctgccgcggctccgagggggtggggctgctgggaatggctgtgcccccttcggcccctcagccgcgcgcgtcctttcacctgaggaggcacacgccttgcccgcagtgctcatggggcatggaggagaaggcggcggccagcgccagctgccgggagccgccgggccccccgagggccgccgccgtcgcgtacttcggcatttccgtggacccggacgagatccttcccggggccctgcgcgtcatccaggagctgcggccgc

SEQ ID NO: 5635 - DNA, 1185 bp, Homo sapiens
gggctctaggccgtggaatctggggccttaaagccccttcgtctccccagcacccactctctgggggcaggtgggcccggtgacaggtaaaggccaccaggggagaggtcctgggctgagcttgggactgcagaggggggatgagggtgggtaaatcggtgtgtgtcgcgggtcgggaaaggctgccgggggtaggggaaggtggctcagaggcggcgggccgacggtcgaggggcttcggagggcctgcttggactgcaacctgggcctcgtgatcagcgacccagggtgtggctggtggcgggcagcagggctcaccaggaagtgtccccagggactcgggtggtggggggatgggagccagggatctgcagcttttccgcagggatcctgggcctgaagctgcctgacccaaggtgggcgggctgggcgggggccctcgtcttacccagcagtgtttgggtgcggttgggagtctctaatactgccgggtaatgatggaggcccctgtccctgtgtcagcaacatccatcgcctcaggtccccagcccttagctggctgcagccccctccccacttcccacgcaccccggaagcccctcgtcttgagctgagagcgttgcacaaggggtggttcttgttggctggctgccactaagggacacaatgggccccagcccctcctcccacccagtgcgatttgtcacctggtggatccagaacccacagtcgaccttgagcttggggttggctcgccccctctcaagagacctcacctggcctgtggccagggtcccctgtagcaactggtgagcgcgcaccgtagttctctgtcggccggccctgggtccatcttccagtacagtgttggatggtctaattgtgaagctcctaacactgtctggtaaagatggctcccgggtgggttctctcggcagtaaccttcagggagccctgaagaccatggaggactactgaccaacaacctctgaccttcacccctctggatgggggacgaatcactaggcaaaggggaacaatgggaaggagacaaaatggctgcctttacagctgcagcaagatgtggaaacactggttccctaggcacctccattgtcttcccgccttgggagcatgaaataaataaagtgtgaaggggaacatgaggaagactgatccaagtca

SEQ ID NO: 5636 - DNA, 1204 bp, Homo sapiens
gaagagcggaggccagggcgggctctaggccgtggaatctggggccttaaagccccttcgtctccccagcacccactctctgggggcaggtgggcccggtgacaggtaaaggccaccaggggagaggtcctgggctgagcttgggactgcagaggggggatgagggtgggtaaatcggtgtgtgtcgcgggtcgggaaaggctgccgggggtaggggaaggtggctcagaggcggcgggccgacggtcgaggggcttcggagggcctgcttggactgcaacctgggcctcgtgatcagcgacccagggtgtggctggtggcgggcagcagggctcaccaggaagtgtccccagggactcgggtggtggggggatgggagccagggatctgcagcttttccgcagggatcctgggcctgaagctgcctgacccaaggtgggcgggctgggcgggggccctcgtcttacccagcagtgtttgggtgcggttgggagtctctaatactgccgggtaatgatggaggcccctgtccctgtgtcagcaacatccatcgcctcaggtccccagcccttagctggctgcagccccctccccacttcccacgcaccccggaagcccctcgtcttgagctgagagcgttgcacaaggggtggttcttgttggctggctgccactaagggacacaatgggccccagcccctcctcccacccagtgcgatttgtcacctggtggatccagaacccacagtcgaccttgagcttggggttggctcgccccctctcaagagacctcacctggcctgtggccagggtcccctgtagcaactggtgagcgcgcaccgtagttctctgtcggccggccctgggtccatcttccagtacagtgttggatggtctaattgtgaagctcctaacactgtctggtaaagatggctcccgggtgggttctctcggcagtaaccttcagggagccctgaagaccatggaggactactgaccaacaacctctgaccttcacccctctggatgggggacgaatcactaggcaaaggggaacaatgggaaggagacaaaatggctgcctttacagctgcagcaagatgtggaaacactggttccctaggcacctccattgtcttcccgccttgggagcatgaaataaataaagtgtgaaggggaacatgaggaagactgatccaagtca

SEQ ID NO: 5637 - DNA, 14738 bp, Homo sapiens
tggcaggcaggatcgaggaggaagtggctgattactgagcggttcttcctcacctggcttgggccactgtgcacagctgtgccgctggctcagccccgccccctgcggccctctgccgtggcttccccctccctacagagagatgctgtcccgtgggtaagtcccgggcaccatcggggtcccagtctcctgttagttttggagggagggagggctttgttgatgctcactccgacgtgtgtgaacgtgagtgcgatctgccgctgccctgcgcctgtttccggtccctatgaacttccccttcccgcaaggtgtgaggacccccggctcactcatgctcctctgccccctctttaacattttcccctggacaagtgtgtatctgttctctccattgcatttctacttccagcctctgggctcctgcttctgcctcctgcttaggacctgtccccctgggtagctcacaacacctcaaacatagcagtcagaggccacccgcgaaggccctcccacgtccagccaacttctccgcacttcccaacatcagactttggtcccatcttctttgtttcctttcacttccctttcccctgcatcattcattcaacaggtacgtgttgagcatctattatgcaccaggtgctgtttaagatgctggtaatactggagtgaacaagacagacatggtctctgctctcacggagcttacattccagtgggaggttacagaccgaacaaataacccaataaattggatcattgcagattctcagaagtattacgcagaaaatagacagccttggccgggtgtagtggttcacacctgtgatcccagcactgtgggaggctgaggcgagaggattgcttgagcccaggagtttgagaccagcctggccaatatagtgagaccctgtctctacaaaaaataagaaattagctgggtgtggtggcacacgtcctgtggttccagctatggagaggctaaggtgagaggcttgcttgagcctgggaggtcaaggctgcagtcagcgatgattgcaccactgcacaccagcctgggcgacagagtgagaccttgtctcaaaaaaaaaaaaaaaaaaagaaaatgaaccagcttcatatgctagcaagtgactgggtgtgcaggtgacattactagctggagggatcagggaggccttcccgaggaggtgacatttgagctgagacccggatgaggaggaagaggagctggccatgtgacgtagtgatcaagagtcaagcatctctgggcagaggagatggtgagcacaaagccctaatgtgggaacaaacaaaaaaaggacagtgtgcccgtggcagaggaccctagtggagcggaggcagggccacagcaggttagaccatgttggagctaggatgttgaaagtgaaaacctgacgagatgaggtggcgcacgtctgtgatcccagcactttgggaggccgaagggggaagattgcttgagctcaggagtttaaaaccagcctgggcaacatagagagaccccatctctattaaaaaaaaatactgggtatgatggcccaagcatgtggtagtcctagcagtttgggaggctgaggtgggaggatcacttgagcccaagagttcaagaccaccctgggcaacatagggagagacctcatctctactacgactacgactactactactactaataaatagctggatgtagtggcatgcacctgtggtctcagttacttggaaggctgaggcaggaggatcacctgagccaaggaggtcgacgctgcagtgagttggattgtgacactgcacttcagcctgggtgataaagcaagattctgtgtcaaaaaaaaaaaaaaaagagagggaaggaaagaaggaagggaaggaagaaagaaaaagagaaagaaggaaaaaaaggaaagagcgagaaagaagaaagaaaaggaaggaaggaaagaaagaaaagaaaggaaagaaaaagaaaaagtgacacccagtcgaaagaagaaaggaaagaaaaagaaaaagtgacaaccggtcgaaagaaaaaagaaaaagtgacaaccggctgggcatggtggctcaagcctgtaatcccagcactttgggaggccgaggcaggtggatcacgaggtcaggagttcaagaccagcctggccaacatggtgaaaccctgtctcaactaaagatacaaaaaaaaaattaggctggcacagtggtgcgcacctgtgagtcccagctactagggaggctgaggcaggagaattgcttgaacccaggaggcggaggttgcagtgagccgagattgcgtcactgcactccagcctgagtgcagcgggagagactccatctcaaaaaaaaaaaaaaaagaaaagaaaaagtgacaacctgcttacagagtactggcgagtttgtgggtgggtggctccctagccctgctgattcttgcttctcacactcatgtctgcccctgccccagtgcacatcttgtcactgtcggccccaccgatggggttcctactgagtcttctggtccctgatcccgtctgtggtcattttcctgccaggtagcttggccaggcctcccctggtgcagatttcatccttggtttctcagcctggccttgaatgaccctctacagcagggtccccacctctcagaacaactttgctccagccacatggcttgctcacggccaggcactgcccatgtggactctgtgcgtgccacctctttgccctgacccatgttgcctctgggggagcacttcttcctccaccttccatcatgggctgtggcagtgcccatcccatctgcccccgacgctgtctgctgcagtatggttgttgggggaaagggcaccaggctccggcgtctgacagccgtgttttacccaccttcctactcactagcttgtgaccttgggcaattacttaacatctctgagtcttagtttctgtttctaaaattgggtgaataacacctactaagtagggttggcctgaggattaatagtataatgtaaaagctggcagcactgaaaccctgccacttaccagcttttcacatcagtatttgggaaatattgttaagctcatttgtcaggcggggattctgaggctcagagcagttccagaactttctacagattattttgccttgtttgcgcttccagactgcctatcttcttgtatcaccattgatcttgatctgtatggtttttaatttttttttttttgagacggagtttcactctgttgcccaggctggagtgcggtggcatgatctcggctcactgcaacctccacctcctgagaagctgggattacaggcatgtgccaccacacccggctaatctttgtatttttagtagagttggggtttcactatgttggccaggctggtctcgatctcctgacctcgtgatccgccagccttggcctcccaaagtgctgggattacaggcgtgagccactgcgcccggccaacttcacgtttatacacacccatgcaaacagcatccagatagagacaaagagccttccctgtaccctaaaagtttcccagaaattgttcccagttagcatatttatttttataaaggtaatgcatgcccatcatataacattcaaaaaggtatgtagagaaccaagtgtctcccccagccctgtcctccagccacccagtttccctccctaggggaagccaccaatatgtgtttcttatgtatcccctgttgagctgcttttcctcgttttggtttggcggtgttgatgtttgtatttggaattacaggtaggcagcatcatataccttagtgtttagggcctctaagatcaaccagccctgagaaaatcagccatggtgaggaccttgtcccccagccccccaggagataggccccctggtgggagtgctggggcagggcagaggcctagggacaagaattagaaaggacccatgttgacagggctgctcagggtcatgttgtccatccctctgccacagtggcatggacaaactgcatatgttggttagaggagggcacccttctctcttgcaagcattggcaaggtcttaactattagtctcctgctcccatggcagcccctttggacaaggaggctcttaatctctgttctttgaagccctgagggctggtgtataggagttcaaagcactggctttggaaccggactgtctgggtttgaatcctggcactgcagctgactcactgatggactcaggcaatgccttaaactccctgagcctcaggttccttgtctgtaaaatgataaagatagcccctgtttcatagggctgtggtgagaaaccaatcagacaaggcatgtgaacgccattatagcacagcgcccggcatccagcaggactcactcgatgacagttgtcaccgccatcattgttattagcgtgggccagggagggctgcgtaaaagcagctggtggaggagggagagatgccgtgggaccgtctgggttcgcatgcgtgaagtattatctgggcctggagtgtgcaaggcacacatgtgtccttactgcatgtgttgtcacatatgtgcaatgccatgctcctgagcctttgattgcagacgtgtgggaagtgggccccgtccccacccccagtgccaccctgctctgcttctcttcccttgctgtgctctaaaacgagaagtacaagtgagttcccccaaggggtcggccgcgcctcttcctgtccccgccctgccggctgccccaggccagtggagtggcagccccagaactgggaccaccgggggtggtgaggcggcccggcactgggagctgcatctgaggcttagtccctgagctctctgcctgcccagactagctgcacctcctcattccctgcgcccccttcctctccggaagcccccaggatggtgaggtaagggcctgccacccacggtagacaggaggcaagggtgcctggtgcccacgggacccctcctcactgccctgcctgggccgcccaggtggtttcaccgagacctcagtgggctggatgcagagaccctgctcaagggccgaggtgtccacggtagcttcctggctcggcccagtcgcaagaaccagggtgacttctcgctctccgtcaggtaggtgggccccccgcaaccccgggcattttggccactctcttgtgccatccaggccctgaaccactcattcctggttccccgtggcagtgctgactccccgtctgttcccttgcccccaacccccacactccccatccctgtctgtgcccacccatgcccatgtgtgcccccacccaggacctcagccgatccctgccctcctgcctctactcctgcaccgactggcctcaccgcctggtgccctgcagggtgggggatcaggtgacccatattcggatccagaactcaggggatttctatgacctgtatggaggggagaagtttgcgactctgacagagctggtggagtactacactcagcagcagggtgtcctgcaggaccgcgacggcaccatcatccacctcaagtacccgctgaactgctccgatcccactagtgagaggtgagggctccgcacccccgccattcccaagcagggatgagccggctcccaccctgaacagccagggaggcagggagactggcagccggcgctgcctaccctccatcccctcccctccctgcaccagctggggctctcaatgtccctcctccctgctgtcctgggacctggtgtctcagagcctaacctaccaccctttccacctaaccccgaggaagccacagaaagctgcctcgccctactccgggagccctggccgctgcaacccaggtcccactggagacagggaggccactgctggtggccagcatgtcgtgcaggccagctctgttgttagaaagctcttcttcctctggaatcgagcctgccttcctccgtctgcccctcaccccagcacatgttaggacagtgaggagctgacactggggtgaagatggggatgaatgcttgccaagacacttgatgccttgtcccagccgccccgtggggatgggtctgtcctgtggggtcaaataggtctccggcccaaacagagatcattgagagcacgatgtgaagtgttcacctgtgtaaagtgtctcacgctgtcccgggcacagagtaatactccaggcatttccttcctgtggcctccccgactcctcctgtggtctcccaaaggcatgggctgggggctgggggctctgaatgctcctcatgacaccatggctcctttcagcagccgcatctcaatgccagatccccttagagtaaagggcagcggaataacgctagggggttttcacatgcacccctgggccaagccgacttgcccttgccgtggatccctgcattcatggatcggttattgaaatgatcgggaaccttgctcctgccagcttgcagcctctctgagattcgggcctccaaactgcatcaatatttttggtcaaggcactgattgaaacttagagctggattcggtcacggtgcagccctgtggcccacctgggaggcctcctttcctggatcggcctccttcaaggccttccctctctctgtgagcctcacatggctggctccgtgtctgccccctgcccttcctcttccccaccgcaacactcagggggcttttggcaccgagaccctctaaagctcatgtcctctctttctccttgcctccagccaggagaggaggacgggctgaccagtgcctggaggtggaagagaggagcagggccccaggaggcccctgcagaggaggctgaggcctgggttcaaggagaagagagaagagagagaaggaagggagggcagtgccggggcgggaggttaagaccagggaagccgcactggaggcccttttgggtgacccgtcccaggagccagtgtcacccctgagcctgggagtgtgtgagaggctctttctcccaggttctgctgtgtcctctgccttgtctgtgcgcctcctcctctgcgagaatttgcatctgtccctcggtggctctgcgcttcctgtggtcagcctgacatttgcatggagacttcctcatcctggggcctgagggaaggggctcagccccctccccgctacctggggtcctagcctgtccccaggcggtgggctgaagtagcccagtggggttaggaggctctgggggtctctcggctggagtcacctccgggcaggggtgagatgggttgggacagactggtcctcccctccttccccccatccctgcggttggaaaatttgcccgccctcccctcgtccctgggctgaggaaacctcacaacctcacttctcactctctccccagaaggagttttgtgttttttccatcacgtggtttcctgtggggctgggctttgtggggctacagtttcctcctgggaaaggggtgtgcttcggggaaagggcttagttctgctttctgccctgacagccccttcaaatccgtttgaaccctgggctccccttcagtgacatcatccagggcaccccagaaccccctacaccactctttccccagtggggttgtcttccccgcctccctggcggagcgcaccccatccgccttccttgtgacttgagtctgtgtgtccatctcccaccactccctgtggtgtggcctcggtctgcgtttctctttgcctctggtctctgctggggcacagtcccatccttcacggagattcatccttagcttctctcctccaaatattttgaatattgccagcctttctgcctttcagaggtgggctctgggttcgaagcccggttagaactctggaggctaggatggcttgaacctgggaggtcgaggctgcagagagctgtaaccgcgccactgcactccagcctgggcaacagagctctggaagcttgccctagagtcagtcaagggccctaggccagtgagtaacagctcagcgtcagtttcctcatctataaaatgggggtaatatcatacctagctctcagcatgtttgtgagagacctaaatgaggtggtggatttggaagcatgtagcgcagtgcctggcacacagtaggtgcttgatttccggcccctctctgtgaatgtctctgctcagcgccttcccctgtggcctgggtcttaccttccctgacgctgccttctctaggtggtaccatggccacatgtctggcgggcaggcagagacgctgctgcaggccaagggcgagccctggacgtttcttgtgcgtgagagcctcagccagcctggagacttcgtgctttctgtgctcagtgaccagcccaaggctggcccaggctccccgctcagggtcacccacatcaaggtcatgtgcgaggtaaggcagccaggcggcgggggagcctctgctgaggctcctgtctgtgaccacagtgtgggtggcagggagggtctgcctgggcttgaattcaaggctggggacccagggagggagactcaagtcctgtgaatggcctaatttggctccccccagggtggacgctacacagtgggtggtttggagaccttcgacagcctcacggacctggtggagcatttcaagaagacggggattgaggaggcctcaggcgcctttgtctacctgcggcaggtcaggggtgggcccagctgcctccccacttcccctgagctgtcccccagatgtgagcttctgggatctctgagttgctgacttctcgctcttccccaccccagccgtactatgccacgagggtgaatgcggctgacattgagaaccgagtgttggaactgaacaagaagcaggagtccgaggatacagccaaggctggcttctgggaggagtttgaggtgcatggtggggaccggcagggctggggcagctgaggtggtggcagcggcctggggccccaggcggacaccttcccctccttgcccacctctgctcctgacccaccccacgtgagctcccccgatggatgccctctttgggagctgatgctcatttccccacccacatctcagagtttgcagaagcaggaggtgaagaacttgcaccagcgtctggaagggcagcggccagagaacaagggcaagaaccgctacaagaacattctcccctgtgagcacccaggctgccccattcacccaggataccgcccctgccccagctgcctcccctcatctcacaggtctccaccctccacgccaggaggggccatctccccacaccccccacagagcctcccccttctccaaaaggcctctactcctcccagaagtgcctccccaccaccagcaggcaggttgccccctgctcccaacctccttgtgaactccctcactccctccatacagatgatcccccacccctgctgcccacagtcccccgcaagcctcatggcttctgagaccagaatggcctgttagctcaggagggtctgacccaggtgtggtgagtccctggctaacccagaccatctcgcctcctctccgcccactcccagttgaccacagccgagtgatcctgcagggacgggacagtaacatccccgggtccgactacatcaatgccaactacatcaaggtcagcagtgtgggccacgtgggaggagaggctgggccctgggaattccctgtctggtggggggaccctagatccagagacagctgggcaaagccgaagctggcttcttgcatgggtgagggtggcagtggttcagggcctgtgctgggccaaggggctcactgtcttggggtgcgtctctccacgcttgcgtccagaaccagctgctaggccctgatgagaacgctaagacctacatcgccagccagggttgtctggaggccacggtcaatgacttctggcagatggcgtggcaggagaacagccgtgtcatcgtcatgaccacccgagaggtggagaaaggccgggtagggcgcccccccttccccgcatccgcccccgtgcttgtggtcatgccattaagtcgaagagcagtcagatgccagggcagaaagggatctcaggggtgagggtccggcccttgttgggaaactgagggctagtgacaaagtctcgactacacaacgtgacccccagatccctgcatgcatccctgggctcttctgagctccagacccaggttccaggctgtcctccttcctcctacccctgccccacctgtctgcatccaggcccctcctgtcctccctgccccatagatctctctggagtctgccccttaccctgcaggctccccctacacagcaccctctgtgctgccattgaagtgatcccatccgtgacacaaactgggtcaagttccttcctttctgaaatctcttccatggctcctggtcacctttgggataaagtcgcactctaaggcctggcattcaaggtctggtggcttccctctgacccgcacgcttctcttgaaggctcaccgcccccagcagccccagctctttcaggttcccagcctttctttgcacaagctcattttctgctaggaaatgactctctccacactatctctgcctggcagatgcctcgtttttgaagacacagccggagcgctgcctcctctgtgaatccaggtcttgtttcctccaggacctagagggagaattacgtctttcccagccacgctcctcagcgcggtgtctcccccggtcacctgtctctgtgagctcctcgaggcacaggggcacagactgggtgttatttgtgtctgtgaagctgtgtggtttgcacagcttcggggacaatgcctgccctggcaacgtttgttgaatgacaaacggatgtaccggtgaagtggctggccaggcctcaccacctgttggtggttgatctgagacgagagcccaggtctcctgcctctctgccagcccatccgtccatccaacaaatgtttgggccggtgccaggcactcagaacatagagcaggacctgggatgggccacagtgccctgctctgtgcctcatccccacccgaccctccctttccagaacaaatgcgtcccatactggcccgaggtgggcatgcagcgtgcttatgggccctactctgtgaccaactgcggggagcatgacacaaccgaatacaaactccgtaccttacaggtctccccgctggacaatgtgagtggcccccacgccctgccccattccgggagtccctccctggacttgttctcctctctggtcgggtagggtgagatggatgaggtgttccgagagaggagggggcactgaccctatgtcctcggcttagggagacctgattcgggagatctggcattaccagtacctgagctggcccgaccatggggtccccagtgagcctgggggtgtcctcagcttcctggaccagatcaaccagcggcaggaaagtctgcctcacgcagggcccatcatcgtgcactgcaggtgaggatgataatcctgatggtagtagtgacagctgagaagtaaatactgctaagtgccatgagctgttataagcaatataaacgttagctcgcacattgagtgccctccgctcacccccggcttctcctgggtcccctcatggctccagaaccctgggtggatcgtggctggaaccagccccactttggccctctgcctgtgggtatcttcctcagagccctctccggatgtaccatctcgcccaaccctgccaaatacagaggaggagcccgggacccagttgctggccaggcccaagctagtcagggcaaggccgggcaggcacccacagtaggcctgtgtcccggctgctccgctttctctcgaggtcccattctgttggtttcttctcccaggaacatctatgaggcatgtgctccccattcctcctctttttccatcggtagccgcagggcttcggcttcttcctgactctgccctctctcccagcttccccaggcagtgccccatcctggcccccagggctgtgtggggatgggtgatgcttctttggggctgcacataactcctctgtctatctacccgcatgtttgtgatcaggagacctctggtaaggtgcagaggtgggggctgcaaggaggagcaggggttccacaggtgagcccactgagctggcctggcctgggtggatgagaggcagtgggtgcagggcccctccgcttaccagctgtgtggtcttggacaaattacttaacttttctaaccctcagcttcctcatctgtaaaatcaggatctcagggttgtcgtgagaactcaatgagaccctatcgttgtggctggaattccgtcagccctcaaaaactgggcgctgttactagtttagtaactcacatcaggcagagaataggggaatgggaacctgccttgccccggtcccttcccactccctccgtggaccccaggcctgcgacggcctctggcttcctcctcttcccccagcagctgtttgtcctgggacagggcaagtcggctgaatctagaggtgcccccgatgggctgtccggggacgcggctctgtcctgtgctctctcagggacaggcccatccccgagagctaccctcctgctcacccgccacacacacattcacacacttcttgaaagccccatggcctttatttagacgttacaggaaggaagtgggtgtggggggttatttttgacaatctgggtttgaaattagacagcgcgactcagggcatcagcttgctgggctcagctgagggtgggcctggggtctccctgaggtctgtttgcccagggctgggaaaggagagaaacttcctactgcactgctcccctgagtcccctgaccctgtgcccccgcaccctgctgtctcagggctatcctttccctgacgtcagggtttgaaggaaaagggaagtgaagccatgctgagagacgctccataactccttcagggagaggcggggagggctcagggtacctgggagccggcaggacagtggtgggatttgggggtcccaggtcttccggggtgggggcagccactcactaggagtgaggagtcggcgcgaggagtggaggagggaaggatggtggcagctggggagccagcgtcagcaccgcagagcccgaggtggagcgtgtccatgcagagctgggcaaacctccatcatcacttgcccggtgaccctgggcacattccctcccatcactggaggctcaggctgctcctgtggtgcctggggctggagctgagcgctgggtaccccccttcccggggagggcttgactggcctctgatggcacccccgtctttccccagcgccggcatcggccgcacaggcaccatcattgtcatcgacatgctcatggagaacatctccaccaagggtgaggggcacctgggggtttgggggtggggggtgagcagcccctcggtgtccgcctatgcctggacctgaggtttgactgccccccacccaggcctggactgtgacattgacatccagaagaccatccagatggtgcgggcgcagcgctcgggcatggtgcagacggaggcgcagtacaagttcatctacgtggccatcgcccagttcattgaaaccactaagaagaagctggaggtcctgcaggtgcgtgcagagcagggcctggggggggggggggctgcagtgcaggatgggtgccacctggccctgctgggaccaccaccttcccactgtccctctgcccacagtcgcagaagggccaggagtcggagtacgggaacatcacctatcccccagccatgaagaatgcccatgccaaggcctcccgcacctcgtccaagtgagtggccctgactgccactgcccggcatccacccctttgtcctgcccagcccgatcctcactttctggagaggacaagtgttgcagctggggggacctggcttcaagttcaggcttggttctcaccccttctgttcataagcatttcctgagtgcccacacgtgtgggcctctgctaggtaccagcagcgcactcgtgtatgagatgtagcctctgtcctctaggagcttggagtctagtgcagggaccgtggctgcgtcacctgtgagacggggtggccagaggggactgccagtgccgggtccccctgtgctgtctcctgacctgcaccaactgcctgtacttgcccccctgcacccggctgcagacacaaggaggatgtgtatgagaacctgcacactaagaacaagagggaggagaaagtgaagaagcagcggtcagcagacaaggagaagagcaagggttccctcaagaggaagtgagcggtgctgtcctcaggtggccatggtacagctcttctgcctgggtgtcctccctgccctgccctgtgtccttggctccactgccttccctgggtggatggggtggccgcagcctcattctgtgcttcccagctgccccagaccctcttgttccacctccaggttccagctaccctctcactccctcactcccttctcttggcagcctcagccctgaccctgtggaagcatttcgcgatggacagactcacaacctgaacctaggagtgccccattcttttgtaatttaaatggctgcatcccccccacctctccctgaccctgtatatagcccagccaggccccaggcagggccaacccttctcctcttgtaaataaagccctgggatcactgtgtgtcg

SEQ ID NO: 5638 - DNA, 5775 bp, Homo sapiens
gccacgcgatccactgggcttctgggcacagaagtgcctcaacaggcacaggcaggctccccacagccacaaggaaccctgctgccaaggaagcagctcctgttggggtcatcagatttttaatctggctcagcaaagccatggctgtccagccttaaaaaaatgggtgatgtgggagaaatggagggtgtgtgaagagcacagctgggcctcgagaactcagggccagccttcccagcttgggtcctgtttcggagcccaggccttgcttccccttagccgccccagccagattcttttgcgccccctgctggcacacacaaagacagacccaggagcgcacatgtgaacgtgcgcatgcttgctgccagttacccagttcatgaacacgtgaagccttgacttcaggttaagtaataaaaatttattgagaattcctgggttggtgtttatctcctcccagccttgagggagggaacaacactgtaggaaatcactgagaaatcacgcactgtccccaacagccccagttaacacagggaggaggaaagtaattccccagaaaaggggctagtcttcagtcttccttaatccaagaggggttcagggaaccggtgtgggggaccatcgcatgatactggggcggggtagggctgtgctggacccctggctggctcctcaaaaactggagaagcagatccacttcctctgggggtggagttcttggtgactaggctcatttcttacccttgatgaggctgtcactgtaggaaaaaaaagatagataatgacattattaggggacataaatgtgagaggcaggacactctaggccattccctctacgaccctcctaccctgattgagggtttgtcttcggggaggtgggaaagggggtagggtaggaggcgggtactggagaaggtggcctgcaggaccccacagaagcaacaacagcttaccttcccctgtggtgccagatcgccagatgaacaagaaacagagaagagaaatgcacatgttaattgacagcttcaggccccactcagctttgaaccctcctttgctcccaagagaaaagataaacagggttgacagccaggaatctcaggctcatgaaaggaggaggcatgttctcatggccactgctatttctcatctcctttcctaacatccctccattcaccagaggagtttgagggctcttgagtaagaaaactgagtatcatctttcatcactttttggttagatgaaaactttataattaaagtgctttttatgtgaataatcctatttgatctcataaaatcaatcctatgagatgcaagatagaaactgtcaaccacccccttttctaattttggttcaatgtctctgagccatatgaatagctgtagcaggctccagagcccaaacaaccagactcaggtcccacgttcttggtgataccccacagtgtggccacatctctcacctggtgaaactttcatcctgtaggttcagcacaaggttgtcagctgtgagatagatacgattctgtgatgtggcgatctacagggcaggaaataagacagatgcttgcattaagcaaagacctcaattccgacccctgcaattcagcagctacttaacatggaacacatgcagattagggcaggggtgcagcaatgagtaacacatggtttctgctcgcacttagggatccagagcgctgagcagcagctatgattagaacaaaaggtcagggaacccagaggaatcattcttgacaggaggagtatcggagaagccaattttttatttatttatttttgagacggagtcttgctctgttgctcaggctggagtgcagtggcatgatctcagctcactgcaacttccgcctcctgggttcaagtgattctcctgcctcagcctcctgcgtagctgggaatatagctaaacgccaccacagcgggctcattatcttttgtatttttagtagagatggggtttcaccatgttggccaggctggtctcgaactcctgacctcaggtgatccacccaccttggcctcccaaagtgcggggattacatgcgtgagccaccgcgccggccagagaagccaatctgagtagaaaccggaacaagcaaggttcgaattccctcacctcaatgtgccttaactgaaagcactttctcaaggcagccccatcagagacgctgggctgacacactcaccgtcttggagatattctgggctgctcgaatcttgcgaagtttgatgtagccagggttcttgctcagtgcttctccaaggtgaggagggttaaggtacacgcaagggcaggtctcaatccctggccctgtccttaccacactcccttgctccagtcctcctctgggctgtcagatccaaggttgcgctcaggtggcttgtgcccagccctaccgtggaccccacctgtgggcctccctgcaggctgctgccaggaactaggggcagcaccagaaatgaaggcaaggccaccaatgctattgatctggccttacagtggggagtcatggctcaggtactaccactaagatttcagatctcatctgtagtccccacccccaacaaggagccaagggccagagagcacggagtcgcattcgccttagtctcatcagcctgcccatgaaggagaatggggaactcaggtgccctaggggctgggctgagatctctccagcagaaggatatcatcttggcagcctcggcctcaccctcggcctgcacaattttctgccgctgttcctgctttgctttttctaccaagaattgggcccgctgggcctcctgctgggctgtggtgggagagagtcagggagaccctgtcctgggtcaggagccccacccatggagtctttcctcctcctgcatctcagaagccctcaccccacggctcttgcgactcacccacttgtttggcttctacagcagctgtgtactctcggctaaagctcagctctgtgatggccacatcatccaggatgaggctgaagtccttggccctctctgtcagctcccggcggatcaacagggatacctgagggcaggggtgaagaggggaagggaggggtggtttgaggggactggggagctgaaaggaaggttgcgacccctaacccttcactctcaatacaacatgcactgccttagcttcctgtcaggcaaacctgtaacataagcctctctgctcgaagaggtgcaggaaaagccaagacttggccattttcctctgtgcttcctaacaccgagtgctatcgagttctaatgctggctctccttatttcacagtggcaattagcacagcttttaggtggaaatggcactagggtgacaatgcttttctaataagctgcctttcctaattcccaatactctgggcctaggaaggaaaggctgacaccacgcagatggtggtgggagtcagacctgggcccgctgggtgatcagctgtgaggcattgaacttggccaccacactcttgagcacctcgttgacaatggacggcaacactcgttcctcgtagtccagccctaggcgctggtacatgctaggaagctcctgagcattgggtcgagacaacactcgcagggagatattcaccatctgtaggtctgagattgaggtcagcagtggctggtcaaggccaaacaccctttcccaagcattttctccttcatgttcctccctgtatgccctgtgcaatggtgtacagcctggcactaccctggggggaggagagttaatcaggctgacaaggaagacaagacgcagcacagctgaaatgcaccctcacccactgtgaagccttgaactgcaaaccccgtcaccagcagagctgactactctttccccctctgtactctgtgcaacctctaacgtgggcgctttcgtgctgtaccgtaatcatgtctcctgtaaggacttgggggacaagaattgtgtttaatgaatcttttattcccagggcccagtctagtaaatgaataagcgacctgcactaggtatagcacaaagaagtacattacaggttacaggtgagctacctgacccagggtgtatatgtgtgcgtgggtggggaggaggaagaggtctggggaactcaaaggcacggcttttatgtatggtctagaaggagagaacaggtgaactagtcaagcttagggacaaacttctccagaacagagtgtactagtggatgtaactgtagatatagtaagtcaagcagttagaaaaaaaaggctttaaaacaaagctttgatctaggcagtgaacaagacgagggacaaacaatactcttattgaatacacgtcagggaggagacagtaaaaagcacgcaaacacagtgtgttcagaatttgctgctttgaccccaggaggcaggtatttttgttacagctcttgcagatgtggaaagaggcctaaaggcctgacactaccatattcccctggggtttcttgccagctaccttgatcatcccacctgccatgtgattaccaagtgctcagacctacctttggagcctgtaggggaggagatttttcgaggtctggcccgaatgtcatagataatggggtactggaaccaagggatcctggagaggacagggataggtattaagaggccacagtttcggccgggcgcggtggctcacgcctgtaatcccagcactttgggaggccgaggcgggcggatcatttgaggtcaggagttcgagaccagcttgatctacatagtgaaaccccgtctctactaaaatacaaaaattagccgggcgtggtggcgggcgcctgtaatcccagctactcgtgaggctgaggcaggagaatcgcttgaaatcaggaggcggaggttgcagtgagccgagatcgcgccactgcactccagcctgggcgacagagcaagactccctctccaaaaaaaaaaaaagaaaaggccgcagtttcactagccttgcccggtttcccctcaccacgcgttttttggcctgctcctctccacgaccacagacaaggagagattctcttgtccctctggaaaacaacagtttgtatgctgctggaggttctcgcagcacccactatcctaggggcagggatgaggagggtgggaaaagagcagcgttgaatcctgttgcacgtccgactatagccactgctgggtcggcgtcaagggtgaaaggtcagggtcagcaggctctgcccgccattacctgaagtgaaggccctcggccaggatagtgtcctgctgcactccaccgatccgattgaagaagatggctctgtgcccgccttccactgtggggagatgggtggtgatcaggccaggccgctgctcagaggaaatgctaggcccgtggaggggcgcggggacagggcaaggggtttgggggagggactggaagcgtccggcgagcaggcggaggttgctcaccggtgaacacagattcgcgcacaccgtaggccacggcgccggcccccagcaacagcttcagggccgtgcccatgccccggggcccggcgggcagccgtcccgccaagtccttcaagttctgggccatgtctgatcttgaggccggcggcactggaggtcagaagggggtgccggcccgcctctaccccgctccggcttaggtactgcacccttcacacgagggttcgggcccgtaaggctggcgaaagaaagggcagcggaagtgcgctccctttgaaaccctcccccttagcccactacggacccg

SEQ ID NO: 5639 - DNA, 14738 bp, Homo sapiens; identical to SEQ ID NO: 5637

SEQ ID NO: 5640 - DNA, 5775 bp, Homo sapiens; identical to SEQ ID NO: 5638

SEQ ID NO: 5641 - DNA, 524 bp, Homo sapiens
tttgtgaaatatcacacttgttgagtgcccactgtgggtataattttattctgggttttctaaactgaagaattcaggtttaaaattcagaacacctctagaaatacagaaaaatgtctatttctcaaatggagatatcaatagcaactacctataaaatagctctccctcaaaaaggtctttcactaaaaacaagtacaaaagaaagcatcctttttcagcagtaggaacccacaagatcttgttctttgattacaggattgaaaaattcacatttgtacacctagcactgatttcagattcatagtaatgccatctataaaaattacaatttcacatttcagaggcctgccaacctggatatctatgcttaaaaaaaaaaaaaaactatcaaaagcaagtaaggaaaatatagcttgtccttaacacatttctaaggtattatgcaaaggaaaataaaaattgtttcatagaggtttctacttctttcagatcaaattaataaagtctctcttaatcacagc

SEQ ID NO: 5642 - DNA, 7175 bp, Homo sapiens
acatttcacttattaaggttttaagtgaattggaaaggcatatattagtaattagtggtaaatcttagacaccaaaaatttaaaaggaaaatagtaccaaaagtgtagctgttaacaaaaaactacaacactgtaactaccccaaataaaataatgaagcacatactatccaaaaaccatcaccataatccagcaagttccaaagtgatccctgaatttacctactcatctgtcatgaatgtttatgtttctctatgtctactggatcaaggaatcttaattctttttcagtatattttacgtgaagagtagacaattgttactcagaattgggcctttcatcatttcactagtggtccctaactccattaaaataaataaatatatatgggggggtggggaagatgagaaaaaaagagttagtgagtcatatttaccttatgtgagacctaatctaaaatttgccaaattcagggctgaaatctgaataggtgtataaaaagagttgttactctctccttcatatgtataccccatttcttgaaagaaaaaccttaaatacatttctaggttaaggatttaaagctgccaaactgccattgtacaagaggctgaacagacagtaggcagagtgaccagtttctaaactttgccctcaagggatacaggttcagacacatcaaccaagcttgaggcaacaattcagaactggtgacaccagcctttgtaaccagaaggcaactgtttttctgaaacttcagaaatattcaagctggaaagggtgaaatttgtctttaaaaaggaatattcaaaaactttctgatcatattaagacagaatataggcagagtaacattgtagtgctgttggtatacctttttaaaccaaatttatttctcttccttgcttactaactgactcctgccccaaagaagattacatagaaacagtctttatactaatctatgttatggctttgctttgctattttttttttttttttttggtctaagtaagatattagggctcgtgtttacaaaagtaaatgaaaggatcaaataacatgattaatacattttattacaaaggttttagaagatgaggggcagagctaacaaattaccttaatcattaaaaaatcacaaagttggagaatttttttaaaaagagtggataccaaaatagcttttaggaagatgacagcttaatagtctcttaaattgctgaagagagcaaaagaaagcttaagatctggaggataaaagttatatcaaaaacatgctaaagaatacattaaaacaaacaaaaaggaaagaggaaaaaataaactatgccttagaagttaaatcctatcataaatgaacatcatttctaaaggactatggcccacttcaacactcaaacaaaaaaatcctcattgctaaaacagcttcaacattcctttggagtttgctgttaaagaatttatcctgcatatatggtagacacgaaacacatcctgaagagactcagaatatctgcaaacataaaactgcttctctaaattgcatttactggccttgaatccagtagagtagggttcagctatgacatgaagtgtgtcatcctggggagggggagcaatttgaagaaaaagggcactttgctacagttaattcacatggctataatagtctacaagtttctcctcaatgccaaatatctactaagaatttaaaaaagcagatgaaactttctatttccaagaattcatgtgataaagggtaatcatcacagagtttacatatgctcagttttcttaaagccatagattttattccagaaaggagaaagtacatggcattaataaaccacacatgccatgaattttagaacactaaattatttttctctggcttatcaaccagttatatccatgggctgcaaattatatccatgacaaaattgataacattttgcaacatgtcaaagaaagaccaacatttttgcctgagtgtcccactaatctttatctagagttattattcttggactttctacaaaagtttcttttcaaataatttatgaattacaacaactggaaagaatactgtgagaacctgaatacttcaatcaaacactgaaggcaacaatcttcctctttaaaccatctctcctgcctgaatttttatatactaaaataaccccactccttcatttctgcaggagtagccagaataaggtggcattccttggccgtcacaagtcccaggtcaaaacatctccattcttcaatgttctaacaaaggtttctggccctgcagctcatgtgtgtgtgattcaatcttgttctcaatgagagagatctctagcacaggtaagagtagctgaaaggcgtcctggatgtaggaggcactgtttgatgcctgccaggattgaaaacacaagaaaaagaaaatattagttatttaaaagagaagatatactgtaaggcaacaagggaacagattaatttttgtaatctaactgaattcatagcctggcaagtaagagcagtgacttggccattttggtaaactctattatagggagaagaatttagctcttaagatgatatgagcaccaaaagagaatgtcagcattttgtacaacttgcccatcagacatggtagcttttctttggcaacatggtcagacttggcattcaaagcttatttattcctttattgagtagggtagattctgtcacaatattgtggtcaattactgaaagaggctttcagaaggctataaatcctacacctatagaatttctagcccattatgatagctctttttccatggactcaatgcgatcagtgagcacaataactgctcacacacataaacatctttcacacatatactgctttcaaagatgacagtatagatatatttctatcttgaacaacatttttcagaagtgttagagaatcattaccctcagtttgctggacttcatttatactgaaaagccctcacctttcaaaagaatatcaacagagagctcattaagataaaaatgtataatttcgaagacaagagtgtttcaaatctgtatgcaaaaaaaaaatccactaaaaataatagggagcccatatcaagtgatattacctttttaaaatttatcaatggcaagtactatttaaaattcagtgtgacatttaatactcaatttcccacacaaaagggacctcagatatcgtctagttaaatctcttatgttgcacatgaaaataacgaagtttgtcagagtcacacaacaaatcaaggaagatccagggcaacacggggctcctggtttacaaagtcttttctactgcaccactctgccgtttactaaatcacaaacttatatttttaaaaattattacaatgatcaaaatagtttccctgactacttgattaaaactgtgtaattaaagaattaaaatcatttccttgatggtaatgtcaaaagaatttaaaactagagaagtaagagtttggtagttaaaacattttttcaattaacatctaaaacttaactatcaaatatattttctccccccagacttacataaacatgttttaaacaaatcatcaaaaagtctatgttgtctgcacagttagtttacaaggtagagttcttaaaacatggaatccagaaaacatcacatagggaggtaatataatcagtcacaggatcctcttttccattgacttaaaccatctaccttctcaaatctaatggaatgatgaggataatgtaaacactacctttctgacaaaacaaagcatgatttcctggcaaggaaatgacaacatgttttgttttgtaacaaacctctgcataaactttagtcctaaattaggaagcagtgcttacctgtttataattttcagcccttcatgtttaccagctggtattcagaaggtgtttcattactgtgaaccgtccattaagctgtcaaggattagtactaagtaatgacaatctactgcttcttccagtaccctgcagcttcaactgtatgctttctaattaataaggaaggaatacacatcaaatatacactatttctgtcatatctacatcaatatggctaaactaccaatatggtgaataaaataaaaaagccaaaagcaaaaggcttcagaagagttaattatacgtaatacctttggagtcagagacttaaaaacaattactaacctctagaaatactgcagtgattaatgggttaaggacatctgccatttctttgacctggaataacgaatacatttttaagtgagcagagtaggttaaataacagtaagtggagtacgatcacactttaaaacacacacacacacccatacataaatattaaatataagcacagaagtctggactgagagcaaaatgtcatctttagaatggaaattctaagtgttttaaacttctttcttaatatctttctgtgctatccatattgacagtgtattgttttatacctttttattgactttaaaaggtatcttcatttgaccacaaaaccttagaaccattttaaaacaaaacatgtagatatggaacatgtgctcaaaaaactcaagggtctttaacacaagctgtttagaaaagtcttataaataaataatgtaaatttaatacttgtatgtgtcagcatcttatagttgatatgctggcttaaagtatctatatggaacacacagaaagatttggccttgtaagattaacttcaggaaacccagatcctttgtcaagaaaatactacagggaaaagtgaagctgtaccaaaagattatcctttacaggaataatctaaactcaaattttaaaaaattaacttaggccatggtcttaattaaaacaaatgtaatgttcatgactagggctttaaaataaataaataaataaaatttaagaacccacagtaattttgctgctacactgacactgatatacttactataaagtaattttcatttgcttgtttaaaatgctcttgattttatcccaactcattattactggtttctcaatcatcttccatagctcacacatcttcataaatttttacaattccaatttttaaaatccccaaaagactttagctttaactacttctctcccaccggctggcaactgcatactgtgagcactgccatagtctaagtacagagttgctctttaaaaccagagtcaaaatctgaagtttgaattttatcaaggtctatatttccattataggtctcagaagatagcataaaaaatactgaaaacttcataaacagaagagaacaaaaattaattagaattagacatagacaagctgatcctaaaagtcatatgaaaatgcacaaggccccaagcagtcaaaaaatcttgaaaataagaacaaagttggaggacttacacttcttgattccaaacctactacaaaactacaatatcaagacgatatgacactggcatttggataaacatacaaattaatggactaaaaatcagagtccagaaacaaacccatatatctatggccaactgattatcaacaaagaagccaagagaatttaacggaggaaagaacagtcttttcaacacatagtactggaacacacggatatccatatgcaaaagcatgaagcagggccccctaccttacaccatacacaaaaattaactcaaaatggatcacagacataaatgtaagggctacaaccaaacttttagaagaaaacagaggagtaaaatttcactgcaaaggacacgatcaaaaagcgaaatgacaactcatggacttggagaaatacgttcccatcaaaaatctgataagaaacttgtactaggaaaattaaaaaaaaaaaaaaatctcctacaagtaataataaaaacacaaacaacccaagttttaaaacaaataaactgctgaaatagatatttctccagagaagccagacaaatagccaaccagcacattaaaagatgttcaacattggcgctgggcacggtggctcatgcctgtactcccagcactttggaggccaacgcaggtggatcacctaaggtcgggagttcgagaccagcttggccaacatggtgaaaccctgtctctactaaaaatacaaaaattggctgggcatggtggcaggtgcctgtaatcccagctacttgggaggcagaggcagaagaatcacttggacccaggaggcagaggttgtagtgagctgagatcatgccattgcactccagcctgggtgacaagagcaaaacttaaaaaaaaaaaaaaaaaagtaagaaagaaaaaaagatgtacattagggaaatgtaaatcaaaaccacaatgagatactatttcatacccactaggatggctaaaataaaaacaaacaataagtattagcaaggatacgaagaaactggaacccttacacactgctggtgagaatgtaaaactgtgcagccaatttggaaaacagtttggtaattccttaatgacccatatcacccatatgacccagcaattccactcctagctatctacccaagagaaatggaaacatattcacataaaaacatacatgcatgttcatagcaacattattcattatagccaaaaagcagaaataatccaaatgtctactaactgatgaacaaataaaatgtgatatatatccataagacagattttttggtaataaaaagtattaatacatgctacaatgtggataagcctcaaaaacactatgctaagtgagggaaaccaaacacaaaataccacatattgtttaatcccatttatgtgaaagatgcaaagcagccaaatctatagagagagaaagcagattcatggtgcgtagggctggggaaatgtggagtgaaagggaatggggattgtacgagttttggggaaggctgatgaaaatgttttaaaattagactatggaaatggccgcgcaactctgtaaatatactaaaaactaaaaactattgaattgtacacttaaagtgagcaaattttatgatatttaaactgctaaagaaaccagacaaacattattgcagtaagaggcatggattcttaccccagcagttgttaggcaggtagtgaactctttagacagagaggacaactctttacacaacacaattgtcatcctaggaaaga

SEQ ID NO: 5643 - DNA, 710 bp, Homo sapiens
caaatgctgattttctgtgtcaattgctggggcccagagactaggggtcagagtactatggtcactgtgataaataaccttgctattgtctgttagtattttcactcttagcccagagactgggttcccagcttggccctcagtgcccatcccactacccatgacagcccaatggctccacagagcctggagctctaaagaagatgggctgaaaatgtcagatctatgtgaggagccttcctgctctaaaagctctcatccctctggcccagatctctggttttctttgatttattgttcttacaacccagaagcattagatctttttggtggaagccagaaaggcatctcttgtttacccattaacaatcaacgttatgtgtacatatgtttatccattaacatgtatggcttattcatttgctcattcttccaacaaatgcaactgagcttctattagcccaggcatccaggatatacacaatggaggtatattcttgaccctggaggttcttacaagtcaaataagggagagagaaaaagtcaaccaatgctttctgtgtaccaagaactcagcacacatctagcaggctttgtctaatttgatcttcacagaaaacgactcccattttacagaggaggagacaggccctggggatattaggcaagttttttaaagtcatgaatccatgtaatattaaagtccatgt

SEQ ID NO: 5644 - DNA, 710 bp, Homo sapiens; identical to SEQ ID NO: 5643

SEQ ID NO: 5645 - DNA, 516 bp, Homo sapiens
tctttatctgttctattcccttgcctttttgtcattttatagttatttctttacattctgtctccacctttttctccttgattaaactttccaagaagtttaattgttttacttgttgttgttttacttttcattttcctaattatttgtatgcatgaacatcctttatcaattagtcattcacatgtctttattcagagctttgtatattcatatcctttgcatgggctaatgatacataccctttgtacctttctgctggctgatagacctttttcttattaatgtgtcatattgtggatgcaaattatttatctgaaatgtgcttatctaattgacatttatcttacagctttgctcatttagggagttgctgttgtagctgttttttgccacacagaactttcataattatatgaatcccagtcttttcctttatagcatctggatttcctgtcttttgaaaagacctccccatgccaagagtttgaaaataaaattgagaaatgaaataat

SEQ ID NO: 5646 - DNA, 23307 bp, Homo sapiens
tcgttgaaaaccaataatttatcaaaacgctgcgtgtgtatgtgggggggagggtgtcgcaacagacagggcagcggtgggcggacgcacaggcaggagacggtgcccggagagtgggggcggcagcttgccactggctggccatgcgggcgggcaggctagacattcttgccgcgcaggcgcagttcgtggcgtcgcaggtggttgtagagcgactgcacataggtgaagacacacttggggtcaggcttcttgcccatgatcatcatgtcgtccacctccaccaggggcacacagtccaccagcatcctgcagggagggggcacggggttggatgtcagcgccagacccgcctctcgtggcgcccctctaccccaaggtcttttttattgccgcattgcctgctggtctttcataaactccagacagggaaaagccttccaggaaggcaggaagcccctggcttcatctacccaagcctggaggcatctctcggggcgggggagcagagctaggcaggtggaggcggagatggcagaagagagccccatcccagtcaggcaggtcctgggtctgcttcctccaaccctggggaggtgctggctccaaaccctgcccatgttctccctggagaccaccttctgctcaccctcactggcacactccagttggtagaagcctctcagctcggcctttgcacccagatgggcttcatcactggccaatctttatctatggataggtctcactctagtggccctgtggtccaccgatgattgtctgctagctgcctgatctggtacttcctgttgagaggcccagggacccctattctttgacagggggtggggataaccctgctgctggagatggaggccagggaacgtgtgggcagcagaggggttctctaacccttatcacctgccttgggtagagcagaggaggcagatgaggatcccagccaataccaatggaccatctatgccatgctcggggggaccacccttctggccatccttcagaatgctagctgcccttcacagataaggaaactgagtcacagagcagaggagccatttgtttcaagccccatggcttagtaagtgcaggctaggccgcatgggacccaggcccccagttctgggtgttggcaaagccttttccccactctggagtgagtgggttgtgcctattaagcaactgacagctcccagagctctgaagctggagtctgctctctggctccttttcccctgtccctcaacccccagagcaagacctcttctgccttgatccctcctatctgccatacctgggacatagcaagcattcaatgttgctgaatgagtttcctatggcagggaaggcataatggcaacaattgctccttattctcaagacacctgagaacccaagaccacctcccatctcgtgcccttatggacaaactcagaactgtggtagggctgggcctacccccagctcacctggactccttcagagaagaaacctgggaggcagaacaccgaacacctctgttttagtccagactgtatccctaaccagttgtgggtgctagataaggcccttttctatgactgtttccccctctttagaacaggacagttattctctatctcatttgagaccttacaagaatttaggatgagtgagagggttctgggtctgctgctgatgtgccacgtgcccctagggtcatccctatcccagactgggcttgtttcccgagctgtaccatgatgcaaaggcagcctctctctgaagcttcttccagctgtggctatcgtcctggggatcccgaccgccctctccaacctggtgctccctcccgccccactcccttccctggagaccttataaagccattgtttacactggggctcagggctcagggctcaggctgccccagtgacaggccaaacaccaggcaacttgagcaacagcacggctgagtcacactttccaactggatcagggctgggctgggcccctctccctccaagctggcttgctgggcagcagctcctaagtccatatatgatctggagatagcaccaagcccatccgccactcatctgtgctccttctctgagtgtgtgtgtgcacatgtggactgccccccacaatggctccaggccctgaggggcatctgagtgtgcccctacctgtcactgactcacattccttcagccaatccccttgctccttctgggcctctattttcaatcctctctacaaaatgggcgggaacacagtgatggggcaaggaaaacagccactaagtggggagtttggagtctcagtttctggccccagctctgacctaaccatcttccctctccctcccacccccaggacagtcttagcccacgtctctctctgagctccttgtctgtaatggggtagttagtttaggatctgaattctttactttggtactgaggtgaggtgaccagagaggaaatgccacagctggcttaggatccagagtccccagccagaaacatcttcctgttgaactggtcctgctcctgagctccccactttggagtatggcaccaccaactccccagtgcccacacaggagcctggcagacttcttgaccttccctctccctctccaaaccagatctattgggaagcctgtctctctagctcttaagctattccagtcatctagtccatcccatctctcatccaagcctcatccgaggaaggtcctagaatgctatatccatcccttctctgtttggaaaccctttataactcctgttgtcctcaggaggaaggtcaaacttttttttttttttttttttttttgagatggagtctcgctctgtcacccaggctggagtgcagtggcatgatttcagctcattgcaaccttcgcctcctgggttcaagtgattctcctacctcagcctcctgagtcgctaggattacaggtgtgcgccacacgcctggctaatttttgtatttttagtagagatggggtttcaccatgttggtcaggctggtctcgaactcatgacctcgtgatctgcccaccttggcctcccaaagtgctgggattacaggcatgagccaccgtgctcggccagaaggtcaaacttctaactgtggccccctcctccctcatatccagactcaagtttcttcccttcctgatgtgctgtgctctccagctctcttgccctgctaagcctaggctgattcctctgcctggaactccctctccctcctttagcctgaacttgttcagatcccagcttagtttgcacttttttcagatggggggcccagacctgcagcctgggtcaggcatctcccctgggcttcccccatcacagtgctgcccacctgggtcatcactgcccatttagaatggtctcacctgctgggccctgaactgccagaagacagggctatgtctggctcctctggcttgactaaatgccccccttacttcccccacccgcctccctggaccctctctggccttgctgagcagattctggtgaaacggggcaggtggtagaggcggcgtttctcaccgtggggccccgagcaggggttaggactttttggtttttaccagccccttctggaccagacagcggtagaattcctggatgtacgtgtacacgcacttccagtcaggctctcgaagccgcaccatgtcctctgtatccaggagctgcgggcagtccgcatgggtcctggggagggtagggggccgggaaggggtgggggacgggggcaggaggccagggccccgggtggggaagagagggaagaggcagagaagagagaggggaggaaacagagacacacacacatacacacacacacacagagacatgagttcaattacgattccagtgctgcagtctgccagccccccgcatgcctcctccccactgtggacgtgccgctcactacccatcactaatggtgtgcaatgcagacaagggtgggggccaaaccagtcacaggtgcagagaactctaggggcaagcgggaacgcggggtgggggcgatggcgttggcaccaaggttggagaggagggctgtgccccggggagagggggtgagggaggcgtgagaggaggtggggggaggaggaagaggagaaggaggaggaggaagaaatttgagggaaaccagaaagagaaggggaaagaagggaagacagatggagaagggtgctgagggtgaggtgagcagacggggcaacgattccaaagtggagggcttgctgaggtcctatataagcctctggcagcactatataggctgggcgggcacggtgcccgggccaggagcctccttttggaatctccagccgggatcccgtgggagcaggaagctctggtgatagtgggaggagagcaggacagagaaagggagagagagggagaagggggcagagggaggatggaggggatatggacagggccacctggtgggctttggcccgggctggtaggccggcctgcggctccttcgttccggcgggcacctggcacgctcagcagcgggggggtggggatggagaaggacggggactctctggggaagggggtctcagccgctgactgacaatgtggctggcccgctccaggggttctcagggcaactgggcctggtcccgatgtccagccccagatgtgcagcaacattagcagggccagggcccacacttactccgcagatgagaaggccacctcgaagttctggcgtcggttctgagggctaagctgcccatagtcgaaggcctcagggaagaagttgtgcaccagggcacagaaggccatcccatcactccagctggaggagaagttctggatgtcgacgtgctataagccgtaggaggactggtcaggaacctgggggcaactcccccctgctgtctacccctcagcattctgttattccagacctagggcactgggcacaaagaggccccgtagcttgcacaatgagtgaatagttggaacatgagcctcctccaagtcagcctgtcaactcccatatttgcaatttcaagggacagagctactgagaggcccagcgccacccagctaaggctatggtcatgcctcatcactccttccctcatttagagaaattgactcagggcctcctacagagcaacaaggaggggactccaagagtgggatccggccttgaaccctgcccaccacccaagaggccctgttacttcatcactgattctggaatctagggcttgccttgtgtcctctttgagcctcagtttcctcaccccaagagcctttccatgttccctgtgaggccacacagtggcaggaagtgtactgggtaataggagctctgctaagaaggaggtgttgagctggggtctggggaggcctccaggccccctggcctcccggggctcacctcgtagccgcgagtcttggctcgacaccagtccagcagcatctgcttgatgctgttggcgttggggaccccgaagctggtggatcgctgcacggctgcgcggggtccgccagggctgctgtaggggcggtgtcaggaccaggtcacacgactataaggggcatgcctcggtgggcccacccagtggatcccaggccccgccttccatgaccttcgggcctttgcaccacagatctagccgcgcggtcttcccgcctctgccgggccaactatcaagccccgccccccactgcctatcacgccccgccccccactgcccagcccacttctgcagctcacccggccgcgccctccttctccagcttctcaatcatggccttgcgcgcctgggaggctgaggtcttgggcagactctgcgccttcatcagctctttcttcttctcggcctgccgtttctcgagcgccgccaggctgccggcccgtgggctggcctggtcctcgcggtcgaagatgctaggggttggggaggcgcatgttaggcagggagagcagggctgctccccagcctggaccaccactcgcgaggaggagggggggtcttgtagcacactagtatctccactgccacaaacgcctgccagggagggaggcgtcctcatcacacgcattttagaggagtacactgagtctcaaatgacagcaaggttttcaacaggtttccgcctccccctcccccacccacgagtagttctctgagaagcctcattgtaccctcaagttacaggggagttcagcttctgggcactatccgataataaaaatgatgactagcataataatagtaataataataattcatctctgttgatcctttcctgtgtgccattttaaacttcacaagagcagggaggggccttaccaattccactaaaggtgaggaaactgagacctctggcagtaacttgcctaagatttcagaggacgtgatgggcggaactagaacttgaacaaggtctctctgattcagagtctctggacccctttggttctcatcctggattctgatcctgttcctgctttctgccagccccaacagcctctgttacatgggggtaccctcctttctcatggggctaaggtataaaggtgctgtgtgacctgggacatggtttgcagatactgggaagtggcagtgccaccaggcagctcagtgtggtaggtaggcctctgtaagtgttcaatgctattgcagccactcagagatgtgagcccctaagcaactcactggcctccctgagcatccacctctcctgtggtgtggttgagaataaaatgagatcccaaggagagcaggatccttaactctcactttgcccctccctggctatagacctattacctcccagcatcccagtctacccctctgttttatttatttatttatttatttatttatttatttatctatttatttttgagactgagtctcgctctgttgcccagactggagtgcagtggagtgatctcagctcactgcaacctccgcctcccaggttcaagtgattcttgtgcctcggcctccccagtagttgggattacaggtgcctgccaccacgcccggctaatttttgtatttttagtagagatgaggttttaccatgttggccaggctggtcttgaactcctgacctcaagtgatccgcccacctcggcctcccaaagtgctgggattacaggcaagagccactgtgcccagcccacccctctgtaaaacgggtttgcagttaggtcccctgtggcactgactcctctatggtcagggattgggtgctggtgctcacctgcccatcttcttggatgaggaggaagaggagaaggtcttggtttgcatcatggtgctgccactgccatctgcaaaaaaggggaaggggcaccaggtgagggcctgggctggacatcaggagatgggatgggaggctgtatggaggggtggtgatagccgcaggcagagaagagaaagtgacggcacagttgaagacacggagagagagctcaaggaagagccggaggaggtgggcggacaggcaggcaggcacagggcgacaccaggtggccttactctccgagcgcctcacgaaactcgactccactgtggtggtgcgggccgtccgtgtgccatcatctgcaggggcaggggatgagaaggatgtgaaaggcacagggggctgggggaggatgtgttcccaccctgagccctgggccggccccatttggccccttactggagtggacgagccgctcagtcttggtaacagtgctgacagcagagccatcagctgcccgctggctgtgcctcgtggtggtctcagtggctgtgttgccgcgcccctcccctggccggccccgtgcctcctgcagccgccgttcccgctccttgtcccgctggtctgggcaggggatgccccatgcatgcgcaaaagggccaccaacacccacacagcacagatgcacaggtgcatggggcacacaagacggggtggagggtggcttgttagaaacatgaatgacacaggtaacaagggcctctctaggagcagctggggtgaggggacagccataacttgacagggaatggagtgtgggaagggtttgatggactcaggcagaaactagagaatacggagtagctaaactcaaaggggtatggatccaaaaagggtttctataggcatgagtagctaagtcaggaggggtatctagatctagtgagggggtagctgagtccaaggaaggagaagctgagtgaggaagtagctgggtgggccatcagcaggtctttggttggaggagaagagcagctggaggcaggaatatttagatccaggaagggagcaattgatgggatctgagaagcaatctgatccaggggaagagtagctgggagagaagctagtgaagggggttaactgggcttaaaatagaagtaggtgggtagagatagagactggggtggccatcagtgggccctggcagaagcagctagattcagaggagtaattgagagtgtttgagaggagaagcaattgaacccagaatctaagggaatgaatagatgtgtccagggaagaactatctgggggaggaagtagttgtgtccaggaaaagggaagctggatggggcagaggctaagatggccatcaatggacttcagggagagaggagcagcagggagaaggagtatctggattcagggaaggagtcgttgacagtactttgagaggcaactggatccaaggagagagtagctgcgggagggagtatctgggtctaggaaggagaagagaagctggttggggagaataactggggtcaccagcgggagagaaggagctagggaaggagcagctggatccagcagggaatagccaagggaactgctgggtctagagaaggagaagctgggtagggcagttattaagctggggtgtccacaaatggaccccagagtatgaggggagcagctggggaatggggcagctggatctagggtagggcaactggctctctacctctcttcctttgtcggagctcacgaagtgcagcccggatgagcttccgctcttcaaagtccgtgctctgatccagctgcatatagagcccatcattgcctacctggtgcctgctggcctctgccaacccccagcccaccggatctggctataccatcttgtccaagactccttcatcctcaatagtcatcagctcctcagcgctcagagggctccgcccttctggtgctttgttcactcgggtctgctcagccccattggccgcttccactgctgcagcgagaggctctgctggctctgcttccatctgcagggtggggagagggcatggactttaagcaggggtatgggtgaaactcatcatgtctccaatggatagggaagcagatcctagggttgctggcacgccttggaaataaccactagcctgccagcctgcctgcccaaagatggccatgtcagcgtcagtcagggaagaggcactgacagttttgttgtagggcttcccacgtaccccgaattgtattaatacaatggatagtgataataatgatgatttccagtccatagtaagtgttgtataaacactagggactttactgtccctatttaacagaagggaaggccgggcgcagtggctcatgcctgtaatgtcaacagtttgggaggccgaggtgggagggatcacttgttgccagcagtttgagaccaacctgggtaacatagcgagaccgcatctctacaaaaacaaaaataaaaaattagctaggcatggtggtgtgcacctgtagtcccacctactcagaaagctgaggtaggaggattacttgagcccaggagttagaggctgcagagagctatgatcatgcagctgcactccagtctgggcaagagagtaagaccctgttgcaaagaaaacaagaccggaaaaaaaaaaaaaaaaaacagaaggggaaactgaggctcagggcagctaactgacttgcccacagtctctctctaagtgtgatgcagcctgggatctgagctgaaggcagcctaactcctgaaccttagttcattttgctgctttgttcccagccccctcccaggcaggctctgctctgtgctgccagttcccgaggcctaggtcctcctgggccagtgcccaggcagcacatgttgccccccatctgcctgctaccttgccaagagggctggcccggggcctgtaggctcctgaccaggtgtctgactggggctgccctgagccaagacctctatgaagctctcctctgtaccacctccccctgcctcgcccctgctggaaaccatcctctaaggagtctctagccctgcagccctcccagggcatctccctagccccttgaagacaaggccccaagccaactattatggcccttcctctcctggcagggcctctccgtctgctataagggtaaggagagctgaggtggcagctgtttcagggaggcttggtctggccagggtgcagggcggcagggagctgggggctggggcctgggtcatgccaggggctgccaaggcagctgccacacatgcctcagggctggagcctggcaccctcttgccctagtcttagagcactagtgccccagtcccctgtcaagatagataaactgaggctcagagaaggtggtgacatacctaaagtcaagaggaggcagagcctggctcaaaactacccctcccaccaacccagaagcacttacgagactagtgctgcgggtggtgccggtggaggagcggcggcgggtgctgaaggcaggtgggtgggccacgggggtcccggcatcctcggcagcctgaaagagggcctcggggtcggcggcagccaggagcagctcgctgggctccagctcaggctcaaggccggacacaagtgggacccccagccgtaggctcagcacctccacctgcctgctcagtgcatccagccgccggctcagtgctgctctctctgcccgcagctcttcagctgcccgggccaccggctccacggtggctacagctacctcggctgcctgggtcactgccacccggcctgcttcagccaccgcccgcagctcctccagtgcccggcccaactgctcctcaagggctgcggccagctcaggcccaggccctggtacccccggcatggtgctggtggggactctatggggggtaatggtggggcagtggcaggggctgctgtctctggctgagtgtctgagtctttgcagctggtccgagggcaaaggcaagggcagcgggcctgccccgcccctgcctcccagcccgccaccagccagctggagctgcagcccaaatagaaacctattctgggctcctccgtggaaggggcagtgggggagggggggcctgcccaagcaggcggatcgccaggcctggctatagccctacagaaatcataggcctgcagcacagtaagactgcatgggttctgaagatcactgagatcggggccccatgcctcacaggtggggaaactgaggcagggaacagggaatggacctggcctagccaccatgtacattagctgtgagaatcagtctgctggactccacagcctgtactcctttaccctttaccctaactccagctgttttagacagctggaacagatgggggaaatggaggcacagggaggcaggactttgagtgatctgctataaaaagtgtcttggtcttacataaatgccctctggcctgcccatggtgctcacgtccaaccacagactttgagcaagcacattatgggtacatcacctgtcccctttggttccagatgggtaaactgaggcaagttggtggtgtcagacccaggtctcactgtggcacctcccatccacctcaagggcctcagcgggtccccccaccccaccccacacaatcccttgtcagagggcagctggatcctgcttttttggaaaggaagggtgctttatttccctcactctctccctgtctcccctgagaaggcccaaagctggtctagccatctcacctcagccaaagtcccattcagtccctggtttagcacagagggcattacctgggcagccgggtggcccgcttggggatccctttcccggctgagctcccggctagtggatcctgggcttgggaatgaataatggaagggtgctgcgtattcagttcccaaggcacctgctaggctgctgcctcacctgattggcgcccctctgcctgtctgtcccccctcagagcttctgcccaacccccacagggaggttgacgcagatgctaatcactaatctccaatctcctaatgggccaggctgatcttggatgagcagatgagctgctctatacctcggggctgatgtccagtgtgggtgggcgcaggggcactggggctgccacaggaagaggggagcaagcccttaccaccctctctgagcctcagtttccccatctgttcaccaggaatgaaccaaccaatttcgaactaaggatcagagatcagcatccaggaagcttaacgccagtacagagtaagcttccgacacacttagggactgatatgctagggtctggccttagctctgccaccgactggctgtggtctgtgagcagccaccttccctctctgggcctcggtttctctgtgtgtgcagtaggggaggagcagaggaaccctgctagccctacaccctgaagcagtgtatgtgaggctgacggatggtgaggctggtggggtgaggaggggctcaccttgatgctgcagcctcctcggctactggggggggcatggctgaagctggtgacatgagtgacactgcccagccgagccagggtcccagggctgttgacacgggtgatggtgctcttgcccccactactggtgctgagtagggtcgggggcgcccgcagccccagtgtcagttctgagtggggagaaaggtggctgtcaggaggatcaggtggagtgagggcagtgccagacaaggttgataatgccctcgctcccagcacaccctttggagacaccctgagtcctggccgcagcacctgtcctgcatgcagaagtgcggttgcaggcactcatccccattggggaggcagtggggggcgcctacctgccctctggttgcctgtgggcagcagcacccggcctgtggaggcctggccacggccgtccttgatctcgatggtgaatgtggtcttcatactgccccctggctcggcagtgccgacggccacgggcagcggggcaccaggctcctctgaacgtgccacaggcccccctgctctgttttcaaggggcctagcagccaagccccgccccctggggccctcctcctgggggcagcttcgaagctgggccaggggctgggctactcctcgttgctccttgctgaaccgggaggaggtatcactggggccccgagaggaggagccgctggaggaggaggcaggggtggtgctggtgagggaggggcccaggagccttgcgggggtcaggggacttagggcagcctggggtgtgccatcctggagcctagcagccataggagaatcagatgtgaacttgtggacacgatcccgcacagagccagcccgctggaatgaggaaggtccgctggcaaggggggtggactctagaaggaacaggagggctgtcagcaactgggtgggacagggtctgcacagatcctaggcagggtgagaataggtagtacctcggttctgggctggttggcgggggctgagcaccgacagggagcgttggcagggtcggggtccagccacgtctggcaggttggggagggggtgatggccatgtggggaaagagaaaagacaggggatagtgggtgtccacctttcataatcctctcctctacacctccctagcttcccaccctttcctgtactcaacccccaccccacctctccatcccctcctggatctcccacactccggcatccccactcggctgcatctctcctacaggcacctccttctcctgccacactgaccctaggatgacttggacactcctgggggccaggcgaggcttaggctggaggaagggtgcccagatcctttctgcagatggggaggggggacagccctcctggccagtgctgcccacagctccagctgggagatgggtggactcccttattggggagaagaatgtgcctgaggcccgttgcctttcaaggctgcaggggaggcctctagccatgggggtggagggggaggctggcctagctgggggcggggacacttcaggggtggggtgcagtatcagggactgcatggacctgaggaagctagagctgccaggcacaagagcccattttctaggcagggaaagggaggcagggggaggggaagaaagatgcctgtgactacccctgctgggaccctcacctgctctcttggtgtcagaggggcctctggtggggctctgggcagcaggggtctctttggggccagacagaagctgcaagggagaagaacagggcctgagcaaggcctgactcccagacctgctcacttgcctggcatccctgcccctcatccagactcaccttgttgaccacctggccctcagtgctggggagcgttggagactcctgaggctcagggctggtggtcttgggtgggctggggggtggctctgggctgcctggaacctcagctgtaaggcactgggcctcggcaggctccaatggaggctcaggagaggcaggggtgggtgaactgctgggtgaggcaggtgagctggatgtgctcccaggtggggctcgcagcaggagtgtcactgtggtcacatcctggctggtgccttcaggggtgggggttggctttgaaacctctgcctgctgttcctgttcctctcgctctggcacctgtaagggacccacaggatgcaaccaaggctccctaggctttgaacgccacccccaccactgagggccaggctggcaagtgcccagggcagggcatgcaaagcagagtggtggggcatggcttcctgtaggcacacctgcgcaagcactggcactggcatgctaagggcagtctctgatccccacttcccaatctcttggcactacctagccaaaggggttcagagaggaccaggtcctgatgtcagtgggtgggtatggcaggagacctattggggacgggagccttaatagatccctggagtggaggttcctgactcctggcctcagcctggttcatctggagtgggagtggggtcctgccaggaccgtggacccagcggcctctgctggccacttggggaacctgcatggcctgacctctcacccacactctggaaaatagagtgaactgtgagccagctggggtctgacatgcaggccccataagccaaggtaaagatgtgggctgtgtggagggtgaggggcagccctgggacgggttgaagcaggggaggtgccagggccggatttgcatttctgggagatccctctgactgctaaatagaggctggatggcaggggtgggccccttacagtgaaataccagcctagcaaagacactcaggcactctgtgctaccggtatccatgggcacaggacactgggccactctcccaccctccttacctcacactgttccagcctgtgtgccgctagccccttgctgtcctctcttgagccactgttgggacgcccgctgtacaacctcccagccaaggtggcagctggaagggaaggagcaagtggcaggtgagtgacagggaggtgctgtggacagcagacagcagggcaggggtggggccgggacaggccacataccctcaatctcctgagcccgtacacggcggatggcagctcggatcagcttgcgctcctcatactcaccagcgcttcgcaactgtgggtaagagacaggtcgcgggtgttgggctgtggagtccaggtcttcacctgccctgcccccatcccctgccccagcctgggcctcaccagtgcagtcaattcctccacatcgttcatggactccagctgccctgccagccgtgccagggcagcccgctgctcagcttcccgctgctgagagctgcagagacatcatgactgtaaccaccactgccatggccaggtcgtggaggatgtgggctaagggtaggagccagaacagagtacccagaaccttggcagaagggcatgtggctgtgcacaccctctaactgcacactgatacacatatgcccatggacgtgggcactaataccacacactcagacgtgctggctacatcagcacggccgcgacgccacaatcagtacatgctccatgcccacaaacatctctgtttttccagaagcgtgtgtggacgtactgccattagcacatgcaatccacagatacacttgtgctcacgcctgcctgcacacatgagctgagccagggctcacactcaccttctcacccgcatgttccaccccccgctactcactgcagccagttctccttgttgtcctgccgctcggcacggaaacgcttggatgccagggcctcctcctcgcgctccagctcctgccgctgcagttcccggatggctgagcggatgcgccgccgctctgccagatctgctgtgacctccagctgcagtgggtgcgagaggcaggtcattttggctgccaggggcggagggctggcaccagctgcccacggctctgcctagggcacaatgtgtggcctgtgtccactccctgtgtcccaagctcttcacgtgcctgcctgcccacgcagggtcccgggggtagacccagcccactgtttcagggatcttgggtagtccactttgcattgtggttcacagagcacacaactgtgagtggacagccagaaactgcccacttgtgccaggtgccaagccaggcactcctttctacaactcgattcctgcctctcagagcccagatccccaaaagtcagggagctattgtaggaggaggagggaggccaccctgtgggtcactaacagggtccctagagggaaaggtgacagatgaagtccaccctctgagcaagggaggctccctggtctagtcaccaaacaccacagcccagctgggggttgactgcttcatccacagatggggaaactgaggacaggtgctcaggagtcctgcctggctgagggctattgtccccactgcactggcctggacctagccaccatggaagaagccagggtgcagagtgggaggaccaatcccccagacatataaggtggctggcactaggggccaccccagggccttatagagggcatccctgggtgacagctgcttctaccggttctcaacccctcagttcccgggaaattgggggtgactggtctaaccaggttcaggaaagaacaccttctctggagtgagtcagccaatcctgttgcctcccccacacctccaccatgtagagccacctgctacatacagatcctccgtggctcaagggagagaggactggcccagggttcccctggaagatagtggcagagataagcctccagtgtgggtctgataaccagacgggagccagtaaaggcggggtgatttcctctgtccccaccccccaaatcattcaggggtagggccaaagaaccctctatcatctccctttttagcgcccccccgtcattcctttctgcttagcgggaaggccaggtggcaagggtggggatgggatggagatagttttcagcagggagtgtgggctggcccaactcagccatgagccagcttgtcctagtctgaagagagcagggagagtcttgggggaagagccctccaggctccacattcctgaggaattatgagaagaccccctgaaactcaggccagagcccttagttggttccagccctagtccaatcctggctgggtgatcaagagcatatcccttaaactctctgtgtcttggttttttcatttgccagtgggtggggttgggaacagtgacttggcctctcctgtacatagctgcagttgcaataagcatcacccccatacttggttctagccagtcaggaggagggagagagacaagggggcaaatgggaagggcaggataccccgaggcatcagtaacatttatggagagcctgtgagtcaaaccctgtgctgagccccctacttgtcctaagcccacaaaaaccctagatactactgttattcccatttgacagatgaggagattgaagtccagggaggacatgtgatttgctcatggtcaaatgacctgagccaggatttgaacccaggtctctctgactccagggcctgccctaggctgaagatagctctgctactggggtctgtgtgtcatggtggggacctcagggatcctggcactgtgttggagacccctctagcctggactagagatgctctgaggcctaaggaggccttatagcagaggcggggggaatgaggctcactccccagcccccggtgctggctgtgtctcaggcctagagccttctgtggtacatttggaggctgggggctggaggggacagagggtccagccccttctgtacagagggtaaagaggcccagaggggcaagggctagccttttgtctcctaggtccccattctcagtgctctgggctcggagatggggtccttgtctctgacaaaagcctgatgtaggaacttggccacctctacagcacaacccccggagcttcagtgtccccatctggaaaatgggagcctccctctgatcccccaaagtgggtgggcaaggctggagactgacaacctcattccactggtcaccctctggcacgacccttccctttgggcctggaggcaaaggttggaccacagtgtctcctctgtgtgtcccgagttccacccgcccaggccccaccgctgtgtaaggagggagctgtgggagggagggaaggaagtacaaagcgccattgtctaccgagggggaaggggaaggggatggggcggtttccgaaactgcccagtgaaattctcccgggaggaaagagggtgcttcctccccctggggagccggctctccgtgtactctctgccctcgctgttgggaacgcctggcaggccctgaggtctcactgggcctcagtctccccaacagcacaacggagggggctctccaggctttcagtcccagctcccccggttgcccatgggggtcccgccggcggtggagggaagcctcgccagggggcgctgaaggcccgcaggttctgcgaccgccctccctcgcagggcgccgccctcgcctcgcccaccctgcctcgcgctaggcgccgaaggggtagccaggtaggaagacacccgctaccgcctgcttcagtgtccggatctaaagggaagaaaccaaggtccccaggacacccagctgagtggcggaggtcgaactcgaactcgggaccgaggcagagggcgtcccggcgggtggtggaggggcacgcggcgtgcaagtccccaggcgtccccattcctcccatccccggcccaatcctcaagaatgtgcgggagccggggccggaagcgactgcccgcgtccccaaatcggccagacgctggggcgcagggcgggcggagcgggcctagcttttccttatatggcccggccccgcggggaggagcccggctcgggacgcccccgttcttgccacgaggccagcgggggccgggccggcgcgcggggcgcagtaatggcgggcgccgggtgctggaggagccgctcccggggtcggaaagacttcgagaggcaccgatcccgagaccggggcaggttctcatctgtcctttcccagagattcaaccactgctccagcttctctccaaaactcttttccagcgccgcccgagcctcgcttaagagagggaggtggcggctgaagaaccctgagcctgcctgtggataccttgagatgaggatgtgcgggaaccaggcctggcattccctctttttggactgtgctgcctctacgacccccactgggacttggacttcctgagggaaggtcgaactgactggcgggcacctttggaaacctaacctcatcccctccaggctgcacacatcctgcggtgatagtggagaggcagacacccagagagtctaatgcgctggtccgagaacatacaggcagagtgccttggggaggtcatggcagcagctgggcactgcccagtggctgggctacgctggttggttccagcctctgcctgcgggggaaggtatgagagtggggtgggtcacttgtcttctaggtaaagtaaatctttaatttacccccatggacaagggtcagggactgaggagatggagctcctctggcccctcctccaggtcaggctgcctggcctttggggttggggaaggagccctgccccactgggttgccctacggcctctgtgcatggaggtagacagggctctcaggaagaggaacaagaaaggggatggagtgggctcatctttcctccacctgagatctgggtccatgcctcattctgtccccatgccaactctaggacctagagcttgtgtgcaaacacatctccctccctcccttcattttacaggtagaggaactgagactcaagagtagaaaaatgagatgagaagccacagaatccataagggcccacaaaacctgtctctctcttatggcctcgtccagccttgactttcccaggactctggtcccccgtggcccactatggggttgggattttggcacagctccttcttagatgggtgtccttgagcaggtgattttaactctcttgagtcgcagtgcccaggctttcagagctgctgtgattattctgtgacatggtatacccagtacccagcctgccccctgccaggccttggcattattaatcattgctgctaccattatcactgggccagcttccaggggtgggcattgcccgagctattgctctggagaggcatatccagcctccccacacctgtggctgcatacgggcgagtctacagcagttactgtttaaacaggtggtggctgtggagggttgggagggactaggcttcagtaccaggcatggacaggcacatgccacaagggcctctgcatcagccacatggaactggcctacccctgttcccatgtccccctcctcctgacctttcccccatcacttcttcctgtcagctgagaggtaccctggattgaccctgcctctctggcttggctttcctgtccccacagtgggtgatggggccacttaccagcttccgaagggctccctcatccagcccagctaaggcctcgtccgccatctcgctggcccctagctccgtcggttcctttctggtgagatccccagtgcctgtggcacctgtcaccagctcagagaattctgcaggggacagacatgaatcaggcatgctggggcttccagaaaccacaggcacttaggctctgtgccttactttccctctctaacctaggagcgtccattactgtcccatcctataatgtggctcctggctggaagctgccctctgccctagggtggtttgctggaaaactcaccaaacccagggtagggggtctctggttccagccctgccagcttggccgccagtctgctgtgtggcctgggatggactctcatcctgtctaaacctcaaaacagggagggcagggacctggattgagaagccagggcctggcaagacccacccaagctgtgcttaccaccagggggtgcactccagtctccagtttcctgccccacccacccatccacagggcctacccagcccccacccactccgcaggctcagcttctggctgtgggctgaacccgtagttcttgctgccaccaccactgtcattcccccaggtataggaaggtacactgtgtcttccgattcttggagccagctctgctgtccagacctcctgaagccaggtgtccaggcacccagcacctcctgccaattcatacagaattcaattccccacctggaagggctttcagaagctgacctgcccaacccctggatttcaggcaaactgagaagattggagagggccaaggatttgtcactgagcaaggaggaagccaaagacttagagggcagagaaggatgtaatcaaaatcttcgtcatctccggcttccgaagctcccttccaaagtgccctcaagggcctggaacactctcagtgacagaggcaagagccccatcttgccccagtgctgcccatcaaaatggacccctaaatcctggcccagcctcccagcgcagatctctccttcctcctgtagccccaactaatgtctgtctggaatttgaggggccctggtctggcacactgtggatgcttagttaatgtatggtgactgactaatgtgtggccccaggcctgccccccacctcctgttgattcatctttcaatcatcccttccctctcttcagaacagtcacttgggaagtcaccccatacggtgcatgggtggggggtgagggttaccgctccacacagttggggtgtgtgggtcccagcctgttcaagtcactgcttgttccccctcccatcctggtaggctcagaggtgtcaacctcccaatctctgcctgttaggatccttgcctcttacctagttactctgtctgggttaaacctcttcaagactgtccagtggtcaccagccttaggttctgcggacattctgattccccccatgtctgttcttctatggggcagctgaccctaatgcctaatctaggacacccatgggattataagaagatccctgccgctgctcttctccaatctccctgtcacacagtctggggtcgccggacattgtgaggggcctcaggattctgtggcagcttccccagggtttctgccgccacagactagcgcccctgtggggcgtggagtctcttaggaatccgggggcgtcttcccccaacagtctcataactttatcccatggcttagacctctcgtatgggtgggggctcccaggtctggacgttccagaactcctgtctagacatccgggttccacccccggacacgttggggcagcaccaggatcccccccgaggtccgcacacccacctctcagtccagcccacccgtccggcgcaggctcggcttagctctttcgggacccgacagacggattagacacgcgcaggccggaggtgccgcgacccgctgtcccaggcccgctcagcaaccgtcccctggattctgc

SEQ ID NO: 5647 - DNA, 2971 bp, Homo sapiens
gggaaagtgacggcccaaacgccagggaggagccaggacctcgccctgagctagcgggaggtaacggcggggagtcctggggcggagaccgagcgctgggggcgtggtctccagcgggactgggcctctagcgggagtgggggcgggggcgggggcggggccagcctgggggcccagacgtggcgcagcgactcggaggttcgcctccagcttgcgcatcatctgcggccgggtcccgatgagcctcctgttgcctccgctggcgctgctgctgcttctcgcggcgcttgtggccccagccacagccgccactgcctaccggccggactggaaccgtctgagcggcctaacccgcgcccgggtagaggtgagtacgccggcctccagccccggcactatcgttccccaaccctgcggccccatgggagcaccgtccgtcccggccccaagaccacctcgaaccgcgagtctccctgctttccccctggcgccgggaccatccctcctgttccctagccccagatggccccagcatccaccgtggaagcctgagacaccgactttggggcctggaactccgaacccttccccagctccccctacccggtccgacagcggacacccagacacactgacgcagtctcctaactcttctcgtggcctatgactcccaatcctgtcccaacttcccatcccccatcacttcatgttttcctggaattcccccccgacccggttccagggctggaggctccagaaagtctcttttccttctcctggggggaaagaagactttctgggtgcctcctcccatatgcaggatccggggaagggggccaactcggaggggcaaccgagttgggaacttggttgccaacatttactctgcagcagcctcccatcctcccccaaccaggaaattcccgttcggagtccctgtcttgctatgtgactttgaccatcacagcccgcctctgagctttttgtcagctctgtctgacaaaagggtgtagaatggttgggtgccggtggtgcacgcctgtaatcccagcactttgggaggccaaggcaggaggattgcttgagcccaggagttcaagaccagcttgggggacatagtgagaccctgtctctaagaaaagggctgagggtaggatggaggagggctggagtgggtggtcctggggtctagactcctgctggatggtggcatctcctcagggaaggcagggaggagccctcccatcctcccatgtcagggaagcaaccacatggtctgtggggctgggccgcaggtggcaggcagggtgaggtctgcctgtgtagagtagggaccagatggtaggtgtctccaatgggggcccccagggccattctgaggtgtttccttctgctctgcctccactgtgagatttcagggatcaaaggccaagcccaggtctctactgcttaagaggagcagggtgatcatttcccctgggcattgggagtcagtccacagccagtaggatgtacaggccccaaggctggcaggcacactgtgggtctctggccttgctcttttcccctggtgtctctaggcctgagtctccccacctgtatacacagttcccccttctgcccacaagggtccagcatttccttcagaccttgggaactgctgatccggggataactcacagcccgacccaactcagggataaggaagtatggctttggggatgtgactggaataaacgtgaaggactcctgacctatcccattttatccccctccagacctgcgggggatgacagctgaaccgcctaaaggaggtgagtttgaaggaagaggtccctagctctgttccccctgagcctcttggggagtgggcaacatggtcccaatgactggggcggggaggggggaaggatccctaggctgagagtctagcctaggctgagagtctagcctgcacctgacttgctttatgacctcactgggcttcagtgtctcgtctgtacctcgagtagactgaggtcatggtctctgatgctctggttcctccccaggtgaaggctttcgtcacgcaggacattccattctagtatccttctgttctgggggaggggaaatgggatgggcacctgggagaatctccacgtaacttcagaaaggggtggcagatggttttcaactgacaagttgaattgattggtagtggctcccagaggattctgaggtggtctccatgttgggtgggcaagagagattgactagtgatgactgccacagaatggagaggagggccctttacttctttgaaccctaattttctcacgtataagcggagaccctggcccctcccgggcacagagtaagctctgagcaaaggaggcaatgctgttcccatcagtaaggctgcggaaaccaccacctccctctgcccaccaccccgctccttaacaccacctccagtcacaacctggtgatgaaacacctccctggggccgaccctgagctcgtgctgctgggccgccgctacgaggaactagaggtgaggccgtgggaggtgggctgggggcgaggccagaggcgaggcccagcctgctgaccccgcccctcctccgcctcagcgcatcccactcagtgaaatgacccgcgaagagatcaatgcgctagtgcaggagctcggcttctaccgcaaggcggcgcccgacgcgcaggtgccccccgagtacgtgtgggcgcccgcgaagcccccagaggaaacttcggaccacgctgacctgtaggtccgggggcgcggcggagctgggacctacctgcctgagtcctggagacagaatgaagcgctcagcatcccgggaatacttctcttgctgagagccgatgcccgtccccgggccagcagggatggggttggggaggttctcccaaccccactttcttccttccccagctccactaaattccctcctgccttaactga

SEQ ID NO: 5648 - DNA, 17787 bp, Homo sapiens
cagggcagatgattctggaccagatgaagcctgaggagccttccagctctaagatagcaggataggagacttctaagattggagctgcagaagacttgccagcccaccagcacaatgtcaggtagaggcaggggctggacttggaaacggggtttgaagctctcacagaggagccagagggatggaaggtggcttgttttccataaaacaccatccagataagagaggtggagatggtagggaaggcttctggctggctgagaaagttattaaaacttccttctcagctctgctctctagctctcctcctccagctctccaacccgcagatctgcagtcctcaggtggagaaagaggccggaagatgaagtttggtcatgttttgtaatgtgctgctgtttctttcccctcttctccagaaatttgctgatttctaggaggtttctttcactctgctccttccctacccagcacgcttgagatgggccagtccctttaatgctggtgctcttagagggagagggtatttcctgatttgaattttgcctctgcattttctattttttttttatttttttgaggcagagtttcgctcttgttgcccaggctggagcgcaatggcacgatccttgctcactgcaacctccgcttcttgggttcaagctattctcctgcctcccgagtagctgggattacaggcatgtgccaccacgcccagctaattttgtatttttagtagagatgggtttctccatgttggccaggctggtctcaaactcctgacctcaggtgatctgcccacctcggcctcccaaagtactgagattacaggcgtgagccactgcgcctggcctgcctctgcattttcttgattgttctcctggtcctctttggttttaggaagccatacacctgcctgtggccctttctcagccctgactccgagcatatggccccaggagatcttggccaagtacacgcaggtatagcagttagccaggcaccagcctgctgtgctcccacgctgtggtatgaaggggacccagctctgcaggctgcccaggaagaggtggccaactcacacagggttatgagttccccaccagagatggtatcttagccccatgtttcctgtgtgaatcaaccactgtggcactatgctctcagtattatagggacacaactgcataaaacatgtttcttgccttgattttattatctttgacctctgagaagaacaaggaaaatagaaggttgagaaattgctagaagaaggttcagagaaggttgcgtggtaaccagaggcggcttttggaagagtagcctttgatctgagcccgaaggctgggtgggattttagcaggcaaccctgtgggtggcatctttcagacctgaggcccccaactaggggacaggcaactgacttcaacctcatcctgattctagaaggaagagtcagcagagcaaccagagttctactacgatgagtttggtttccgtgtgtacaaggaaggtaaacttgagccccttttgtgtgtcatcttgctgatgttctttggggaggactccgctcccttgactgaattactcggcctgtgatggctgagctctgatgcgtcagggttccagatttaaggacagagtgtatctgagggtgatactctcataagtatgggagacttctgctttttttgagataaattttactgatcctcacctgacagtaaaagcaatcgtgttcactgtagagaagttgaaaaattcaggctggacgtggtggctcacgcctgtaatcccagcactttgggaggctgaggtggatggatcacttgaggccaagagttcaagaccaacctagctaacatggtgaaaccccatctctactaaaaatacaaaatttgccaggtgtgatggtgtgcgactgtaatcccagctactcagaaggctgaggcaggagaatctcttgaacccaggaggtggaggttgcagtgagctgagactgcgccactgcactccagcctaggcaacaagagcaaacctctgtctcaaaaaagaaaaaagcatattttcaatggctgtataatatccttttatagtgaatatacagtatttggataactacttttctataactgagtctctagtccatttctgttgttttctactataaatggaccttttggtcctgagtgggctattgggaagtccatctgccaggccagaactgtggctaggacattttaattgactgcaactaatcaccttcaggtcactcacgtttccaattctgacaaaagttttccttgttcttctgattcgtaggcaggtatttgcaggttaaaggtttgggttgagaaggacacagggaacttgctggtatgatggaagtatctgtgtttggctgggtcagtggagtcagagtgttcactgttacaccttggaactgagactgcttgatgcggacaatgttcagacatttgtttatgcaccaaaatgtacacctaacatttgtgcattttactgtaggtaaagtcattaaagttggtgtctttgaaagctgggctgagggattggcttttgggtgaataaggacgaggctgtctgtggagctcacccaggggttgctgggctgccacaggagagcttgacctcattcattcaacagatatctcatggacccaactgtgggtggtgcagtctccacagctgcatccctgcaggcccccgaacaaaactgaaggtggtctcagctgcatggagttctcattttagtgagggagacaggcagtaaacaagcatgtaatattctggagcaagaagggctggaaaaatacttccagggatagagaagaggggcagtaaatcatatataaaaaggtcctgaagtggccctttcagaccatgtcattggagtggagagagcaagaggaaaatggcagggggtgaggacagagtgggcacggcccagaggaagcagctgagggagcgctggaaagcccttggctttaagtctcagctctgagcagagtgacatgatctgacttgcattttggaagggtcactgtggctgctgaggggaacagcctttgggaggtgagggtagcaacagggaggtcagcaggagggccactgcagtgatctggatgaaggaccatggcttggacaagggccatggtcaggggtggtgagacgtaaaggaatcctgtgggtttgctgatggactgagtgtggggtctgggcgagggaggagccagaggtgactccgaggtttaggctgagcatcgggagaatggaggtgtcatttctggatccgggtagtactatggtaggagtggctttgaggagaaggtgaagagctttgctcctcatggggtacatgttagaggctcacctggagctgtcagaaagccattagctatgggaatctggatatggtgggagagagctggcctagagccatgaagctcagaccctcctgaagacggaggcttggctgcttggagaacacgtagtagagaatgctttttctttcctccttggctctctcttggcagaaggtgatgagcctggctccagtctgctggcgaactcccctctgatggaggatgctccacagaggctgcggtggcaggcccacctggagttcacccataaccacgatgtgggggatctcacctgggacaagattgccgtctccctaccccgctctgagaagctccgctccctggtgctggccggcatcccacatggcatgaggccacaggtaaggtggccacagggacccacagggtgttgagagggtcctggccccatgatcaggtgtcacgagaaagactgagtgcccttgcggctcccttccctcagctgtggatgcggctctctggggccctgcagaagaagaggaactctgagctgtcctaccgcgagattgtgaagaacagctccaacgatgagaccatcgctgccaagcaggtgaggccggtggcactgtgcaggaagagctggaggctgtgtgggctcgcaggagagagggagcctgcctggggttcttagagtgtgcccttgttgtggggtaggggaggatatttgctccttccttggtcctctgcaggccaaagaaagaattgtccaaaaggccatcagtgctgtggaagggcttggagatggggttcccaagcccgggtccacttcaggaacagatggggactctaaatatagactccaggcctcgggccacacgttttcaggtggtctggcatgaagtttcccagctggatttgatgtcccggctccacactggctgggagctgaccctgaagggaggagggtgaccttgatcaggaacacaaggaatccccatttctgggggagaagcccgcctggggtctgcctccctcccagggtgtcacaaggtcttgttattgtgggtgccgatggctgcctgacagatcgagaaggacctgctccgcaccatgcccagcaacgcctgcttcgccagcatgggtagcatcggggtgccccgcctgcgcagggtgctccgggccctggcctggctctacccagagatcggctactgccagggcaccggcatggtgagcacagccccagaaagggcagtggcagccccaggaccccctccaggaccctaacaaggagtggcctcccgctacggggcagtagccccagggcctcctccaggacccctaacaaggagtggcctcccactccggggcgtccccaaggagatcggggcagctgcacgttatgcaagcagaggcgctccccaagggatgtgaaagtgaggcaggccaaggaaagcagcccagggaaggcctgggttccagcatgcgtgccccccaagaggcttttgctaattggtctccctagggtaggggcaccttttctaatctgcacaaagacctgggtagaaggcccttgtccctgtgccctggccaggtggccgcctgcctcctgctgttcctggaggaggaggacgccttctggatgatgtctgccatcatcgaggacctgctccccgcctcctacttcagcaccaccctgctgggtgtccagactgaccagcgggtcctgcgccacctcattgtccagtacctgcctcgcctggacaagctgctccaggagcatgacattggtaaggcgcccctgagccactggctcccattctgcagcttggaggactcaggcgggtggccgagtggggatagggcacagccccccaaccatggtctttgtcgctcttttgttctctggtgttccctgccccctcccctcctttgctcttaagcagggaggaccttgctgcagttccggggagggaggtttccaccacctcctccccagcggctttggctcctgtgtttacagagctgtccctgatcacactgcactggttcctcacggccttcgccagcgtggtggacatcaagctgctcctgcgcatctgggacctgtttttctacgagggctcccgggtgctgttccagctcacgctgggcatgctgcacctcaaggtgctccacggccccacttcaggctgaggagtaggcacccgagatggggggcaggggagcaagagacctccctgggccaggcaagaccagccccctggcccctgacaactgtgccaaggcaaacgggtccctgaggatgggggttggggtcagctcagtgccacgtccctgcaatgacaaccttcttcccccatcctgccctggcatggcccaggaggaagagctgatccagtcagagaactcggcctccatcttcaacacgctatcggatatcccgtcgcagatggaggacgcggagctgcttctgggggtggccatgcggctggccggctccctcaccgatgtggccgtggagactcagcgccgcaagcacctggcctatctcattgcagaccagggccagctcctgggggccggcaccctcaccaacctctctcaggtggcccaggatggggggccgcaccttgacccacagcacacggggaggaggggtcaccttgaagttcagagcgcgggggctgcggaaaacaaaccagcccttcctgctctgccccccagcctggcccagtcagaccacagctgtggggtgatccaggcctcctcaggctttgtgcacctcaggttctgatcctggcacggtttgggaggaaggcagacccagctctgattatctgttttcaattcttggagccagcgtcagaggctatttcagatgagacagtataagccaagggctggtgggttctcttcctcccggggccaggaccaccctgacccactcctcttggtgcaggttgttcgccgcaggacccagcggaggaagtccaccatcactgctctgctcttcggtgagagctctgcgagtgccaggcagtgtgggcatgcgggagtctgtcctcacgctcatgtggacgtggagcttcctcctcgggggcctggagtgggctgtggtcaccatggttctctgggcctcctaggggaggatgacctggaggcactcaaggccaagaacatcaagcagacggaactggtggctgacctccgggaagccatcctgcgcgtggcacgccacttccagtgcacagaccccaaaaactgcagcgtggtgagtcgccagctccctgggctgctaccaaacacggccctaactcctccaacccccttggtgggcctgtgttcactgtggcaggagctgactccagactatagcatggagagccaccagcgggaccacgagaactacgtggcgtgctcacgcagccaccggcgccgagccaaggccctgctggactttgagcggcacgacgacgacgagctgggcttccgcaagaacgacatcatcacagtgcgtgggggcgctggactaccaggtcctcaggctgtggcgggttccccagactccctccaccaagccccaccccaacccctttccctgccaagagcttctcttgtgaagatgtaggggtcttggcctggcctagttgctgaggagtcatatcgggggtgcaggaggcgctggcccagggcacccagctttggttcctgctgtttttcctcctgtgcagatcgtgtctcagaaggacgagcactgctgggtgggggagctcaacggcctgcgaggtggggtccttggtctgctcttgagctgggagagggaggagggggtgggcacagaagacttgggtgaccctggccgccaccaagctgttctcctctatacacctgcctggcttgaggtccctgaagcagctgagccggcttcccactgcctcagcctgcctgcaggctgtgtctgctctgtcctcggccctcgtggttgctccttacagggcctgtttttcccacaggctggtttccagccaagttcgtggaagtcctggatgagcgcagcaaagaggtgaggggggtgggcgggctaggcacggctggcacccttctagccagggcctgcgtgcctagcgagtcctggcctgtagcatggcagagaggacagaggagggtgactggctgcaggcgtcaggcagggctttctcagacccatccctcccatcagtactccatcgcgggggatgactcggtgacggagggggtcacagacctcgtgcgagggaccctctgcccggcccttaaggccctgttcgaacatggactgaagaagccatccctgcttgggggcgcctgccacccctggctgtttatcgaggaggtaagtcagtggctgggcccatgacccccaccctgcaccagccctgctgtgccccctagtacccatcttaggtccttcctgccccacagagaggatgggaagagctggcagcgtggtgacaggtgcccagtcggccccaagggctttgaaccagcatcttcctgtccctgcactcacaccgtgtgctgtccccacaggctgcaggccgggaggtcgagagagactttgcctccgtgtattcccgtctggtgctctgtaagaccttcaggtaactcggcccgggttcttctggtggggtcaccagcagtgggagggcggggcctgacccagccccggcaccccaggagctttggtgtcccctcaggttggatgaagatggcaaagtcctgaccccggaggagctgctctaccgggtaagggggcctcctctgccagaccctagagacctctctggggttagcctgtgggggagcctgagtgacagctgacggtgccgttcccaggctgtgcagtctgtgaacgtgacccacgatgcagtgcatgcacaaatggatgtgaagctccgctcactgatctgcgtggggctcaagtgagtgtggaaaaggggttggaggagagccctggagtggggggacccagcccagcatcagggggggtccttacagggaaccctaaaggacaaagaacctcaggggctcaggtccttccccaaagagggtggtctgggagctgctgagagacaggtcagaggcttccaccgtggctgcagccagaagggcctggagctgcccctgctccccactcctggccatgtccccagtgagcaggtgctgcacctgtggctggaggtgctctgctccagcctgcccaccgtggagaagtggtaccagccctggtccttcctgcgcagcccgggctgggtccagatcaagtgtgagctccggtgaggaccttactgggcttgggggatggaggtggggtgggaagggctagctgggggtgacaagagccttaccaccccttcctcacctctagagtcctctgctgctttgccttcagcctctcccaggactgggagctccctgcgaagagagaggtgggtggtgtgggcctcgtagggcctgcactgatggagctgcccaaaccgttcgcggggtggctaaggtgggaacccgaagtgctggtgtcagcggttaggaactaccccagccatgcccaaggcctgtgaggtgaggggctgccctgtttgcaggcgcagcagcccctgaaggagggcgtccgggacatgctggtgaagcaccacctcttcagctgggatgtggacgggtgaccccctcctccccagcccaacctcgggcctgcgtctgaggtggcccaggaccccaagctgcagagcccagggaagagcagctccagagccctggccggggccgcgggatatcaatatcaggctgccccactccacgttccccagcacatcccaggtggtgggagcagagggtaccctgccccaccagggtccttagggatgctctaggccaaaccacagtttgtaccaaaaaccttgtgaggaggtgggggagccatgtctgtgctcaggaagagggaaggggatgggggtggctagtaggctcctggcctctttggtttataaataaactgtgtctgtctttgagaaagcacctacctgtcttctgtgcagctagggctgcagagctgtattcaggtccaaggttctgcccttccttgagtggtctagaaggcactgcgtggcccctcagatgctgggacacaacagacccgggacccagctgtgctacccaccccttccatggactgaataagatggactaacaggcctgtgtttttgtgtttattttaaaaagttcacacaccttccccatctttgtcccagcactggttttggtgactccacccctactcccctatgagtcagcccagaatgtgaagccagtggccccagggcaggagatggccacccctcagccccaccgcagggtgaagctgggcccgaagctcctcctgtcctagggccacgctggctgcagtgaggcggcggggacggaatgtgagtgggtggagagctcctggcaggaaggccaggtagcacctctgccctcatggcactgataaggagccaggaagcagggcaggtggggcataggccgtggcagggtacctacatgtcaatcacacgtgatgggtgggcctgggtagctgcatgccagactgggcaccagactgtggcacacagctcaagggtaaccttgcatccaggcccttctgtgagagtaggatgggagggagttgcacccatctcctgtccgcccccccccaaaaatatatatgtatgtcgatatataatatagaggtatatacacctgtacataaaattgttgccaccaaccactaaatggttacactacaccaagacactaaaatggcagggagccctgggatcctggggttggcagacacagggaatagggggtagaggcccaggctaatttctcccttcacagcaaagcagggagagaaaggaaggagattcaccccttaacctgtctcagccctgggtcagaagagaagcctcccgcctggccaggcttcacctaccttagccaaattgtagccagacagacagtgccccctgacctcaaaaaaggaggtcaagctgaaatggccctgaccctgaccgtgtgtccaaaaccccagcgtgagagccagggctgcttcttgacagctgctctcctctgccctgcgtggcactgaaccaggagtaagggcttctctgttctagcctcccagggaagggaaaaagcaggggctgtgattgtcaagactcacaaccatgtggagaggccgaatcacgcaggagagccacgcattggagtaccctggctcccagccccttccccaccccgtcttgagccagagagctacaagcaggaatcccagtgcagctgcaaatcatggccatcgaggaagtctgtggagaagaggctgggggctgtggtgctgaggggggctaggctcagcacgggaccacctgacgacagctccagccagtccatgctgtccaggtggccatcagccaggtccaggcccatggtgctgctgggctcaggaacaaagtgcaattccgaggtgtccatgggtgacggggggtggtccaggatggcagtgctgctcagcatctggctatggaggtcgtcaatgagggaaaggggctctggcccgtcatgcccactggtcagcaggggcagccccgtgctgctctccaggaagtcctccaggcgtccagggagggagggtgagcctggaggaggtggggcagcctgggggagctcagcagaaggtgatggctgtgctgccaggggggacccacagactgtcttcggggatggcttctccttccctggcagggatggcggctccttgaaatctgctgaaatttctgccaatcaatcaagagagtaaatggatatcagaagccaagcctgtatatctacatgcaaaagaatgaaggtggaccccccaacgtcacaccatttacaaaaataaaacggatcaaagacttacttaaatgtaagagctaagactataaaactctttaaaaatatttgcaaatcacatatttgataaagaagtgatatccggaatacacagagaacttctaaaactcaacaacaaaaaaccaaacttgactcaagaataggtaaaagaaagatttgaacagacatttttccaaagatgatatacaaatggccaacagcacatgaaaagagctcaatatcactagtcatgagggagaccacagtgagatacacctcaaacccactggagtggctactgtaaaattaaatttttaagaaagtattggtgaggatacagagaaactggagcccttgtgccctgtggtagaaatgcaaaatggtgcagctgctatgaaaaacagtatggaggttcctccaacacttacttacttaaaaatagaattaccatatgatctagcaattccactgctgggcatatacccaaaagaattggaagcagggtctcaggtatttgtacacaggtgttgataagtgcattcacaacagtagaatgtggaagcaacctatgtccatcaatggatgaaggaagtgatactatgcttagtgcaacagcctgtcacaaaagacaattcatgattgcacttagtcaaaatcatagagacagaaagtagaatggcagttgctacaggctggcggaagggccaaatgggaagttactgtttaatggggatagtttcagttttacgagatcaaaagaaagggagatggatggcagtgatggctgtacacattatgaatgtatttaataccactgaaccatacacttaaaaatggttagttacaatgggctgggtgcagtggctcacgtctgtaatcccagcactttgggaggccaagtggggtggattacttgaggtcaggagttcgagaccagccaggctaacatggtgaaaccccgacctctactaaaaatacaaaaattagccgggcacggtggtgcacgcctgtaatcccagctactcaggaggctgaggtaggagaatggcttgaacccgggaggcggaggttgcagtgagccaagattgcaccactgcactccaacactgggaaacagagtgacaccctgtctcaaaaaaaaaaaaaaaaaaaaaaaaaaaggttatgatgggttgggcacagtggctcacacctgtcatgccagcacttgggaggctgggacaggaggattggcttcaagccaggagtttgagagcagcctgggcaacaaggcaagaccccatctttatcaaaaaacaacaacaaaaaaaggtaaattttaggtgtattttaccacaattttttttttttttttgagacttgagtctcactgttgcccaggctgcagtgcagtggggcaatcttggctcactgcaacctccgcctcccgttttcaagcaattctcctgcctcaccctcctgagattacaggcacgtgccaccatgcctggctaattttttcaccatgttggtcaggctggtctcgaactcctgacctcgtgatccgcctgccttggcctcccaaagtgctgggactacaggtgcccgccaccatgcccggataaattttttgtattttttagtaaagacggggtttcaccatgttagccaggatggtctcgatctcctgacctcgtgatttgcctgcctcagcctcccaaagtgctgggattacaggcgtgagctaccacgcccagccgatttatcacaatttttaaaaaatcaaaaaaaatgtgcaaaggacttggccattctccaatagaagatacacaaatggtcaggcagcacatgaaaagatgttccacgtcactaaatgacagaaatgcaaactaagataccacttcacacccattaggatggcttgtatcaaaaaattgaaaataagaagtgctggtgaggaggtgaagaaactggaacccttgtgcattgctagtgtgaatgtaaaacgttacagctgcagtggacacagtttagtgattcctcaaaaagttaaacacagaagttaccatatgaggcggggtgcgttggctcatgcgtgtaatcctatcactttgggaggccgaggcgggcagactgcctgagctcaggagttcaaaaccagcctgggcaacacagtgaaaccccgtctctactaaaaaacacacaaaaaattggccgggcgtggcggcgggtgcctgtagtcccggctactcgagaagctgaggcaggagaattgcttgaaccccagaggcagaggttgcagtgagccaagatcgtgctactgcactccaatctgggcaacagactccgtctccaaggaaaaaaaaagaagaaattaccatatgatccggcaattccaaccctaggtttatgcccagaactgaaagcagggactcaagacagacacttgtacactgacattcacaacatccaaagggtggaaacagcccaggtgtccagccacagatgaatggatgaagagaatgtggtgaatccacactacagggtatgattcagcctttaaaaagagtgaaattctgacacatgctgcaacacagatggaccctgaggacattatgctgagtgaaataagccagacacagaaggacaaactgagtctacttctgtgaggtccccacgacaggcaaatccatagagaaagtgggatggggactgccaagggctggagttggggagaatggggagttactgtctaatgggtacagtttccttatggggtgatgaagttctggagcggataggggtgacagttgcacaacactgtgaatggacctaatacctctgattgtacatttaaaaaatgattagaatggcaaattttattatctcaccacaactaaaaaaagaattatgcaaaaaccaggcctgctccccaaccctgtgggttctggccccccctgtcctggcagaatgcactctttgccctgcagccgctctcaccaggcaaggaggtcgctgcctgcccagctgccaccacctgcccagacctctctcctcaaacacctgcttctggcatcactgccacctcttgggccacttttcagtgtccctttggcggcaggcagcacccacacccaccatctccctttctctgccatcccttagaagctagagttcaaagcctgttcccttttccttcttgaacaatatctctggggtagcacctccttcccttggaacctcctgaagctcacgccaaggcctcgctcctgagcgcccagcccagccgtcctcacagcgggtcccatacctgccgcctcagtgccacctgcactggtgagagatgcgcctcagaccccagggacccagggattctccctagggcttgagaattacagacctcacaggaacaccagtgactgagctcttgtcttaaattgaaataaaattcacacaacatcacatctactctggtagagctgtggttccaggctgagctcccactttgcctgcacccctcagccgctcctcctcctcctgaagccactgagacactcaaagagaagtccacgctcaccacccagcatcggcaccacaggcccagacttcttgcctgctgccgccagtgagctcctccccaggaccatctcggggtcatctgggatcttctactcccagctgggtcccctcacacagacgcgcgctatttcctgcccagcatctgccctacctccttcttcccctctgcaggggaacctcccagagagctctctacggccacccccaccctgctcccaggcctctcatggacttcctgttgtgcccatgatgcctaccttccgtgtccaggcctcggtcctcagctcccttggtcacggctggattccaggacaccgcaccctgccactacttgtcctcccgacccccaaggctgggcttagccccaacctctgctcccccacctcacaccctcggcagcctcccagctccaactgccaatctagatgtgacaacactccaactcctacctccagcccagacctctctcacaaatgccacttgatgtcaactgtccctgtgaaccctccattcggtctcgtgacacaccccatcagggaccgcgcaatgtggtcccacacgtgccccctccccagctcaccccatcaatggccactccaccctggccctttaggccacagcccttgaagtcatccttggctgttccttccctctccccccacttcatccataaagacaccaacctggctctctccaaatggggctgattccagccgctcctctgcccgccactgctgcctgctgggccaaagcccagctctccagtcgccccccaacctggggctccctgcttctgcccttgcacggctactatcgcctgggtcctgcatcagaccaggccttttctgctcaaggctgtgcgatggcttcccacacaatggagccaaagccaccctgccctggtgcccaggaggccacgcatgatctggccatgaaggccttcttcccctttcctcaactccactccaacccgccaggtactcccgaggccgcacagatgcacacagctgcccctgctcacaggagacatcctggaccttccccaccaggctccccagacctctccctctcctccatttttgtcctaaggctcctctcggatcttccatatgatctgcttatttcttatatttgttgtccacctccccaggctgcactgtgagctccacaagggcaaatgtctcttctgttcgttgggaggcgagggccttggggcagtgcttccagctgaaggacggcaccttccctggtcctctcgcccaggccttggagacgggagggctcacagccaccactgcatccacagtgcttgcccaagactggtcacgcacggaagcattcaataaaaacaaaccaacccagggctagagacacctatgaacagagaaggccgtcagggaggcagcaggggacctggggttacctccgctctgaatgagaatgtcaaacaggtcgtccatctgctggcttgaggaaccattttcctgtgggacaaaggaaaaaaaaaaaagagataaaaatcttgaatgggggctcccagcccgaactacgaatgaggcccctccctctgccccagaataagcagccagatccacaggacccatgggcgtgcccggactcctggagcccgtcccctaacaacccactccccaaggcctctctgaccctgaagctgggcttcgcctgccccctattcctccgggtggggctgtaggagcctcagcccagcagcctagggcagctgccaacactagccaggcctagcccgccttcctcacctgctgtttgggctgctggctcatggcttcctcatagccaggtggttccttcttcagcagagaagtgggggtcccaaagaggggctgcagtgggtgctccaggtccatctgggcagagggggcaggcgctggagagccaggctgggacgagggctggacaggagagcagggagaggaccagtggccagggggctgggggtgcagacctgccttgtagggggcggggggcggggatagggccagggcctctcacactctaggagggaagatgggaggcactggcttttagggagctttcatgaaagccactaggtaggaaggaatacaggatggggggccctcaaccctgcagggggtgcctggccccttgaggtttgggagaggtctctgggctgggctggtcaccccctgagatttctgcagcttctttctctgcttggggctgctcagggacccctgtctcctatcctgaggtacctgttcctgtcactgtcttctctacccccaagttctgcaggaccacgaggctacataaagccttagggcagcctcacctgtggcctgggctgagagagggtctgctgagggagctttccgctgctgacaccttggtggggacagctagcctctctgaggagaggaccctgagctggatcctggccagaggaccccacagcctctccccggggcaggctacctctgaccttcactggccactccccacagagcagcactagggcaggcccagcctgggtacgggctgctcaggagtcctgctgctgaggtgccgaaatgttctagtctcaacagccagagaggtggggagctcaccaatggctccgccctacagctagggggtctgaggcaggtcccttaactttcctaagtctcagtacccccctggtgaaggaagattaaatgaagcaaacacaaaatgtccagcacgaggggtcccctggcccaagagggctgtagcgagacgctcttcccaccctcctctgggccctgcccggttcctcccatacccaggtacctgctgggggctcccactggacaggccagggctgtctgcattcttattggtcacggtgaggacaaggtgggtccctgtggagtcggtgatgagggtgggaggtgca

SEQ ID NO: 5649 - DNA, 540 bp, Homo sapiens
aatagagcactgggttccattcccagggccatctagctggtggccatgtgtccgtcatttcacagggtggggttacatggtgtggcagggcaaagttttgggagtccatttggaaactatcagtctctcctaggcttattttctgttgtgtaaggaatgaatgtgttgtaaggattgaatgatgacatgacatgctttttaaaatttctagctcagtctctttaatgtaaaaatatgtaatcatccagctcatagttctgagggaaaccctatatcacatatattttacactgaaggaagacattaaaattccattctcttcacacagaaccaaccaaccaggatggctggcctgttggggaagcaggttctgccatctggttctcagcaggcatgtctggaagcaggagggagcgtctctcccatttgggtaccaaagcctctgtaacagtcaggaatgttctgctgtggcctttatcctaaacttggcttggccagtgtgtgtctggggcaggagcagaggccgggacacagctgagc

SEQ ID NO: 5650 - DNA, 665 bp, Homo sapiens
accggctcgggctcaggctgcaaggcttcctgcttcaccaccacggacgggggccccggggccacagcacaagggtctatgtggttggtggctggggccgccaggctggggttgaatgggtgagcggggcccaggggctgctggctcagctggcagctggagaagctgttctcctgcttcacgggggtgccgaggggggcgggggcgggggcgggctgctgggctcgcttctcctgctccagctgcagcttgagccgctccaccagctgctgcttctgccggagcatgcgcgtcagcgcctcgatctgcttgtctttctcctgcagcatctggtccttgtcgcgcccctctagctccgcccgccccccagggctcaggcaacaggacccggcccgggggccctcctccttcacgaggatctgcagtggcgaggcctgcagggtcagctgcgtcagaggtgatgtcaccatctcaccaaaggtgtccccgggggtggagttttcatcgcccgtgctgagcagtgagcgctccgagggggtgggagacacggggggcgtggagcccgtgctgccaaacttcaccaccccactgctggccaccgtggccaccaccacctcagctggagccaggcctgctgccaccagggctggccccgtgctcagccg

SEQ ID NO: 5651 - DNA, 2272 bp, Homo sapiens
tttttttttttttttgagatggagtctcgctctgttgcccaggctggagtgcagtggcacgatcttggctcactgcaagctctgcctcctgggttcacgccattctcctgcctcagcctcccgagtagctgggactacaggcacctgccaccatgcccggctaaatttttgtatttttagtagagacggggtttcaccgtgttagccaggatggtcttgatctcctgacctcgtgatctgcccgcctcggcctcccaaagtgctgggattataggcatgagccactgtgcctggccacatcttgcttttttttttatgatcagaacaaagggcccactctagttctctacatgtcaatcaatcaagcatgttgaataagggacatagaggatttaacttttgttatcataaatggaacttgcaggcatatatcaagaaccctatgaagaattcctctcccatcattttgataaagaactacatcatttttgatagaattggtgaatgttcctaaactgctgaagctacatgttttttgttttgttttacaaagtcaggtgtttgagagttcttttccactctactactactcatagagcttgttttttctttgggtgtgtgctgatcctgttactgagattaattacatggctctgcagtgtagtttacataaaaatgatgttttccacttgattgctgcagatatcaagagtttgttattttcaaatacccatccaacaagagagatggggaggtttttagttatatatgctatatatatatatataactggaaatgttttatatgttttccgaaaatacaataagcctctcttttattcagtgttcttcctcttttctcccttatgaaaaagaaaagatagcacaaaacttaagacttacctaggaaacccattcatattcccaccatgatgtaattataaccctacaattacttcaggtagctacacaatataccaggtaagaatcaatgcacagtataaagaacttattgttcttttctattctttcagttgaataagggccagttggtatgcagcccatgtatatgtgaatggagtaagataaaccccatgatctccttgcacagaattgcaaatgtcttttgccataccaagggccagactcagaacccttggagtcatgtggcagaatttccctcttacataaaccaatgcttgaaaatgctgcaaatgaccctctaatgatccctgaagatcaaaacaggggtaaatgactccctgcaaaacccaacccatgctgctggctgtgggatttttggtgtaagcctatctatgcactctatcagccagaatttggcatttagctcttagttaaatctagtaaaggacagtctattgtttaaagagaaggtgcatttgttcctcaatcaagcaagagcacctgtgttgtactgctttatatctcatgtatatttatagtaatgaaaagactttttaaattgtacacgtttcagtgcctttcttgtgttatgaaaggcaggtagatattatagccataggtaaaaatccatagttaaattgcacactgaccttaaatctctctgtgtatgcccttgtatcttgcatgttaaaagttggattattgggcatgtgtggcagcctgccctgctacatgctagacaagtgtgctttagtacatagccacaagttcttcattctttaaaatgttttgacagatcatctcataataaaaataattcaggaaaactatggggaaatagttacatttcacaaaagatattttaaactctttgtaaaacttagataatagagcctagcagttactttgtatctaattgatacattttatgttaatttaccaccatacattttattaatcaaaattgtatagcatgtgactcttttggctttcagagttctcaaaaatattattttgttgcatgtactgtatgtttagaggcaaccaattatatactcaatatggttttactgtgccttacacaaagagaaactctatacagaatgtatatcatggggtggggtaacagagtctttactgcactgttaggtgatggcacacagagcatgtcccagaacatttctgtgcttaattacccaaccaaagagatctgaagtatgtatgtcgtactgtaatgggggtttatgcctggacaattaagtgttttatttgttttctgaaatgatgtgaacttatttttctaaacactatgctaaataaactttatatttatacataccttgcattga

SEQ ID NO: 5652 - DNA, 312 bp, Homo sapiens
cattttaaaggaaagaaaatatgtaaattctattgagcaaaattctgtcctgttgaaacttagttctaaaggttttgaatcagttgttacactctgacacatgactgttgtttgcactatattatcatgtcttctttaaaagtaaatatttttggtttctgtaagaagcttgtttaataatgttgtaagccgtggctatagttttatcaagactctgaacacaagatgtaacaatgcaaataaatttatgtagtgagtaaagttgctctctagtctctgaaaagcaaaaaaagtgagaaaataatttcttca

SEQ ID NO: 5653 - DNA, 1524 bp, Homo sapiens
gaagctggcatctgcagggccaaaggcctctggccaaggcacccataccaaaggggacagactggccaaagcagccttatccctatctccttaggaaccacattctagtgggatctgtttggtgatacaggttgggagcatgggtggggaagcctaccccaggcctgattcagtcatgaggatccaggagcaccctccaatggctgttgctaactacagttgccagataaaacttaggtggaatctgagtttcagaaaacaaacaaaaaatgtttttagtatgtctcacctactgcctggggcgtacattacaaatcagtccttatatatttgaaactcaaattacattgggcatcttgtatttttatttttttgagacagagtctcacactgttgcccaggctggagtgcagtggcgcgatctcggctcactgcaacctctgtctcctgggttcaagtgattctcctgcctcagcctcctgggtagctgggattacaggcgcctgccaccatgcccggctaatttttgtatttttagtagagatagggttttgccatgttggctaagctcgtctgctaaccctagagctgacaggaaggcttttgggttgggcggttttacggggaaaatactctgtaacagcgtttttcctttactctcacatcacaacaatcaacgcagaagagttatgaccaaatgtcggggtggggggggggcgtttccccacacaccaagcagctgggtgtcctctaatgcagtctgacactgaaaagtagtgtcagatcccacattggagggctcagtccccaagactgttcccccaacaccagttgtaagtccagacctccagaacttctgaccaactggcttcaagttggggttcccgtgactccctcttcgggttcaattaatttgctgaagttgttcagagggactgaaatttacaaaggtcagagatggtagaggaaagagtatggtaagtgtggtgtgcaagcccatctagtgggagcacagttgaggagggaacaggaggtggaagccaggtgggaaaggaagtctggggccctgttggaaggaccttgaatgctgtgttgttatgatagacagttttcctccatgattcctggctcataactcccatagcccttgttacagtcttttgttgtaatattgagtgtgttaggccacaggaaacagactctctccttctcctgccctcctttcacctgcccccaggcaggactctaatctttcctggactttccaatggttgttcttaagaccattcccagagaggttcccaccctataccccgggggaaggaatgctgacgttataaagctttcataaaaacccaagcggacagggttcagggagctttgggataactgaacacatcgaggttcctggagggtggtgcctgggggagggcttggaagccctgtgcccctcctcccacacctgaattgttttttctttttcccttcatgaaactcttccctgctccttgtatgtgcctccat

SEQ ID NO: 5654 - DNA, 103 bp, Homo sapiens
tttttttttttttttttttttttttttgagacagtgtctcactctgtcgcccaggctggagtgcagaggcacaatctcagctcactgaaatctccgcctccca

SEQ ID NO: 5655 - DNA, 620 bp, Homo sapiens
tggcagaggatatcatttgagctgtcatagcagaggaccacatttaccagggtgcactttggccaaagaatagtaacctttctaaggcttagttcctctggcctgaccaaaccagtcccaggaggcccctgggttccagtcaaggtcatgggagaggcccaccatggatgaggcctgggggagcagggtggaaattaagtgcccaggtatgttatggatagcctgcagccctctccaatccctaccctccaaacccagtgaagggggacatgaaacaggtgaggcagaggagcaaatgcgggtcaagaattccgaactatacttgacttacagtgcagctgtgatgtgcacattggtgtgtgccacgagacagcatagtgtggtggaaagaaaatgggttttgaacagagtgtcctgggtttgaatctctgcttgcccatgtactagagagtagtcgaacctctctgggcctcaatttcccagatgtaaaatgggaatagtagtacttaccttgcacgggtgctgagagaattccatgagacgacacaacccgtgtaaagtgcctggcataggcatatcacattagggcactcagtaaatgtgatgtcttttctacttgc

SEQ ID NO: 5656 - DNA, 2668 bp, Homo sapiens
gggaacctccttggtcattggtagaaagctttagaaaagacttagctttttagggaagaactaaaaaatctccaaaacatactagtcccatgacttcgataactgaaaatgtcctgggtgtaaactaacccaggaatgtggatcatacatgttttttttaaaaaaaatccctgaatcaatattttcctacaacacaccctaaaattcctatttttgtaattaatggttggacagtgatcagccatttaaacataggctttctggaataaccagacactagaatagtttccaaagtgttttgcgtatcaaaatcctatatacttagaagaagaactcaggataagaaaaaatcgctaggtcccaaagggttcatgactatcatcagatgcaactgcgagtggcctacggtcattttttcaaatgagaagactggagagagagaacaacagtaatcacaaaacctctgttgcccttagtccatgacaatgtttaaggaaactttaaaaaattaagccatcttctgaattgttttctacaccaaatctaaaatattaaaatgaaattattaaatatttaaaatggggtatttagtggaaatgcaatcagtagaaaacattgctttttagtgcctgctaaacaagtaaaggagaaagaatgaagagaaaacagcagtccttcctgtgtgacactcgtgtggaaatgacaggcattcacatgtcattgagtgctaactcaaaagctaggtggcaatgctgtccaatgtttagagatcttttgaaatataattttaccaccattcagaggtaagtacttgcttaacagaagtctttaatgttagtgaatgaatgtataaaattataaactatgcattttcaaagagtagcatgtattttgtatcgaatccaagtaaatttttttcatagctacctaccacaactgcaaattattcaaaataaacttggatacatatccttatggggatatgggaagcccatctatattctcctacttgatgtttttaaagattgaaactttattctgaaacatcaggctctaaaaaattccatcattaagatgaataaatgggaaatggtttatttgttacttcgtaagcataaatgggaaatgttggctgttagaaaatgtgcccagttctttaaaggtggatgttctagtaacactggattaacaagcaaacaaaactgcatgaagtgaacgaatatttcattggataaagttagcataggttttatctgctgggtttaattctcaatcccagaaaaaaatattcttcaaggggtatcagttatagtttcaaagaacaaaatatgaaaatattgtccagcaaagcaaatcattgatcttttttcaaaattacttatattttggaaagtctatatagaatatccacaaatttcttcagccctcttgttgatttcatattttcatgaaactttttcccctaataatttgtcttcgctctttaatcagtgctttactacattactcagcctgaaaaaatatcttttccttcatctgacaatgtggaaataaagaactccatttctgtcattctggttctcttcagtgtccattgagaaagtttctcaactgtttgtaaaatacggggggaaaaaaacacgcatttctaaacctggtacttaaggttatactggattgtttgctacctaattagaagttattggggaaggggcattgtgtctttttatatgatttttagccaaatccagatgttctgatacacatttctgaatacctgtctgactgtaaatacagcctgtggaggttcaggttgataaacctttcacctgactgctccacagccatgctccttgccagcttctggcacattgtacatagatttgttgaatgtttaaatgatgttgtttttctaaatgctgacctctaaaacaattttatgaatttcttttgctttccattgtttaggactttgtgtgttcgttttttaaaaaaaaaaatgtttcctaaatatctaacaccaggaaaagtattgttaaatacactggtgctcattgaaacagaaggaaattttcagatcgaagatgtacaatgttaaatgttcataccagttaactgcactttcccaaggggacagctggcatctacttgaaatgggcatcaagagaccaccaaatgtttacagttttctgtggcccgtttaagtgtaaaatgcagaagtggctctgtccccccagagttaaggatttgctacactggtcctctggaagcatttaagtagaagaaaaggcttatagtcagaatcactttagtaatcgtcttctggtccttggacttttctgttctgtaatgcttgtaacaatgaatatggtgttgccaatctagtctgatatcattgttgacctgtacttactttgtggatggttctacctggggttgcactggcacaaacagagccagaacactggactttcaaaagaccattttgacttctacagtgtccacacacatgaatttaaatgcacttgtaactggttaattaccatgaagtaagtctaacttccacttaataaaagtttttgtgtatctgcttctattcggagaccaatttatttaattaaggataactataccaagaaagtctcgctggggcttggggttttaccta

SEQ ID NO: 5657 - DNA, 788 bp, Homo sapiens
ttcactgctgcacctggggtgagactaccattaaggaaggaaatttcctttaaacagaaaaaaacaaaggtgctcatctatttcttctgaattctctctacatccttgacttaagaggaaaaccagcactcaagaaacagctttaaaagagaacagtccccattctagctaccagtcttgctttcccccatcttggcaagccccagtgaatttgccattgaaagattaccctcccctttgccctcatctgcctgagctagaggccaggctgttgttaatgttttttcagttccaaagcccctgatgggacattcttgtttctgtgctactgctttctctctcttaaattaaggtgcaaggggataaatattactataactgggatgtaaggctcagtcagtgtggctattccctcccttcgggggaaatattccatctgtctgaacggttttaggtgatcatgaggagagcggcttagtcacacagccagccacgctcatcacaaaagatttgttcagactcactgtaaagaatgacaaggcagatagctaatcctttcactgtgcctcaaagcccgccgtgcaagtcaccaaccctaccggtcctctccacgtgcgaggctaatagagtgatcagaaccaggaatgtgagctgggttccaccttaggaggggacaatgaggacagagcaagagggctccatgtttaattactccaggctctgacttctgcccacaattacagagcatgaaagcagaattggcctttagtaagtgaaaaggaagtggc

SEQ ID NO: 5658 - DNA, 365 bp, Homo sapiens
gactttgttctagtatatgaggatgaaagcagaaaagagaccaataaaaagggtacaaatgaaaaacaaagggtaagtttttatgctattttcctttctttttatttcttatattgtaacatgaaaaaactgctattttgtataagtaataaagtgaaactgatgttgaaatatcatacacaaaacagtttcatattttctctgctcatgttttctcaaagcatattaacaaaacgttttttaaatatgaatcagaaacttcctcaggctcttaacctcatttggtttcacagctgaaagcagactttctttcaaggaattggactttctattgtacagaagagatttaccttaagcatgcctgg

SEQ ID NO: 5659 - DNA, 365 bp, Homo sapiens; identical to SEQ ID NO: 5658

SEQ ID NO: 5660 - DNA, 864 bp, Homo sapiens
ctcctttccaaaaaaaaaaaaaagcccagagttcaaggtgcaagtgcccaatgattaagcctttaaatagcccccggcaccccagcttggagcaaaagtgagactgtctctaaaaaaagaaaaagtatatatatagtcttcttctgttttgttttgtttgtttaattcaaagttacatcacagttgtcctcgactacagaaacagatccagctacaatgtttaattcttctccattacttaaattaaatgctgccaccattgagtatggcattgtataatcatattccttcagcggttaaaatagaaaaaaaaatgcagatagagatgtgtataattggcatgcatagaaatacagaaccagttacatgacaaaagtaaacaaaactctaaaccttcatattttaaaaacaagattttccatttaacaagaattacattcattaaactggagagtatctcctatagagaaaacttttagagtcagatccaaacattactatattcatacttggaagcactttgacaactcaaggctgaaaaccccacactgtgcttgttgtcagtccactgttttcctgcctagtagactccaaaagtgaatattctaccactttgtgcaggtgatgctgaatgctgtgtccactgaactggggccgcccagggtcaccaatcagtactcgagttctataggtccagaagcacttcttcagccactgatgaagactatctgcaaggtcttcatcataaaacatatcgccaagaacaacaaggtaccacttatcttgttccaaattcaaaatgttttggattaaaataggaaaaggattcagtctgttcaattcacaatttagtgtaatagccat

SEQ ID NO: 5661 - DNA, 675 bp, Homo sapiens
tgagactccatctcaaaaaaaaaaaaaagcccagagttcaaggctgcagtgcccaatgattaagcctctgaatagccactgcattccagcctgggagcaaagtgagactgtctctaaaaaaagaaaaaatatatatatagtcttcttctgttttgttttgtttgtttaattcaaagttacatcacagttgtcctcgactacagaaacagatccagctacaatgtttaattcttctccattacttaaattaaatgctgccaccattgagtatggcattgtataatcatattccttcagcggttaaaatagaaaaaaaaatgcagatagagatgtgtataattggcatgcatagaaatacagaaccagttacatgacaaaagtaaacaaaactctaaaccttcatattttaaaaacaagattttccatttaacaagaattacattcattaaactggagagtatctcctatagagaaaacttttagagtcagatccaaacattactatattcatacttggaagcactttgacaactcaaggctgaaaaccccacactgtgcttgttgtcagtccactgttttcctgcctagtagactccaaaagtgaatattctaccactttgtgcaggtgatgctgaatgctgtgtccactgaactggggccgcccagggtcaccaa

SEQ ID NO: 5662 - DNA, 413 bp, Homo sapiens
taccttagtttacttgtttatttatgcaatacatcatgtctagctatcaacaaaaaattacaaggcatgctaaaagacaaaaaaacagtctgaaaagaaaacaagcatcagaaccagactcagttatggcagacattttagaattaccagatcataaatttaaaataactgattaacatgcaaagggctctaatgcgaaaagcatacaacacgcaagaatgatgggtgacgtaagcagagatagaagctataagaaaaaatcaaaaggaagtgatagaagtaaaaaacatcgtcaggctggcgtggtggctcacacctgtaatcctagcactttgggaggccaaggcgggtggatcacctgaggtcaggagtttgagaccggcctggccaacatggcaaaaccccgtctctac

SEQ ID NO: 5663 - DNA, 354 bp, Homo sapiens
gctttaggacagaatgttttcccagaaatctgaaatctagaaatgatttagagtggcattacacaccaatatgttacaacttattttcttcataacaatgaaatagatgatcactactatctgctttaaagtttcactttgaaatattcatattcagttcacagactgtgctgccatgtgtgttcctgtgaaatatagtacgatatacatcttaggtaccctcaagtatttctagacctgaatttaaaattttaaactcactataagctgcagacaactttcttaaaaacctcacatagcagcattgggcactgtattcaaatgatatgtctctaagttaaatagacaaatatt

SEQ ID NO: 5664 - DNA, 9440 bp, Homo sapiens
ttttttttttgtagagacggtgttttgccatgttgcccaggctggtcttggactcctgagctcaggtgatctgcctgtcttagcctcccaaagtgctgggattataggcatgagccaccacgcctggtctgtatgtgctttttaaaaagcctatcccatactgaattgtgggaacctatgaagtgtctcttaatgtcaattaaaagtaacagtggctgcagatattgatttctgaaagtacatgagaatttgtctctaactatggttgaaacaacaaaaccaaatctgaatcaggtagaggtctaccagacacaaactctgaaattaaacactaataggactgttactgggcaggggggactcctttgagtaaaaaggtaacatacagttttcctaggtggctggtgctctcccccaactttcatactggaacaagagttaggctcaggtttacatgatcctctactattcttttgtgaagaatgacaactgagtcagttggttgagcttgaagtgttccagtcctaagggattcactctcacttaatgtcatatattggtaaggtgcctacatgaggtcagtgtttgtggctacatataaagaccaatgatgaaatgaggaattatttttttttcttttaataagggatggggtcttgttatgttgcccatgctggactcaaactcccagactcaaattcctgggcttaagctattctcctgcatcagcctcccaaatagctgggactacaggtgcatgccaccacacccagctagaggcaatgattcttaaagtctccgctggctatctaggactcttattaaatatcctgttactttaaaaaggccatccaaatatattttcttgaaagaaacatttatttatgatctttattggtgaaataatttcaaacaaatccagaacaggttctcacactttgagcctttagtgcaaaaacattatgccatgcgggaaataaaatgcttatccagtggagcgctcccctgatgcattgaaatattaggatactcaagcagaagacgacttatgtgacagaaatctgctcataaatctgcttgaaaaagggcatgataaacctcatattaaggtttctcacaacataaatatgcttaagcaacttaattccaacttaatttcaaaacaccccaggaatcaactatccctttaaataaaaaaaataatcaatttatattcttcttaaaagaactccaacaatttaaaataagttccaattccatatatatatatatatatatatatatatatatatatatatatatatatacacacacacgcacacacacacatttataacttaggtgctcttttgcgctatatactttaattcatgcaaaagtgatagaggactggacttgaggctctacagaggcctttctgagaaagctgtgtagctccttactctggcgaagaacaagggggtgtacatcttgtcaatctcaaaagcactgactgcagtctcaccagttgatctgtaaaaaaaaagcacaaaattactagtatgaggaaatttcaattcatttaaaatccttgtgtgtttggggaaggttattctatgctttagccttttttatttttaattcatcttaggaaattctatataatataggcatattgtagaaaactcgaaaaatttagaaatgtatacagaaacatcaccacaattccaacactcagagccatatgaaggatattttctagtgtttcttgagatcaaacttagtaattctttttatttcatttaattatttgtattttcccacatcattatttttcagaaaccatttttagtggcaggatgatatttcactgtctgcttgtaccacagtttacttaattggagatttaggttgtgtctactatttctcaattaaaaattatgtgattttgatgtccttcagagattcctaagatagaatttttaagtcagaagctatagacattaggttcttcttaaaatgtttcagaaataactatattcctagaatataatttgattatttaataattgcatgatcaacagcataattataggcaggggggagggaaagtaggtggtaagttatgctaccactgagagagacaaacgaaagcagagaattcaagtgattttataaatattacaaggaagtcaatgtgataattagcagctacaaataatgcctctggtaatgtccttttttctcctaaataaacaatgtttttctaatgggtcaagtataaactataaccatccattgttcatttgcttggctctacttcagggtttggtttctttttttctttttgatacaaggtcttgctctatcaccgaggctggagtgcagtggtgtgatcatagctcaccgcagccttgaactcctgggctcaaatgatattcccacctcaacctccaaattagctgggacttcaagatgcataccaccatgcccggcaaatatttttattttttgtagagatggggtcacccagttttgcccaggctggtctcaaactcttggcctcaagtgatcctcttgccttggccccccaaagtcctgggattataggcataagcctccacacctgctcaggtttctttctttgaaaagtagaaaaaaaaaatcccacagcattagagagagaagcaaaaaggagatatagtagaatttgtaggcaaagatgagaaagaaaaacgttctgttgtcaggaccttccaaatgagcagggaaaagttatcggtaaagtggaaatgtgacacagttttcaacaatgtggttaaggttgcaaagaggcaatggaagctgacctcaaaacttctctctcggaattttagattcaagcagaacgaagagccttcagtcatgtaccaatattctttcaaattgaacaagagctaaccttaattgccacaggacttgatatttcacttccctggttcctttttaagttttatatatttctgtatggctcctttctcatacctcccctcttcagttcactgattatgatgtacaggtaaatgctactgcatagaacaaagagttttaaataggaatcacctaacaaatttggctttggaatacctcttatttttttagtagacttactttcctaactacaattttattaaatcagtgtataatccctgaggataaaacaaatggaaataaagcaaaaaatggtaactgtgggaaaagaaaaatgatctggtattttaaaatggctttaagtcatacatggacagctcacagctgactaagtaccattcttcccatggaatgctactttcatttccaaagtggtggtggtaccaattcacattccaatgggtactatatgagtgttccagatgctctgcttcctcaagcatgcttagtctttttcgtttgggccattttcttggtttgtagtagtttgtagtagtactggttttagtttgtaatgtagtgttaactctgagaaattagaaacatatctgaaattcttaagctggatacgaagtatacatttatagtgtaaccttgttatttttattgcattcacctacttgtaagtaatgtgacaagaatgatgtatccagatgagtttgttgaacctctggtgaccactggaacatagctgtagccccacatgaaaactctgatctgcttcttgtacagggacacgacgaaaatatctgtatttatagtcaagtggtttctgcaaaagaaaagatgcataagttataatgaaaccttacctcacttctatgtttacagaaatagtatgcaacagtgacactaaaagtaacataatatttgcatgcagtaaagagtcgttttgactatcacaagaatgtatgagtgctttaaaaactgttaaatactctaaaaatatcagatttttttccccatcatcatcatctcagttaatcatcataataacctcatgtgttaaatatgattgcattatttctatttactagcttaaaaaatgaagatccagggaggtaaaactactatgtaaccaacattacatagatgggatgtaaaattattatctcctatctctaagcctagtatttccttctactggaaaacacttggacattttttaagagggaaagtgataaattggtgaaggatgctgaaaaagcacagagtataacttatcttttgcaataacagtaaaataaatgagcaaacagctgtgacaaggttcattagaattacacttctgcaaatactgctgctaaaaacaaaaaaatgtaaacactatgaatatttcatcatattctgaagagaaaattgacattctacatgggagttcctaaactcttttaattagataaaacctgagcaactaaggccttccaaattcccaattttgacctcaggaaacctgcagtcacagtcaaagcaactctctctgtctctcaggctgctgctgcccaggctccaggagcccatcagagggaagtggagacgccagcaacaggtggccacaaggtgataggactcgcagatgaaactctgccctgtctggacatatgatgttagagaagggggaatttcatacaagagaaatatccttcaaaagctgtattaattataaaggcaacaagtaaatattaatatttattccaaataccatacaactggcttcttgggtacatataacaatttttaaccaggattgaaaacgtgcatatggagaaaggtgaaaaaattaggctaccaatctgttaggacaatttaaagcactctagaatgtaataatgtcagtaatcatatttgcttggcatttttttccttttttaagaacaggaagaagaaaattatctgaagttaggttatttccagtagaaactgaagttctaacaatatccttatggaaagaattatctatatgagctaatttaggaaaaaaaatcccctgtgattcgacatgagcagagccaaaaacatattcaggtataattttactagttatttcacaagagatttcagctttacattttcatatataaaaaacaaactatctggtaaaaaacaaaaaagctgatccaataaaaaataacaacattttagaaaactctccagctttcttcagtgattgctagaagttaatatacattttatataacagtataaataatcagaaagggttttttttgttgttgttctaatcgagactgcttggatgaataggctattaagataagaaaactattaattacacctcgtatactcacttcttcttttttcttagttattacagcaaatactttggtctgattgtctgtgtcttgtgacaagcgatagtgacccagtagaattgcatcagtccttaaaaaaaaaaaacaaattgaatctaaatcagttattaagtggatttaagtaatctaagaagtaacaaattacaacagtgtttactcttgcttgaaaagaatcagctaggattgagtaaaactcaattccaaggctccaaagacctgctgaagtagattttctaaggaaaagcccagaaattggtatttttcctaagaccctgaatgattgcttttaaaatcatccagtattaagtgaaagaagcactggattactttaacctgcaaggaaccatataaaacatagactggatggaaagccatttaaaaaacaaatgctacctggtattcctagttcttaaacgtggaacaatggactgaggctcttcaggggttgtcaacatcatcacatggccatcaggaaagaatcttatgtacctatgtaataagaaaaggaagaccaaaacacaccccccacacaaagtataaaatatgtccttatctattagtacctatgcctattcatagctatgaaaccaacactgaaataccacgggctaaagaactgctaaaacattaaaacaaatattactgactacctgttagtccagcaacaaagaaccaaagatattttatcttcctcaggggaaactgttgaacttttaagttttactcactgaataaaagtcaaatattgttttattaaagttctgtgtttttcccaaagcaacaatttcaaacaaagtgagagccacacacaacggttaacatgtctatttttttctaaatgacaataatatttggcaagcaataaggtggaataaaagcacaagctatttgaaaaggcaagtaaatacacccagggcaaaagacaagaagaaatctaaaagaggccagaagaaattctgtaatttatattagcctatttttttttttagtgcaattcctacattgagtactagataaaaatactgagggccattttgcgggtcaatcaaaagcaacaaagaacagatgtccatttaactaatacatggagagagagaattttccactcactcagtgtactacagttgtacctgtaatattccacttggtgccaggctctatagaaaccatcaagagactgttccccttgacgaatatatgtggttttactgatatacacgcctatgaaaataattttaaaaagttaaaaattataatattcagatattcccagcattatatttactgtggtttcctttaaacatgcttacagtactcacattcatcacagaaaatttaaacggcgtatttataaaaatcagcattatagatcagtatttctgctgagttctacagaatccaacttaccatcaaaccgaacacgaggccgttctaaaaacatctctctccaggacgtgtacggaacaagtttaatacagcttctgccccaaactttcaagcaggccagacgccatatttcagggtctctagggaataaaagcacaatgtcaataaaaactaagtccctatacatagacataaatatttttgctatcagccatcttttatttagcaagtatttgttgaacacctgggaggcactgttctgaggagaaactaatggacaaggcaaaggccctgctcttttactgtgggaaagcaaattgagaggaaagcttctggtagtacgcttagtgcaaaaatcaaccaacagacaaagtagagtcagcagacagaaatgatggtggtgaggaaatagggaggccaggaaatgcctctctgggaaggtgatcatagtgatggggataagtatctcaggcagcaaccagagcatgtgcaaggccctcaggcagaagtgtgactggtgggctcatccaagagccagcaggagcacacagctgtggcaaagtgggcattgtgcagaggaaactatgatgaggcagtcggggcaggtgaggtggcatcttgtaggaaggagtggttatttacatgagatggatgccactggagggttttgaacataatttatgcttttattttaaaagatcactctggtggtttatggagaatatggtctagtggtataagagtggaaacaggaagaccaggtaggatgccactatgtaacccaaaccaaacagaacagtggctgagtcagaagggttgttgcagaagtggtaaaatggtcagactggagataaattttgaagggagcaccaacaggactttgtttaaaaaattagtgcaggggctgggcatggtggctcacgcctgtaatcccagcactttgggaggccaaggcaggcagatcacgaggtcaggaggtcgagaccagcctggccaacatagtgaaaccctgtctctactaaaaatacaaaaattagctgtgcatggtggtgggtgcctatagtcccagctactcaggaggccgaggcaggagaattgcttgaacctgggagacggaggttgcggcgagccaagactgtgccactgcactccagcctaggggacagggcgagactccgtctcaaaaaaaaaaaagtgtgcaaaaagctaagtaaaagatgtactaaaaattgacatgattctgctataactaaaagtatttctaactccatctctaacttaaaatattcagggtttgtttttcttaaagtgatgaggtctcactatgttgtccacgctggagtgcagagactattcacaggtatgatcccactactgatcagcatgggagttttgacctgctccatttctaacctgggctagttcacccctccctgggtaacctggtggctcccagctccttggagtttactacactgatgctgaacttaatgtggacacccagtcagcatagtgcactagagcccagaactcctaggctcaaataatcttcctgccttaaccttttgaacagctaggactacaggcatgtgcaccaccacacccagctaagtattcagttttaaagatgtaaaaactagcctgggcaatatagcaagaccctgtctcttaaaaaaattttttttaattaactaggcaaaaatacaaaatgaaaaaaaaaattaaccaggcatggtgacacatgcctgtagttccagttactcaggaggctgaggcaagagggtggcttgaggccaggagtttgaggctgcagtgagccatgatggtgtcagtgcactccagcctgggcgacagaacaagaccttgtcttgttcattcattcataaataagtaaatgaagcaaaaactatttagatcggtgtcagattgaaaaagataagtcccctcaaacttatgttaaaatgtatatttaaaatgtttgcttttaaagttacttttatgatgacacatgaagttttattcctgaatatttgcttaaccaattctttctttctttgtttttgtttttaagctaggcaaattaagcagtgggagtggggaaggaacaaagaaatctgtaactggttgtgatcaattagatgtaaacgaccactgcactcagaccagcccaattccttctttatagtattttctcacatacaattacaagttaatggaataactatgaaagttgtcaaaatcaaaattaaatcatgaatgtgaagaaaatcctgacagagctgggaaaggccatgaaaataaggttctcatgcttgtatgcctgataacaaaaaagactacaaaaaacacaaccctgcacaaaggccattaaaccttatacaaaaaatacttctacaaggacatctgcccagcaaactgcctgtgcaaacttgaactggcattacccttgttaatgatctttgtagccaaggataattatttccaaaacaattatgtaatcctcattttttcctttaaaaacctgcctgcctttacctccctgaataagcacatggtttactatggcatgtgtattcccattgtgatgctctaatcccaaataacttttgggcatttgttatttaggttgaaatacagaagtgtcagaagcgggatctgaaaagatcattaactgaaggaatcagagattcttggaaccagtgtgcagtacttacttgagtgctctgagcactctacttccacggcttgccttttctgccctggtgaatcttcttt

SEQ ID NO: 5665 - DNA, 542 bp, Homo sapiens
gaaaatcttccataagcaaaaataaagattctgaatggtgggcagaagatggctaattaaaaaccactagggctggccgggcacggtggctcacgtctgtaatcccagcactttgggaggccgaggcaggcggatcacgaggtcaggagatcgagaccatcctggctaacatggtgaaaccccatctctactaaaaaatacaaaaaattagccgggcctggtggcgggcgcctgtagtcccagctactggggaggctgaggcaggagaatggtgtgaacccgggaggcagagcttgcagtgagccaagatggcaccactgcacctgcagcctgggcggcagagcgacactccgcctggaaaaaaaaaaacaaaaacaaacaaaaaaaaaccccactagggctacagaggctgaggcaggagaatggtgtgaacccagaggcggagcttgcagtgagccgagattgcgccactgcactccagcctgggcgacagagcgagactctgtctcaaaaaaaaaaaaacaaagaaagaaagaaaaaaa

SEQ ID NO: 5666 - DNA, 1427 bp, Homo sapiens
ggtaatttacattttattctgtctgctcatctattttccagtttttctacagtgtatacattatttaccaaatgtatattttaagatattttaaaatgttcactctttgattcagtcattctacttcttagaaacatcttaaagtaataatacaagaagtatgcaaagatttagccacaggaatgtttattccaaaaacgtttacactaccattaaattagaaaaccaaaatgcgtaaagaggagtataaagttggactctaaagtcattaaaaatatttaacaaaatgcttacagggcattcttatgtggggagagaaagcttacaaagcattctgtacaatataatcccatttttatagatgcacagaataatcaaaagataaataccataggttgagagtggttagtagagggcctgggattgaggattcaaggctaatgctttcccctgggggctgggggtgtaactgaagtctacactcccagcccccatgggccccaagcaccctcacctggccctctgctaaggggtaggaagggggctgggaggaaaatgcaagacaggaggaggcaattaaacatgatggtgctcaggccagattccctctgaggatatcttctgaacacagttccagcacgatctgaaatgtaatttctgtaaaatgctttcattgtttttaaaaagttaatccagatactgctgtcagcttttcatagtattggtttctgtaatgtcctaatagagcaaaggaaggacactcctgaagttaaaaagtttctacggcaggatttgcaaagaccagaagaaaaaggttacatagcaaaaattttcttctggttatctttgggtgtttttttaaattttattttatctgtatattctaattttctcacaacaaatatatattgcttttgcattttacaaatatacagaaaatgtaatctggaaaaaagttactttttccagttctaagttaaataagtgaaagtcactttactgcttacaaagaaatctttaaatttgaacttggtatccaccatctgcaacagatcattcaatctagggatgttgcagaacaacagggactcctcaaatctcactttccttaggaatatatttttctagctatatttgactatgtcctaatcatgttctatttatttgtatatcagaaataacagtcatatcatgaagagctaccttatcttaggcaagttgcttttctccttcctttccaacttgaaaaacacacttctcagattgctacaaaaggccaacctctcttttttttcttttttgagacagggtctcgctttctcacccaggctggagcacagtggtgcaatcttggctcactgtagcctcagcctcctggctaagtgatcctcctgccttagcctcccaactagctgggaccacaggtg

SEQ ID NO: 5667 - DNA, 2512 bp, Homo sapiens
ctccctccctttcttcctttcctcttcctccttctcttcctgcttctttttctcctccatctcttcatttttagaagaaacaagtggctgcaaggaggaaggtaagtgcttggggtcgtaccattcctcatctataagacagtgtgtcccttctgtctgggctatgataaagccttagaagagaagatttcaggtaatcaaggccctgcaggggctttggtacctgagaggctgccttcctgaagggcatccaaagtctgcaagccactgcccctttcacactgctcatgggcatcgaggagacccaacatactgagatgtgagtgggagacatttctatcccagctgctgcttctgtggactgtgagtcctctcttcccgacatggaaattaccaagctaagtcctgggtgataggactgagggccggaaaaccagaaaatagcagcaagccaccaagtgatccagatggtggagatgagcgttttaaagtaggcagagccgggcatggtggcagcacctgtggtcccagctacccgggaggctgaggcaggaggattatttgagctggggaggtggaggctgcagtgagccgtgattgtgccaccgcatccggcctgggtaactgagcaagtctcaaaaaaaaaaaaaaaagccagaacaacactaatggttggttcttttgaaaagcgtaatacaaatttaatcctctagcattactgacaagaaaaaatagaggagaaacaaactgccaatatttggaaggaagaagagagtatcatagcagatcttgcaggtaacaaaataacaataaggtgatcattggagaaactttatgccaataaaattgaaagtttagataaaacggacaaaatcccaaaaaaacacaaattaccaaaaacaaatgaaatgatataaaaaatctgggctgggcgcggtggctcacatctgtaatcccagcattctgggaggccgaggcaggcggatcacaaggtcaggagattgagaccatcccacccaacatgatgaaaccccgtctggtgaaaccccgtctctactaaaaatacaaaaaaattagccaggcgtggtggcgggtgcctgtagtcccagctactcgggaggctgaggcaggagaatcacttgaacctgggaggcggaagctgcagtgagctgagatcgtgccactgtactccagactggcaacagagcaagactccatctcaaaaaaaaaaaaaaaatctgaataatcctctatctattaaagaaatgccacctgtaattaaatagccttaccacacacaaaaaagtctttcaggatcaagttagctttaatagtgaattaaaaggaagaaatcacattgatcttacaggaaatcttccagaaaattaaaaacagtcatttcccaactcggttttaggacagaataaccttgataaaagatctgacaaatacgacaaaggaaaatttcaggccaatcttcctcataaatatagatggaaaatcctagactaaatattagcaagtgcaatttggcaatacatgttaaacaatcatgactaaattcactttattccagcaatgcgacaatggtttaataggtaaaaacaaatatatggtattcccaccttattaacataaaagaaaacaagcacattatcatttcagtagatacagaaaaagaatatggtaagattttacagcttacattattttttttttgagacacggtctagctttgttgcccaggctggagtgcagtggtatgatcacggctcaccacagccctaaactcctaggctcaagtgatcctcccctctacagcctctgagtagctgggaccacaggcacgagacaccacacccagctaatttattaaattttttgtagagtttgggtctccctatgttgcccaggctggtctcaaattcctgggcccaagtgagcctcccgcctcagattcccaaagtgctggaattacagacataagccaccatgcccagccttgttcatgattaaaaaaaaaaaaaatctcagctagctaggagtagagagaacagcttaatataataaggaatagccaccaaaaacttacaaagaacaagctgtttaaggtaaaacacagttgtccctcagtatcctcaggggttgggtccaggacctccccgcagatagcaaaattccttgatgttcaagtccgtgatataaatagcataatgcttgcatttaacctatgaacagcctcctgcacactttaaatcatctctagattacttataatacaatgtaaatgctccttagttattgtactgttatatttttgtattgtttttattgttgtattgctatttttattgggattttaaaaagtatttttgaccagtttttggctgggtcctcagatgcagagtccagcgacacagagggctgagggtgtagaacatgttccctctgagatcacagatgagacgttcttgctatcaccacttgcatttcacattggactgaacgttct

SEQ ID NO: 5668 - DNA, 2512 bp, Homo sapiens; identical to SEQ ID NO: 5667

SEQ ID NO: 5669 - DNA, 391 bp, Homo sapiens
cttgaacctgggaagcagtggttgcagtgagccgagatcatgccattgcactccagcctgggtgacaagagcaaaactctgtctcaaaaaaaaaaagtttttaaagggcgatcagggaacatgacatgtgagcaaaggcttgaagaagaagggcaggtgagccagagataactgggggaaaggcattccaggaagagagaacagtatatgcaaaggccctgaggcagctgagtccctgggatccagggacacagggagactaactttattctcttctctcctcattcgaggcacctggaagcactatttagagtttggtctccacccacttcataattcacctgatggtttcttttcttttcctttcttttctcctcctcttcctcttcct

SEQ ID NO: 5670 - DNA, 391 bp, Homo sapiens; identical to SEQ ID NO: 5669

SEQ ID NO: 5671 - DNA, 112 bp, Homo sapiens
gcctgccctgtgtgctgtgggtatgggtgggtggggatgcctgccctgtgtgctgtgggtatgggtgggtggggatgcctgccctgcgtgctgtggtggttggcttttgctg

SEQ ID NO: 5672 - DNA, 570 bp, Homo sapiens
atttttttcatctttttctgagaatgtgcttatttaaatacatgcagaatttcttgttatggctttgtggaattgtcttaaaatctgaatttccagtttttagaagatgttgatttgaatagctttgatcttgacctcaaattaaatcgcgggccatggaattagggtgacattcttccttcttccctgatgcagagtgagggagccaggggtgagtcacagcctcctctgtgcatcattagcccttaggatgacgacggtctcgtcacagcggccaggcggtagtcagggccctgcgctcctggtgagtccgggctctgttcacaaagctggcggcttggaggaggcagcccctgcattctcctgtgctcctctctggcagttgacctagcgggaagtgccactgcccacaagcattccatcaacttgtgagtttcacttctttgccaaaaactggcagagagaaatgtgacagggaattgaacttaggcgtttcatttgctggaagctgaatctcaggtaggtgacgtttttgtgtgtcttcgctatgccttcctcccttgagccttg

SEQ ID NO: 5673 - DNA, 873 bp, Homo sapiens
cccaaggaaccacatcgcgtagtcacaagacagtggcctgggggtcaggaggccctgtgtttgcacattgtctctgcctctgatttatttcttcaacaaatatatattgagtgccaattgtgtgccagtcacttttaaggataccaggaattcagttttgcagagcttgcattccagtgctgggggaagaaggatggcaaagacgaaaacagcatcatttagaaagttagctgcactatgagggagatacccaggtacggaggttgtgcctgggcaaggacgggctccctcggcagggaggtgatcagggcaggcctcctgggggaagtgacatttgagctgacatgacctgaatgctgagcagccacccatgagaaaaactggaagaagaaagtccaaggagagggcaccatgggaagaaggccctgtggcggggacaggctcagcattttatagccaccggtctctaattcaagagcagggagaacagggtcatcaaagggaccccagccagatggacatggagacatacaagtgtcataaaagagagggaaggataatgatgggcagggaaggaatagacaacgaagtagccgtaggcagagaaaataaatctgcatgttcacctgaaataacattttgaagcacatgttgatgttagcattaaattggaaatgtcagtagtgaattcatgatcctaaagagaagcccagacagccctgtccccaaggcaggccggaatggtggccctacccagaagcagccctcacatgggaccatcgggccccacaagcagcacctagattttggtctcagtgctgtcctctatttaaaggaaaggagctgaccccatgtcttagggcaggagtaatc

SEQ ID NO: 5674 - DNA, 1131 bp, Homo sapiens
cctaagaggagcacctaccttgaatttaggggttagcagaggcatcctgaaaaaagtcaaagctaagccacaatctataagcagtttaggaattagcagaacgtgcgtggtgaggagatgccaaaggcaagaagagaagagtattccaaacaggagggattccaaagagagaagagtatcccaaacaacatttgcacaaacctgatggggagagagaatgtggggtggggatggatgatgagactgaagaagaaagccaggtctagataatcagtggccttgtacaccatgttaaagagtgtagacttgattctgttgtaaacaggaaagcagcacaattcatatgaatattttagaagactcccactggaatatggagaataaagttggagatgactaatcctggaagcagggagaacatttttgaggaagttgcactattttggtgaaaatgatgatcataaacatgaagaattgtaggtgatcatgacctcctctctaattttccagaagggttttggaagatataacataggaacattgacaggactgacgaaaggagatgaaatacaccatataaattgtcaaacacaaggccagatgtctaattattttgcttatgtgttgaaattacaaatttttcatcaggaaaccaaaaactacaaaacttagttttcccaagtcccagaattctatctgtccaaacaatctgtaccactccacctatatccctacctttgcatgtctgtccaacctcaaagtccaggtctatacacacgggtaagactagagcagttcaagtttcagaaaatgagaaagaggaactgagttgtgctgaacccatacaaaataaacacattctttgtatagattcttggaacctcgagaggaattcacctaactcataggtatttgatggtatgaatccatggctgggctcggcttttaaaaagccttatctgggattccttctatggaaccaagttccatcaaagcccatttaaaagcctacattaaaaacaaaattcttgctgcatatgtatacaaataatgatgtcatgatcaaataatcagatgccattatcaagtggaattacaaaatggtatacccactccaaaaaaaaaaaaaaa

SEQ ID NO: 5675 - DNA, 1134 bp, Homo sapiens
cctaagaggagcacctaccttgaatttaggggttagcagaggcatcctgaaaaaagtcaaagctaagccacaatctataagcagtttaggaattagcagaacgtgcgtggtgaggagatgccaaaggcaagaagagaagagtattccaaacaggagggattccaaagagagaagagtatcccaaacaacatttgcacaaacctgatggggagagagaatgtggggtggggatggatgatgagactgaagaagaaagccaggtctagataatcagtggccttgtacaccatgttaaagagtgtagacttgattctgttgtaaacaggaaagcagcacaattcatatgaatattttagaagactcccactggaatatggagaataaagttggagatgactaatcctggaagcagggagaacatttttgaggaagttgcactattttggtgaaaatgatgatcataaacatgaagaattgtaggtgatcatgacctcctctctaattttccagaagggttttggaagatataacataggaacattgacaggactgacgaaaggagatgaaatacaccatataaattgtcaaacacaaggccagatgtctaattattttgcttatgtgttgaaattacaaatttttcatcaggaaaccaaaaactacaaaacttagttttcccaagtcccagaattctatctgtccaaacaatctgtaccactccacctatatccctacctttgcatgtctgtccaacctcaaagtccaggtctatacacacgggtaagactagagcagttcaagtttcagaaaatgagaaagaggaactgagttgtgctgaacccatacaaaataaacacattctttgtatagattcttggaacctcgagaggaattcacctaactcataggtatttgatggtatgaatccatggctgggctcggcttttaaaaagccttatctgggattccttctatgggaccaagttccatcaaagcccatttaaaagcctacattaaaaacaaaattcttgctgcattgtatacaaataatgaagtcatgatccaattatcagaatgcccttattcatgtgggatgtatccaatgggataacccactcccaaaaaaaaaaaaaa

SEQ ID NO: 5676 - DNA, 1130 bp, Homo sapiens
cctaagaggagcacctaccttgaatttaggggttagcagaggcatcctgaaaaaagtcaaagctaagccacaatctataagcagtttaggaattagcagaacgtgcgtggtgaggagatgccaaaggcaagaagagaagagtattccaaacaggagggattccaaagagagaagagtatcccaaacaacatttgcacaaacctgatggggagagagaatgtggggtggggatggatgatgagactgaagaagaaagccaggtctagataatcagtggccttgtacaccatgttaaagagtgtagacttgattctgttgtaaacaggaaagcagcacaattcatatgaatattttagaagactcccactggaatatggagaataaagttggagatgactaatcctggaagcagggagaacatttttgaggaagttgcactattttggtgaaaatgatgatcataaacatgaagaattgtaggtgatcatgacctcctctctaattttccagaagggttttggaagatataacataggaacattgacaggactgacgaaaggagatgaaatacaccatataaattgtcaaacacaaggccagatgtctaattattttgcttatgtgttgaaattacaaatttttcatcaggaaaccaaaaactacaaaacttagttttcccaagtcccagaattctatctgtccaaacaatctgtaccactccacctatatccctacctttgcatgtctgtccaacctcaaagtccaggtctatacacacgggtaagactagagcagttcaagtttcagaaaatgagaaagaggaactgagttgtgctgaacccatacaaaataaacacattctttgtatagattcttggaacctcgagaggaattcacctaactcataggtatttgatggtatgaatccatggctgggctcggcttttaaaaagccttatctgggattccttctatggaaccaagttccatcaaagcccatttaaaagcctacattaaaaacaaaattcttgctgcattgtatacaaataatgatgtcatgatcaaataatcagatgccattatcaagtggaattacaaaatggtatacccactccaaaaaaaaaaaaaaa

SEQ ID NO: 5677 - DNA, 523 bp, Homo sapiens
tttttcatctaaaagagccttcttttggattaccttattcaatttcccatcagggaatttgttagttccactaaccagacagcagctgggaggcgcagacgcgtaccggtatgtacatggtagctgtgggaaggaggttctatactccactctcactggccatacaccagtcccttgtaagttatgcctggtcatagacccccgttgctatcatctcatatttaagtctttggcttgtgaatttatctattctttcagcttcagcactgcagagtgctgggactttgctaacttccatttcttgctggcttagcacattcctcataggcccagctcttttctcatctggccctgctgtggagtcaccttgccccttcaggagagccatggcttaccactgcctgctaagcctccactcagctgccaccacactaaatccaagcttctctaagatgttgcagactttacaggcaagcataaaaggcttgatcttcctggacttccctttacttgtctgaatctc

SEQ ID NO: 5678 - DNA, 527 bp, Homo sapiens
atgttttttcatctaaaagagccttctttttggattaccttattcaatttccatcaaggaaattgttagttccactaaccagacagcagctgggaaggcagaagcttactgtatgtacatggtagctgtgggaaggaggtttctttctccaggtcctcactggccatacaccagtcccttgttagttatgcctggtcatagacccccgttgctatcatctcatatttaagtctttggcttgtgaatttatctattctttcagcttcagcactgcagagtgctgggactttgctaacttccatttcttgctggcttagcacattcctcataggcccagctcttttctcatctggccctgctgtggagtcaccttgccccttcaggagagccatggcttaccactgcctgctaagcctccactcagctgccaccacactaaatccaagcttctctaagatgttgcagactttacaggcaagcataaaaggcttgatcttcctggacttccctttacttgtctgaatctc

SEQ ID NO: 5679 - DNA, 330 bp, Homo sapiens
ggctctgcttgttctccataaggtagaaatactttccagaatttgcctaaactagtaagccctgaatttgctatgattagggataggaagagattttcacatggcagactttagaattcttcactttagccagtaaagtatctccttttgatcttagtattctgtgtattttaacttttctgagttgtgcatgtttataagaaaaatcagcacaaagggtttaagttaaagcctttttactgaaatttgaaagaaacagaagaaaatatcaaagttctttgtattttgagaggattaaatatgatttacaaaagttacatggagggctct

SEQ ID NO: 5680 - DNA, 330 bp, Homo sapiens; identical to SEQ ID NO: 5679

SEQ ID NO: 5681 - DNA, 527 bp, Homo sapiens; identical to SEQ ID NO: 5678

SEQ ID NO: 5682 - DNA, 519 bp, Homo sapiens
ggcagagcaggctggttgcacagggctccctctggggtatggagagcttgctgggcagacaaatgctttcttcacttcaaggttgggagatttgtgtgggctgagagttgggaggcaggggggatatgtctcatagtttgcttgaaataaagttctaaaatcacagtaccttgcaggtggttatatattttaatcatttacttcctataggcgagacagtgagttttttctagtgctgctcctgggctggtttgtgcagtggagaggggtcataatttccaagagtcacactgggcaggttttaaaatagacactgatgctggagccacacccagagcaatagaatcagaatccctgggtgtatggcctggtttttgaagtacccaggtggttcagggtgcagctgattcaggactactggctggcccagcctttctgctttgggctgtaggttcagcgagtatattattcctaatcgaagagcagtaatttggaggtctggtgtgtgtagttgcgggg

SEQ ID NO: 5683 - DNA, 656 bp, Homo sapiens
ggcagagcaggctggttgcacagggctccctctggggtatggagagcttgctgggcagacaaatgctttcttcacttcaaggttgggagatttgtgtgggctgagagttgggaggcaggggggatatgtctcatagtttgcttgaaataaagttctaaaatcacagtaccttgcaggtggttatatattttaatcatttacttcctataggcgagacagtgagttttttctagtgctgctcctgggctggtttgtgcagtggagaggggtcataatttccaagagtcacactgggcaggttttaaaatagacactgatgcctggaggccacacccagagcaatagaatcagaatccctgggtgtatggcctggtttttgaagtacccaggtggttcagggtgcagctgattcaggactactggctggcccagcctttctgctttgggctgtaggttcagcgagtatattattcctaatcgaagagcagtaatttggaggtctggtgtgtgtagttgcggggcggtgtcagcttcttctgggatctttgccctctgctgctgctcccaaggcctgctcttccctggggggcttgcagatgggagagagctggctggtggaggtgggaaggcagctgctgctgtaggccctggctcct

SEQ ID NO: 5684 - DNA, 1160 bp, Homo sapiens
ttttattttttttttttggagacagagtctctctctgtcgcccaggctggagtgcagtggcatgatgtcagctcactgcaacctccgcctcccgggttcaagtgattctcctgccttagcctcctgagtagctgggattacgggcgcatgccaccatgccttgctaatttttgtatttttagtagagatggggtttcaccatgttggccaggctggtctcaaactcctgacctcaggtgatccacccgcctcggcctcccaaagtgctggggttacaggcgtgagctaccacacccggcctcttttgtatcttttaatctgttagttctgtcttccttttttcccttcctattgaagaagcagttgttcgtccctgtagaattccccaccttctcaatgttgctgatggcatctctgtggtagtggttagcatgttcctttatcccttgtttctcctgtaaacttaaagtctatgcatttaaccactactccagctgcctagtgaaagggaggagatgacagcacagcacccagggaacctctgagacctgctttgcttcctttcctcttccttttctggtcatttcctctcctgaactcactgtttttccttccggcccagacaccatgtttgccatgttggggccccaggacaggaaacaaacacacatactttctcccatttgtgtttcagtccatctgtaaataaattgttgtccaggaccaggcgcggtggctcatgcttgtaatcccagcactttgggaggctaaggcgggcagatcacttgatgacaggagttcgagatcagcctggccaacatggtgaaacctgtctctactaaaaaatacaaaaaatagcccttcaagattcccccacatggccaggcacagtgactcatgcctgtaatcccagcactctgggaggccaaggcgggcagatcacttgaggtcaggagttcaagaccagcctggccaacatggcaaaaccctgtctctacaaaatacaaaaattatgtgagcatggtggcaggcgcctataatcccagctactcaggactgaagcaggagaattgcttgaacccgggaggcagaggttgcagtgagccgagattgcaccattgcactccagcctgggcaacaagagcgaaactctatctcaa

SEQ ID NO: 5685 - DNA, 379 bp, Homo sapiens
  SITE (46): n equals a,t,g, or c
tcacttgatgacaggagttcgagatcagcctggccaacatggtganacctgtctctactaaaaaatacaaaaaatagcccttcaagattcccccacatggccaggcacagtgactcatgcctgtaatcccagcactctgggaggccaaggcgggcagatcacttgaggtcaggagttcaagaccagcctggccaacatggcaaaaccctgtctctacaaaatacaaaaattatgtgagcatggtggcaggcgcctataatcccagctactcaggactgaagcaggagaattgcttgaacccgggaggcagaggttgcagtgagccgagattgcaccattgcactccagcctgggcaacaagagcgaaactctatctcaa

SEQ ID NO: 5686 - DNA, 562 bp, Homo sapiens
ctcgatcctcgtttctaacaagcttccaagtgagatgatgctgctggtttggagacaacaaggagctgtgctaccaatgggtctctcagtggccttttcgggtcccagagtctttggcaagattgctctcttgacaccttgtcttaattttgaggtactgagcacagagcatgttgggctccaagggaaaattggtataggtggagacgggttggcgagaggcccagcacacggcaggccctctgacaggggcagccctgaaaggacagcgacgggatgaatagagtccatgcaggcttgatccagaaggctccaccttggcacagagcagcagaagcctcctccgcggggctgagattgtaaactgagccaggtgggcatctgggttggaagtccttcctcagctctgttccaccctgggaatgcctctgctattttcttacagtactatgttcaccttatccacgtattagatcttccttctctatctgacagtacacttcttaaggcagagccacgcgttctactcatagcacatagaacttgctcagtaaattttttt

SEQ ID NO: 5687 - DNA, 744 bp, Homo sapiens
ggctgctggtcctgcctgcaggtacttctgctagggacgtagctggggcaaggaatgaggagtctagggaaacaggccccacccccggagcttccccttgctgcccttggctcaggggcagcacccgcttcaactggcactccgctccatccatggtgctgctttaccactgcctccctggacctgctgatgccctaccccataccccgcccccagcctgctcctgctgaagccaggccagcatgaagtcctcaggaaggctgggatgagcctcccatctcatttctgaggggtctgagccccatggcctggggaagagcaacggattcctgatgagggccaggggatgggcatgtggcactgtccgagagtcagcaaaagccccaacctgagcttcagcacctaccaatgcctggttctggagagccaggtgtgcccctaagtggtagtgcccacctcactcccctgccccaatcccttctagggccacattacccactcctttccactcagcaaacattattgagcctcatggggaaatggaacagaaggtgcctctcctcttaaaagctcatgccccagcagtaagggttctgcagtgtctgtcaaacctgtgggccttgttccctctgctgtctgcctgacaagctcctgttcatccttcaaagcacagctcaataaggctagaaacatctaaatgcccatcggagggggctgaataaattacagcagctcctccctgtg

SEQ ID NO: 5688 - DNA, 744 bp, Homo sapiens; identical to SEQ ID NO: 5687

SEQ ID NO: 5689 - DNA, 316 bp, Homo sapiens
ctttatatgttgagttagaagaatctccaagatatgctgtcaaggaagaatacagaaagcaagaaacaatagcgtatgctaccatttgtgtttaaaaggggggtaggaagtgactaatagactacatcaggaaaaggtgtagcaatttcccataaaactagacatacacttaccctacacccagctattctactcctgggtattgaaacccaagatgaaaatatatgcctatacaaagacttgtacaagaatgttcataatagctgaaaaatagggaacagcctaggtggccatcaacaggcaaatggatacatgt

SEQ ID NO: 5690 - DNA, 19286 bp, Homo sapiens
gccgcgccgcgccgcttgccgccgggctagcactgacgtgtctctcggcggagctgctgtgcagtggaacgcgctgggccgcgggcagcgtcgcctcacgcggagcagagctgagctgaagcgggacccggagcccgagcagccgccgccatggcaagtgagtcctgtagggaagccctattgaggccgggacggaacagatcccccttccccacacccgtgcggtcgggcgcccgccggccaaccctgaccggccccctgcagaacgcggcccgtgcccccggcccttctcgagtatccccacgcgtccggggtgcggccggctcccctggcccctgctctcactcgtcgtgggcagaaggcgtccctgggtagcgcggaaggttacttctctgtgtcccaactcttcctgttttgtttctcccatcaaagtcaaatttctggaagtcatcaagcccttctgtgtcatcctgccggaaattcagaagccagagaggaaggtaagtaccccaaatcgccaacaaagaaggtttcaggaaactgtctggactctggaagtttacagtatgattaaaaatggcttcagcacggcaatggaaactctcccttctcttcccttggagtgtagttgtgctctgttattccggagagctgtcgaaaggtgacctggttgtgtggaaatttccactgaaatcactgtgctttatttggagcatctttggtggatgttgctccgagaacaaagcctccggttgccctgtcccaaaaatggatccgggccatgaatgaataaggcctcagttaggatagcagattgagttaccctccctttttcacctccaacgggagcagatcacgggttggttttttttcccaggagatgccctttgtatccagctgctaaagggaagggctgtcactttagtatttacaaatgattttgtaccttttatgtaggctgtcacaatagggggaataaaggctattcttttgtgaagtctgctgcttttcacagacggtgtattaaaacaaggaaagattaaatttagagctgtgctgaatcagaaattgtgtggagtgagtgttgccagtgtaactacagctgtcaacgaaaaaaagtttcattaggttcctaggttagagagtggggaataaaatgtttgtgtcctcacattatttttcaaactgttgttaaagcattcacatggacacttgggtgcttggaatccactttcatttttttacgtaaaatagtttcatataaatgcccatgtgctgcttttaatggacgaatttgtaaagctttaccccctcaattccagtgtagcgaaggggcatggctctggaggcaggcaagcctaggtcccaccctttacatagcaccttaatagctatgtgaccttggccttgtaactcagtgtggtagacggaacaagggaaatacgtgcaaggtatagcagtggctcaggaagggattaactctgggagacatgatgtcttatggtggttttgaaggagaaatagaagtctccttgaagggacggaaaggaattccaaataaaaggagtatatagtttgcaaaggcattggtgacaagagtgtagcatgtttggatgggaggttattagatgtagttgctattgatagaacataattgtaggtggggaacattaggagatgaataacaagggccagacatgagaatgtcactttggaagaaaaggagaggactagagttggtttagaggcttttcacatcagaggatgaactgtggtactgagcaagaatggatttaggggctactaagaagcagaggagacaggacttggataaagagcttttggggttttgatgttaaatttgattgtaaccaggagagaggacttggtgattagaaagggagttttgaaaaaattgtctgctctttgtttcccatcaagattcatttcagacaggttactctgaaatggcgttgccttctcttggccactttctaatttcttagtgtggtgggatggtaggtgggaagaggaccattctcaagagaagaagagtcctgtgaatgcccccagctttggatggagtatctgaacactgattcacccactgttgtgtggccgtatgactgtgtcctactttgcctgcatgtatagttagaggactgtgactccagttctggccagagggccaggaatgctgactcagtgcctgcctagaagtgtttttaaagaacacagttttgtcacttaatactgtcagtctctcacaaggtatttcaacctcagaatcttccgtctgtacaataattaatgtttgttaagccctctaaagccattaatgtagtgtaggcagcaggtattagtgaagacactcagtttcagaggcagaaaacctggaagagttcccactctactctttagtgacagaggttttgggtgggaggttttctaatgatacttaatacttaatagtcatctttacagtgattcttgtcacctatgcaacctatgtacctgagaagatgtgaaaatccttaaacaaatgttactagtaggttaaacatgcaactctcctgcccttccccaatatggtttattacactgttttacccttaattcatagaaaatacactattgagcaattccaaattacttgactctagaataacaaggttttgtgactgaaactcaaatgaaaagtggttgctcgtgtgttttacaagtcatgttctattgtgacattctttgttcttgagtcttaactgttaatgctaatggttaaaagcacagtttgggactcaaactcactttagcattggggtttggtacaaattatttagctcttctaaggctcagttgtaaaataaaggtaatgctctgtggtgtgaggtgagctggggtgatgcctgtaggtccttgcattgtgctctgtgcagaggaagttacgcagtacatggtacttatgtttggtacatggtttggcttctctgctgaacagagaaaagagtctggttggagtccatttttagagaaaggggtctgattggagtccatttttattaatttgcttttcaaagtaactccctgcttcaattcattctctcctactctagattcagtttaaggagaaagtgctgtggaccgctatcaccctctttatcttcttagtgtgctgccaggtaagctcaggcttgtatttcgtattggggagggggataagagtggctggaaacaggagtgctgactgttttgctctttgcctgttcccagattcccctgtttgggatcatgtcttcagattcagctgaccctttctattggatgagagtgattctagcctctaacagaggtaggactctggctctgtcttttctctgtagagtgtaggcttacctagcttcacttagttaaattaataggctttggctttatatggaacttagagagtgacttggaaaatagagtgaagaatgttaaagtgctgtgttgaatagccttattaaatgctgagttcagcaccaaggcataccatcatatttggaattgtatttgaatgcagtacaaaacctgtaatgagaagataagtctatgctatagagagaataaaaaacatggaaaaactagaatactttttgaatacctgaaatgatgacatttccattgataacattcttcagaatatgtaatttgtttttcagctgtatctttttcatatctataggttacatatagtgtcaaaaaatatgtaacagtgttttatatcctctaaccagttacttatgggactggggaggattctgaatgtgtaggttgatactgcatttgattaactcatttaaaaaatatagttcaattaaattccaaatcagttggaagtgtagctcattttaacataatgggaagtagaggcttattcacaactagatacaattgtacaggctccttttccagactctggaaattatttgaatgttatcctttttttattaactgatgaagagacgaacatttcttatctctaaaaccagaatgaatctgtttatggtgaatttaaatgcagcagtctgtttagacaccatgtgacttcctaaacagaataagctgttgcctggcaggctgaacagaatgaattgaattatatactaatcgttgatattttggggttctaaattaaacacagctaggaaactgaaacacattggttttatataaggggtacccagtcaaattttgcgtattcatttttaaaataacgtactacgtttccaagctgatattgactgttttgcttccccgtttcctcaaggcacattgatggagctagggatctctcctattgtcacgtctggccttataatgcaactcttggctggcgccaagataattgaagttggtgacaccccaaaagaccgagctctcttcaacggagcccaaaagtgtaagaaagattgtgaataatctgatgtctatagttggaaaatttgaatttgctataagattttggtatcagtttttctttttttatttattttttatttttttttttttttttgagatggagtcttactctgttgcccaggctggagtgcagtgacgcagtcttggctcactgcaacctccacctcccaggttcaagcaattctgcctcagcttcccgagtagctgggattacaggcacgtgccaccacacccagctaatttttgtatttttagtggagacgggatttcactacataggccatgctggtcttgaactcctgatcttgtgatccacccgcctcggcctcccaaagtgctgggattataggcgtgagccaccatgcccagcccaaacagtattttcttttgtgctgcaacctccttggcctgccaaccctgcaggagctccatgccctgtgttagcgtgagagagcacttctggtagagcagaggtggtgggtgctggggatgggctgggcaaggcaggggagagtgtctggagtgcccctgaggccatgtaatggaggagaaggatcagagcttggaggtcttagcacccttggccaccatttcattattgcttaaaaggaagtaatggctacttcagagctgtcataaggattaaataatcactgtcacaatgcctggcacatagtagttatttggcaagtgttttataaaagaatttaactgactggggggcggtggctcacgcctgtaacccccagcactttgggaggctgaggcgggcggatcatctgaggtcaggagtttgagaccaacctggccaacatggtgaaaccccatctctactaaaaaaatacaaaaattagccaggcgtggtgacaaggtgccttaatcccagctacttgagaggcagaggcaggagaattgtttgaacccaggaggcagaggttgcagtgagccgagataaagccattgcactcaaacatgggggacagagcaagacttctctcaaaaaaaaaaaagaatttaactgaagaaaaggtgatcctgtcagtccagctgtataatttaccagctctgtgatctggggaaaagttagatgatagctcttatgtttcactttcttcatctgtaaaaatggggataataatggtatttgcctcatatctaataagtgttactagtaacaattactagtcatcaaaattagccatatttagcctctgtttgctgaaaaacattaattaggaaatgatatttacagtctcctatccagtcatcttttcgcctacaccagcatgttttacaggtcttaaattagtatggtggataattgaatgagaaatacgtctatttttttttttttttttttttttttgagacggagtctcactctgtcgcccaggctggagtgcagtggcgtgatcttggttcactgcaagctccgcttcctgggttcaagccattctcctgcctcagcctcccaagtagctgggactacaggtgcccgccaccacgcccagctaattttttgtatttttagtaaagacggggtttcactgtgttagtcaggatggtctcagtctcgatctcctgacttcgtgatccgcccgcctcaggctcccaaagtgctgggattacaggcgtgagccacagcgcccagccaagaaatacatctatttaaacttgtcagttttagataaaaattaggattctaaaatacacacatgtggctgggagcggtggctcatacttgtatcccagcactttgggaggccaaggcaggatgattgcttgaggccaggagttcgtgactagcctgggtaacacagtgagagagaccccatctctacaaaacaacaacaacaaattagccaagtgtggtgatgcacctgtagttctagctactagggaggctgaggtgggaggatcacttaagcccaggagtttgaggctgctagtgcaccactgcactcctgcccgggcaacagagcctgtctcttaaaacaaaacaaaaaacactaagaaaacaaaaaaagtacaagcacaaattggctgttttctctttggtcttcacaatgttttgaatgttttcctgcattaagaactaattgttgtggagcactttttaaaaagtcaaatagggactgtatttgatggccactttggagtaaaattaattttacatgacagattaaataggaaagctgaaactgaaggtcagactgtacttagaggacccatctagtactgtggaacttgtcaaatgtgtccattcccttgtgcctaacagtgaaatagagtgagttgtaagaaatgaagacaccctacaaaaaggaaagcttttgccaggcgtggctcatgtctgtaatccccgcactttgggaggctgaggtgggtggatcacgaggtcaggagttggagaccatcctggctaacacagtgaaaccctgtctacactaaaaatacaaaaaattagctggctgtggtggcacgtgcctgtaatcctagctactccagaggctgaggcaggaaaatcgcttgaacctgggaggtggaggttgcagtgagccaagatcatgccaccgtactccagcctgggcgacagagactccgtctcaaaaaaaaaaaaaaggaaagcttctattagaccaaaatagcttggtacctaagggaatgggaagagcagccaaatcaatggtacgtggggttttccttttaaaagcacattaaataaaaacttgagaagggatcactttaccccagagctaataattctgtcctctggacccagacctggatggtgagcctagagaggtggcccaaatctgtagttcagctcttgagccatcgagaccccaagtgcctgacattgagtttgggtgctgcaggtgtgacatctccagattgtgtctccggatgctgtcaggagtaggttctactccctgattttctttgaatagaacaaattttccaagtttcacttttactcctcccatgactaaaaagcaagtgaatctaggaaaaggtaaaactaaagaagaagtgtgcttttgttaaaaggcttttgattcatcatgtactttgctgatgtgatggtttagcgcgttctcagccgagccccttggaggtagtatcactgctcttcatctttgttctcccccgtgcctggcgttgaattggtgtttcttaattgtttcttttgttctgtgtagtgacccacttggaaaacacttctttctttcaattctagtatttggcatgatcattactatcggccagtctatcgtgtatgtgatgaccgggatgtatggggacccttctgaaatgggtgctggaatttgcctgctaatcaccattcaggtaattattatgctaacatctccctttgagtagcccctcacacttacctacaattctcacataacgaatctcaagcacacctaaaaggaactcctactgaaaggaagcagaagcctaagactctgggttagccctctgaattcagcagagaaaggctttactgaccgctctctggggctgaggatgtgatctcattccgtcttcagcgtttatatcagagaacccaattactgaaggacggaaccatgtccgtggggagcagtaacacatagtcttgtatttttgaatttttacagctctttgttgctggcttaattgtcctacttttggatgaactcctgcaaaaaggatatggccttggctctggtatttctctcttcattgcaactaacatctgtgaaaccatcgtatggaaggcattcagccccactactgtcaacactggccgaggtaagggccctgtgctcccctggtggcgacagctttcagcaaaaacaattgagcaatgcaaagcagaagacaaaaatccccccattccacagaaaaataatgtcagttttaggtttatctcttctggtgtttgggtccatctgcaaagttttaaaaacacaaataggcttgtaattatgatgatacctaacttgcacttttcatataaaaatatctcctggacgtttggcacgtcagaatacacaatcctgcctcacttttcttagcacagtataagcttatattgcaacgataaagcaacgttaagtcatttccaggtttttttatcgttaacattgaaaccatgactgtcctcatatgttcatctttgtatattttggcagctgctctcagtgaataagtttctaaaaatgaaattcctaaaccaaagcacttggtcatgcaaggggcagctttctgaaaaaggcctgaacttggagcttagcacctgcgttcaaatcctggctgttcctgttagtcatacatacgtggctttgggcagattcctgcaccactgaatcttggttaccaggatgcagtgagaagcaacatgaaattacatgatgcctggctcctggtagatgtgtatcaaacattggcatgctgtgctacatccaccaagtgccgtggaaatcttgtaacagcatgtttttaataaaaagttcaaaacatacaagggaagccttagagagtgtgacttattagggaaaggaaataaacattttttggcactaaatatcttcttcactgaggagcattccaggagaaataatcatgcatatttgagagttttcttttaattgaatgttggaaacagagtccttggcctccagagaccatattatctcattaatgagatggaaaactggtccccaaacaagtgaaggctgcatgtgcctaacaggttacaaaggagagtggagcttgagatagggagccatagagaagagtgggcaagatcacatttgatgcttccttgagtactttgtataaatttaggaaatccaaggtaaattgggagaagcaggtccagaaggcaaagtttgacaggatgtgaaaaggcaagagggggatggcattgtaggagttcaggtatttgtcaagaccatcatggtgactggcttttggggagtgcctgagtgggaaggaagtaaagtcagaggggagcccctggtggcttagcagcccagtagtagccgccagaggctcatgttccattctgcagcagggcattgagtaatgggagccagagtttggaagaagtgatttgctctgcactgaaaggcagagagagcagctaggtgcgtgcagcagtaatccagccccaattaagccatcctacaggagagcactgtgtgagggcatttggaggaagcaagttgagagaggggaccagagaggcactttcaaggtgggggaaaactaagaagcaaaggtggatttgtctggccttgaagtcagtgtgtctacatgtcagttgctcgtgtttgggacctggctgacacgagatgcattcaggaagggctgtgccccatggcctgcatgtgggcagtgagtggtgctagagggagagcctagggaggggcagggagagccacacagagggcacagctgggacggcagctttgcagctgtgcctggagatgttgcagcttggcttgggacaggggaggctgttgaatgagattctacaggcagagacagtaatcactgctgcttccctgggcagcaggaacaatgcagaactgggaattagtcccaaatttgaaaccgtggggaaacaggccagccttgtcacacaggaccaaaaggtggaaaggatgggaattgacgaaagaccgccacagggtgagatgaggacatgatggccagttaggatatggtgtctctttcacagaagccacagcagaggaggtcagtggtcatattggttagatggtctgcctgacatgtcatctcggaatggtccaggaagatgtagcaggtggtcctagctatcacgtgttagaaacttgggaacagtgcttttgagttctttagtttcaccttttcctagattcacttgctttttagtcatgggaggagtaaaagtgaaagttggaagatttgttctatgaaaggaaaatcagggagcagaacctactcctgacagcatccagagacacaatctggagatgtcacacctgcagcaccgaaactcaatgtcaggcacttggggtctggatggctcctgagctgaactacagatttgggccacctctctaggctcaccatccagatctgggtccagaggacagaattattacctttgggttaaagtgatcccttctcaagtttttatttaatgtgcttttaaaaggcaaaccccacataccatcagtttggttactcttcccattccctcagctaccaagttattttggttgaatagaagctttcctttttgtagggtgtcttcatttcttacatctcactctatttcactgttaggcacaagggaatggacacatttgacaagttccacagtactagatgggtcctctaagtacagtctgaccttcagtttcagctttcctatttaatctgtcatgtaaaattaattgtactccaaagtggccatcaaatacagtccctatttgactttttgttgttgttgagacggagtcttgctctgtcacccaggctggagtgcattggcgccatctcggctcactgcaacctccgcctcccgggttcaagcagttctctgcctcagcctcctgagtatgggattacaggcgcccgccaccatgttcggctaatttttttgtattattagtagagacagggtttcaccatcttggccaggctggtcttgaactcctgaccttgtgatccgcccgcgtcagtctcccaaagtgctgggattacaggcgtgagccaccacgcccgactcctatttgacttttttaaaagtgctcctcagagtactgataccatgaccccacactgcccacagagaccctgtctctggaagtaatgccagcttcctgccagtagaagcagcgtgagttgccaggcttccattatgggatggttatgctgtcctggaacggcagaggttatcacttgtttctttttttcgctttttagttttttaacgtaagtaaatttcttgctgatgtctaaaacttaggccttaataatgcaccacactccccgccttcctctcacttgttactctgttgtctggttcttagattgggtccctttcctatatccctcagtccctcagtaagctcactccacccctaggcctgcctccctcaggagcatctcctggcagggtgtcatttggatgggaccacatggtggacgcaagcatatcctctgtacttgtatccttggtgtgagaagcagagagctggagcctccccactcaccagccaagggcagcctgcacttcatagctgttgaatgggtacttgtacttctcaagattgtccaggaaagtagatttgccagctctgagccccctcttcagtggatgacccctttcagctagagttcagcagagtctgcttttatttttataaattatcatcgttccacacctctggtggccactgactcatgtgcctaagaaatgagaccaattaattttaaaaagtggaatagtggttgggtgctgtggctcacacctgtaatcccaacactttgggagggtgaggcgggaggattgcttgaggtcaggagttcgagaccagactgggtaacatagtgagacccccaactgtacaaaaataaaaaataaaaaattagccaggcgtggtagcatgcctatagtcccagctattcggaagtctgagataggatcacttgagcccaggaggagaaggttgaggctgcagtgagctgcaaccacaccactgcactctagcctaggcagccgagagagagggaccctgtctaaaaaaaatcaaaaacaaaccagaatagcccgtttctgtagtttgaattctctacagaagagaagggagggatgagaataatacatgctgtatccctgtggctatgggcaccatgagtctaataacttaagtttgttttcctctttttatttgtctgctaagaaggctagaagcaaattgagttgcctgttcgttccttcatatatgtctcctcctctgccaacaggaatggaatttgaaggtgctatcatcgcacttttccatctgctggccacacgcacagacaaggtccgagcccttcgggaggcgttctaccgccagaatcttcccaacctcatgaatctcatcgccaccatctttgtctttgcagtggtcatctatttccaggtgtgtccagatccaaccccagggagtttccatggtctggatttaagtttcagaatgccttgtgtgcagtcccccactctgtggggtgcactgtcatcatattgtgttgaaacgatgagatggtatttgaaggcagcaggtttccagatgagctggacaagcatgttcattgagtcatgggacctgccattaacgaaacaaaattaaggcagttctaacgtaagtgaaatcatgttcttctgggttgggcctatcgacaggtaagatacatttttaagttcttagttcaagagaagcaaaaagtactctagctctgaaacctcattgctctcttatagaaagtttgtatgatatttataggtaacttctgcatctcggaaacggcctatcttcttaagctgtcttacctttaaaagtattccatctcttaaacttgcttctgagtaagagacctgaactgctattgttttcctgtaattggattgatctttgtattttttgatggtccactttgtattttggtgtttatttaaaagaagggacagagatgaaaggcagtttgatgtttgtgaaaggtatttatacgagctacatgcttttcccattccttctgctgagactaagccacattcttgcttaataaaaagctatctctttaggggctttgccagaatttgcagtcagatcattaagaattttttttttttttttttttttgagacggagtcttgctctgttgcccaggctggagtgcagtggcgcgatctcgactcgactcactgcaacctccgcctcccaggttcaagcgattctcctgcctcagcctcccgagtagatgggattacaggtgcctgtcaccacgcccggctaatttttttttatttttagtatagacagggtttcaccgtgttagccaggatggtctcgatctcctgacctcgtgatccgcccgcctccacattacaaagcgctgggattacaggcgtgagccaccgcacccggccttaagtatttaatttttaaatcctctgtattccgagccctgttctaggtactgggagctcataaaaataaaccctttctagtctccaggggtttcagagggagaagttgtattcctagaaaagtttagcttttctgtttatgattaaaaacactgtaaggaactattataaggtgtgaggccactgctgtagtggccctgcctcagagccagtgtaaaagcttaggaaacatcaccagctagagagaagcgcccttgggatttgggtgtgtggcctccaggcttttctccatattccacacagatgtggatgtaatgtgataggctctgtcttttggaaaaaaaaaaagtgggggtggggatcattccaccgtgcttgcttccatgttttgttttgtgtgagacagggtctcgttgtgttgcttaggctggaatgcagtggcatgatctcggctcactgcagcctagacctcccaggctcaagtgattgtcccacctcagcctcctgagtagctgggactacaggcgcgcaccaccacacccggccagttttgtttattttttgtagagacggagtctgactgtgttgcccaggctggtatcgaacttctgggctcaagcaattctcccacctcggcctcccaaagtgctgggattacaggtgtaagtcaccacgcctagccttcagtgtatttttaaaccagcttttctgggccccttctggatgtgccaagtgcaggagtgcagtggtgggtaaggagtgggcacaagctctcggaactgggagccccagaaccagcacacaggatttcctcccttgtggcccactggacagtccccggccgggctgtgtttctgtgcagcaggctgaaatgaggcagtgaaggggatttggttctgtttggcttctcagggcttccgagtggacctgccaatcaagtcggcccgctaccgtggccagtacaacacctatcccatcaagctcttctatacgtccaacatccccatcatcctgcagtctgccctggtgtccaacctttatgtcatctcccaaatgctctcagctcgcttcagtggcaacttgctggtcagcctgctgggcacctggtcggtaagtaggctctttgaagatgagctagcaatgcagctaagttgcagtggtttctatcagtgtcttgctcatgaacagatatttcatccaaagatattttccattgtgccttttacaaattcagcacattaaattatcttttcagtaaaaaaattgtactgtgggcaccgagtaaaattgcattctttcatctgctcagaactatttttgccttgatgctaaagtaaaatgaaggagcactcacatgcgtttggtttcttcttccccaggacacgtcttctgggggcccagcacgtgcttatccagttggtggcctttgctattacctgtcccctccagaatcttttggctccgtgttagaagacccggtccatgcagttgtatacatagtgttcatgctgggctcctgtgcattcttctccaaaacgtggattgaggtctcaggttcctctgccaaagatgtaagtagaagcaaaactttctggaagggtgatgaaagtgtgactggtataaggggtgtggacttgtcacctcatcataaataatggtctgtgacgtgtgcagatagatcgtcgtcctttagggggcagttcagaagctttaagggctgacagatggagtccagcagtagatcagctgtgggtatgagaatctgaatccacactgtaaagttagactttttcatatgacttccttgcggcagttttaaagttctctgtatgaatattgtcagtgctcgaagaggcgatctgtaactgttcagtaccacttggaatgcctatttccccttcagcctccaattccaacttctcccctgtgggcaccctgcaggttgcaaagcagctgaaggagcagcagatggtgatgagaggccaccgagagacctccatggtccatgaactcaaccggtgagtggtggccccaggtccccaacctcccgtctgtggacatgtgttgtttctttccatgcagggcatcctgataggccctagcacttactgggtcactaaatcttatccttgggttacaggacagaattaaatgttatatatttataaacttgctaagtgctggacactggagacgtaaaaataaacacttacagcccctttcctccagagggagccactgggtaaggagatggaagcatgtggccaggcggataggagacagtgcagtaagggtcctgagagcaacagctgtgactggcagcgggaccctcaccctggctcatgccggtggggtgctgaagagagcgccctggaggagggtcactctgagctcagagcaggcaggtcctggcatctgagcgcattttggggcctgtggtggcattaaggctagagaggctggcagtggctgggcacggaaggggttgatgtgcatctgaagcagggcagaagggatggagcctgcagtctcttaggaaggtcagtgctaatacatgaaaccacgctagagagggagagggggaggccacatacctgccaggctgtggtgagagtttgggccagaggtgatggtgccagatacagctgtacccttggagatggagcagttaggtaaggaagggcaaagtccaggtgaccttagatgctgccacagcactcttcagtctgcacagtcctcagtacaactactcatctcttccatcgtcactcagaagcagccacagacagacaacagacaaatgagcatggccgtgttcctacaaagctggctacaaagtcagctgcagaccaggttgtcctatgggccttacctaaaggaagcaaccacaggaaaagccagaattgcaaacttcagatcattttctaatccctagcagggatggtaggcaatttagttcattctcttaatattaagctgctggatttacagcactgtgcagtagaagtagaattcaagtcacatgtagtttttaaaatttctagaagtcacattaaaaaagtaaaaagaaacaggtgaaattaaatttaatatatttaacctagtatatccaaagtatcatttcaacattataattaatgttaagaaaaaccatgatgaaatattttacatccttgtcttcaaatctccaaaatcttatgtgacatctcagtttggtctagtcacagtcccctggccacgtgtggccagtgtggccactgcctggacagcagcgccttggcctagagcgctagcatgttagtagatgactttctaggagacagcagaggggcctttgaggcattaggtcccaaagtctcaggtgagcctgttggccgcctggctcacggggagctctgtgggtgtccaggagctgactgtgtcccctcccccaggtacatccccacagccgcggcctttggtgggctgtgcatcggggccctctcggtcctggctgacttcctaggcgccattgggtctggaaccgggatcctgctcgcagtcacaatcatctaccagtactttgagatcttcgttaaggagcaaagcgaggttggcagcatgggggccctgctcttctgagcccgtctcccggacaggttgaggaagctgctccagaagcgcctcggaaggggagctctcatcatggcgcgtgctgctgcggcatatggacttttaataatgtttttgaatttcgtattctttcattccactgtgtaaagtgctagacattttccaatttaaaattttgctttttatcctggcactggcaaaaagaactgtgaaagtgaaattttattcagccgactgccagagaagtgggaatggtataggattgtccccaagtgtccatgtaacttttgttttaacctttgcaccttctcagtgctgtatgcggctgcagccgtctcacctgtttccccacaaagggaatttctcactctggttggaagcacaaacactgaaatgtctacgtttcattttggcagtagggtgtgaagctgggagcagatcatgtatttcccggagacgtgggaccttgctggcatgtctccttcacaatcaggcgtgggaatatctggcttaggactgtttctctctaagacaccattgttttcccttattttaaaagtgatttttttaaggacagaacttcttccaaaagagagggatggctttcccagaagacactcctggccatctgtggatttgtctgtgcacctattggctcttctagctgactcttctggttgggcttagagtctgcctgtttctgctagctccgtgtttagtccacttgggtcatcagctctgccaagctgagcctggccaagctaggtggacagacccttgcagtgatgtccgtttgtccagattctgccagtcatcactggacacgtctcctcgcagctgccctagcaaggggagacattgtggtagctatcagacatggacagaaactgacttagtgctcacaagcccctacaccttctgggctgaagatcacccagctgtgttcagaattttcttactgtgcttaggactgcacgcaagtgagcagacaccaccgacttcctttctgcgtcaccagtgtcgtcagcagagagaggacagcacaggctcaaggttggtagtgaagtcaggttcggggtgcatgggctgtggtggtgttgatcagttgctccagtgtttgaaataagaagactcatgtttatgtctggaataagttctgtttgtgctgacaggtggcctaggtcctggagatgagcaccctctctctggcctttagggagtcccctcttaggacaggcactgcccagcagcaagggcagcagagttgggtgctaagatcctgaggagctcgaggtttcgagctggctttagacattggtgggaccaaggatgttttgcaggatgccctgatcctaagaagggggcctgggggtgcgtgcagcctgtcggggagaccccactctgacagtgggcacacggcagcctgcaaagcacagggccaccgccacagcccggcagaggggcacactctggagaccttgctggcagtgctagccaggaaacagagtgaccaagggacaagaagggacttgcctaaagccacccagcaactcagcagcagaaccaagatgggccccaggctcctccatatggcccagggcttaccaccctatcacacgtggccttgtctagacccagtcctgagcaggggagaggctcttgagacctgatgccctcctacccacatggttctcccactgccctgtctgctctgctgctacagaggggcagggcctcccccagcccacgcttaggaatgcttggcctctggcaggcaggcagctgtacccaagctggtgggcagggggctggaaggcaccaggcctcaggaggagccccatagtcccgcctgcagcctgtaaccatcggctgggccctgcaaggcccacactcacgccctgtgggtgatggtcacggtgggtgggtgggggctgaccccagcttccaggggactgtcactgtggacgccaaaatggcataactgagataaggtgaataagtgacaaataaagccagttttttacaaggtacttga

SEQ ID NO: 5691 - DNA, 384 bp, Homo sapiens
gaaatgttaagcattttttgtttgttttctgtttgtttgcttgtttgttttaacttgggcaactagaagaattggtggtggtcaaaaagaagtggaagagttggcaaagggcttggaaggggaaggagctgttagttggaggtgaatggaatatccaagtggagacattttatgggcacttaaaaatgcagacttgaatgcagataaaatttggcctggagtgccaggcacggtggcttatgcctgtaatcccagcactttgggaggtcgaggcaggcggatcacctgaggtcaggagttcgagaccagcctgaccaacatggagaaaccccgtctctactaaaaaaaatagaaaattagccgggcatggtagcgcatgcctgt

SEQ ID NO: 5692 - DNA, 289 bp, Homo sapiens
attggacttttgaaacagaataaagaaaggtgccaagcatagtaaagctctgaaagaaaggaggaaactggaaaggatagatggaaagagatttaaggaagtcatttaagtggtcaacaatataaaatgtcttagataagtttggagagcttgaaaactgagaaacttttcaaaagagggaagtgattgatagcttttgggagtggagaataatagaagatatttggagagctggtaggcatgaattccacacatttgtttggtagccaggagatgtagaagagtacat

SEQ ID NO: 5693 - DNA, 1022 bp, Homo sapiens
aacaaacctcaggagaccagaagtaagttgcctctttaagaagcagagccgctttgagatgttgcaagggggagctaagagcagggcagaattttccagtgtcttttgacaggaggaagtggttggggacgacttatttttttggcccggagacagcctgtcattattagactaagcattgtatcagatctaagtgtgtagctttcttaatgtaatgcagagcaggagctatacgttttgttttgtttttcattttatcagtaagaatgagtgcattacagcctgggcaatgtagcaagacctggtctctactaaaaaagtaaaataattagccaggcatggtggcacgtgcctttggtcctagctacttgggaggctgaggtgggagaattgcttgagcccaggaggtggaggctgcagtgagctagaactgtacttctgcactccagcctgggtgacagaaagcactagtaatagctttgtgagctaagtcccgctttcttgggtgttctcatggtcatgctcagagaatccccctctccccaccagcatccaccagactgcacactggtgtgcaggagaaaccagcttgcctggcagcctgggtccagcagtcccaaaccatcagaaggaagaccgacatcctgcacctccacatggtcactaattccctgctgtggggggcacattttggcctgacttggctgacacaatctggggaaaaaagagaagtatgggctgagtactgtggctctcactggttaatcccagcactttaggaggcagcagcaggaagattgcttgagcctaggaattagatcagcctgggcaagatggtgggaccttgtctctacaaaaataaaaataattagctggccataatgccacgtgcctgtagtcccagctacctgggaggttgaggtgggaggattgcttgagcccaggagtttgaggttgtagtgagccatgatcatatcactgtgctacagccttggtgacagagaccctgtctctattaaaaa

SEQ ID NO: 5694 - DNA, 612 bp, Homo sapiens
agttcttaaaaaatgatgtgggataaaacaactaaatttaattatatcatcgtctttggaggacggtgttatcttcatcttgcatatgtagaacctgaggtccataaaaaccaattttccgagcccataaggctcctcagtggggtaactgggactgggtttcccaaccagatttaatccagggccccttctgctgtatcaatgctgcccttccagactgtccctttcatcatcactttaatctcttccctctcgatttcagataactcgtattttaagacgcctgaatattttctatcttattattgtagatatgtgagcatcagctccttaaagttaccgaatatttctgatcaaattctggttatttttgtctcattaaaatgaatatttaagttttcaggagagaagaaggcacaaatctcccttaaaaagtaatccatttgagagatggattaataaagtaatattatgaattcaatataaattaacatatgtgttttcaaattccaaaaatagatgagggagatggaattacactagtgagttcagcatgattcctaaccaaggccttttcataagtggaagtctttcacctggccctggggaaat

SEQ ID NO: 5695 - DNA, 569 bp, Homo sapiens
gctgtgtgatcttagattaggcactgtttctctctgcctcaacattcttgctcctaaagtggggttaattatatataccttgcagggctattctgagaattaaatgagttaatgcagaagttctgagcctttttggtctcaggactcctttatattctcaataactactgagaatcccagagagtttttatttgtgtaaattatagctactcatgtttattgtattagaaatcaacttaattcattaaaaaaccgattgtggccaggtggtgtggctcacacctgtaatcccagcactttgagaggccgaggctggcagatcacaaggtcaggagatcgagaccatcctggctaacatggtaaaaccctgtctctactaaaaatacaaaaaaatttagccaggtgtggtggcaagcacctgtagtcccagctactcggaaggctgaggcaggagaatggcgtgaacctgggaggtggagcttgcagtgagccgagatagtgccactgcactccagcctgggtgacagagcgagactccgtctcaaaaaaaaaaacaaaaacaaaaacaa

SEQ ID NO: 5696 - DNA, 416 bp, Homo sapiens
ggaaagaggtggcagtcttcacctgctgtggttgagtttctcactcatgccaagttttacataagctggggaccatgtgcttcaaggctagaggtcttggcgggcccagggccttggatgggcctggatgaccaaggggtctgagacttaggccctggctctgcatggggaatcttgggaaggttggaagcccacggcccctactgagaaaggagccacggtccagatcttttgcacaaatcccacctgtgctccttgaccgcccctccccaccggggccatggtgaccacgcaggcagaagcctccatccgttcacaggaccagcatcctgggaggaccctggcctgagcgagctgctgcaggggaccctcaggctggatggttggccactcggcacccttttctctgtggagca

SEQ ID NO: 5697 - DNA, 416 bp, Homo sapiens; identical to SEQ ID NO: 5696

SEQ ID NO: 5698 - DNA, 429 bp, Homo sapiens
ggaaagaggcagcagtcttcacccactgaggctgagtttctcactcatgccaagttttacataagctggggaccatgtgcttcaaggctagaggtcttggcgggcccagggccttggaggggcctggatgaccaaggggtccgtggcttaggccctgcctctgcatggggaatcttgggaaggttggaagcccacagcccctaccgagaaaggagccatgggccagatcttttgcacaaatcccacctgtgctccttgaccgcccctccccaccggggccacggtgaccaggaggcagaagcctccatccgttcacaggaccagcatcctgggaggaccctggcctgagcgagctgctgaaggggaccctcatgctggatggttggctacttggcacccttttctctgtggagcagggatgacatttga

SEQ ID NO: 5699 - DNA, 419 bp, Homo sapiens
ggaaagaggcggcagtcttcacctgctgtggttgagtttctcactcatgccaagttttacataagctggggaccatgtgcttcaaggctagaggtcttggcgggcccagggccttggaggggcctggatgaccaaggggtctgagacttaggccctggctctgcatggggaatcttgggaaggttggaagcccacagcccctactgagaaaggagccacgggccagatcttttgcacaaatcccacctgtgctccttgaccgcccctccccaccggggccacggtgaccaggaggcagaagcctccatccgttcacaggaccagcatcctgggaggaccctggcctgagcgagctgctgcaggggaccctcatgctggatggttggccactcggcacccttttctctgtggagcaggga

SEQ ID NO: 5700 - DNA, 429 bp, Homo sapiens
ggaaagaggcggcagtcttcacccactgaggctgagtttctcactcatgccaagttttacataagctggggaccatgtgcttcaaggctagaggtcttggcgggcccagggccttggaggggcctggatgaccaaggggtccgtggcttaggccctggctctgcatggggaatcttgggaaggttggaagcccacagcccctaccgagaaaggagccacgggccagatcttttgcacaaatcccacctgtgctccttgaccgcccctccccaccggggccacggtgaccaggaggcagaagcctccatccgttcacaggaccagcatcctgggaggaccctggcctgagcgagctgctgaaggggaccctcatgctggatggttggctacttggcacccttttctctgtggagcagggatgacatttga

SEQ ID NO: 5701 - DNA, 435 bp, Homo sapiens
cagccctgtggctccttagaggaatctgggtgccttctgtccctagtacctgacaagccccaggtgagaagacctgagctcacctgcgctgccacgtgtaacctgatggccccggcaccctcgcagggtttgaatagctgccctttccacctgtttcccagattttccacaccacccagaggctcatattcaaccccacagcctacaagtcagccaggggcctttggccacatgtactgatgatgagaatcactggattgtaagctgtaaaagcgcaaggatggtgttttgttccccgctaccccctgcacctgaggcccagcgaggattgctgctcggatgaaggagagcgagtgttcgtggagctctttgcagaagccacgggaagcccttcctgtgccttctcgggtttagttctcagacagccccactttc

SEQ ID NO: 5702 - DNA, 435 bp, Homo sapiens
cagccctgtggctccttagaggaatctgggtgccttctgtccctagtacctgacaagccccaggtgagaagacctgagttcacctgcgctgccacgtgtaacctgatggccctggcaccctcgcagggtttgaatagctgccctttccacctgtttcccggattttccacaccacccagaggctcatattcaaccccacagcctacaagtcagccaggggcctttggccacatgtactgatgatgagaatcactggattgtaagctgtaaaagcacaaggatggtgttttgttccccgctaccccctgcacctgaggcccagggaggattgctgctcggatgaaggagagcgagtgttcatggagctctttgcagaagccacgggaagcccttcctgtgccttctcaggtttagttctcagacagccccactttc

SEQ ID NO: 5703 - DNA, 435 bp, Homo sapiens
cagccctgtggctccttagaggaatctgggtgccttctgtccctagtacctgacaagccccaggtgagaagacctgagctcacctgcgctgccacgtgtaacctgatggccccggcaccctcgcagggtttgaatagctgccctttccacctgtttcccggattttccacaccacccagaggctcatattcaaccccacagcctacaagtcagccagggcgctttggccacatgtactgatgatgagaatcactggattgtaagctgtaaaagcgcaaggatggtgttttgttccccgctaccccctgcacctgaggcccagcgaggattgctgctcggatgaaggagagcgagtgttcgtggagctctttgcagaagccacgggaagcccttcctgtgccttctcgggtttagttctcagacagccccactttc

SEQ ID NO: 5704 - DNA, 435 bp, Homo sapiens
cagccctgtggctccttagaggaatctgggtgccttctgtccctagtacctgacaagccccaggtgagaagacctgagttcacctgcgctgccacgtgtaacctgatggccctggcaccctcgcagggtttgaatagctgccctttccacctgtttcccggattttccacaccacccagaggctcatattcaaccccacagcctacaagtcagccaggggcctttggccacatgtactgatgatgagaatcactggattgtaagctgtaaaagcacaaggatggtgttttgttccccgctaccccctgcacctgaggcccagcgaggattgctgctcggatgaaggagagcgagtgttcatggagctctttgcagaagccacgggaatcccttcctgtgccttctcaggtttagttctcagacagccccactttc

SEQ ID NO: 5705 - DNA, 434 bp, Homo sapiens
cagccctgtggctctttagaggaatctgggtgccttctgtccctagtacctgacaagccccaggtgagaagacttgagttcacctgtgctgccacgtgtaacctgatggccccggcaccctcgcagggtttgaatagctgccctatccacctgtttcccggattttccacaccacccagaggctcatattcaaccccacagcctacaagtcagccaggggcctttggccacatgtactgatgatgagaatcactggattgtaagctgtaaaagcacaaggatggtgttttgttccccgctaccccctgcacctgaggcccagcgaggattgctgctcggatgaaggagagcgagtgttcgtggagctctttgcagaagccacgggaagcccttcctgtgccttctcaggtttagtctcagacagccccactttc

SEQ ID NO: 5706 - DNA, 3352 bp, Homo sapiens
gttccagccccgcgatggcctccgcgggcagcaccgctcggcgggcgggctccggaagctggcactcagaaaggggagaagggagaggtgctcggccgcagccaactccaagtggctccatgcagcaggcgaacaaagtctccttgaaggccacctggactgacgcggagtccaagcagcccaggtgggtagcgggagaaggtgtcccggctgcagggagcgagaacccggcccagcgcctccctggtgggcagggcctggagcgggcgggggcggaggctgcggcccgagaagccagcagagacaggctggggccagggatcgcctcccgagaggtgcctaggccgtggcccagagtcgcttccccactgccccgcccaccagccaggcgggggccagggatcgcctcccgagaggtgcccgggccgtggcccagagtcgcttccccactgccccgccctccagccagcccctgcccgacctcgcagaccacctcagtgcgcaggcgactgccctcgccaggccgcgccgccctgcctcgctcaccccgccccgcgctgaccccagccccagcaaggagtccgaccagacggcaatcgaccagacggcgatcgggagctactaccagctgttcgcagcggctgtgggcaacgtggaatggctgcgattctgtctgaaccagagcctcagggaaatccccaccgacgacaaggtaaggtcttgagtgttggggcaaagaccgaggtccctctcccgctacgctgctcggagtggtcacctggagaagagatatccttttctgggtagatcttcctaatttaactcatcttctggctgtggaaggaccattttgggggcagggaggttgggtgggctgatgaacacacactggttaattagcaaaagggtgtgagcattcctggggacacagggaagaaagtgaaggtaaccccaataaatttatataaattgtggaccctgggacctcagtcccactcagcctcctcctgcctgctctgaacctcacagggcttcactgccatccacttcgccgcccaatggggcaagcttgcatgcctgcaggtcctggtagaggagtacaagtttcccgtggacctgctgaccaacaatagccagacacccctgcacctcgtcatccacagggacaacaccaccgtggccctcccctgcatctactacctgctggagaaaggcgcagacctcaatgcgtgagtccagcctgcttcaggagggaggcttcgggcacaggcacgggcacagccctacttccaggcaggcaaatccatgcaggacaagcagaggggttgctggaggtgacaaggattgggtcccacataaagcagtcaggaatccacatggtgtaataaagagactgggctttagccgggcatggtggctcatgcctataatcccaacactttggaaggccgaggcaggcggatcacctgaggtcaggagttcaacaccagcatgaccaacatggagaaaccccatctctactaaaaatacaaaattagcagggcatggtggcgcatgcctgtaatcccagctattcgggaggctgaggcaggagaattgcttgaacccaggagatggaggttgcggtgagctgagatggtgccattgcacttcagcccgggcaacaagagcgagactccgtctcaacaaaaaaaaaaaaaaaaaaaagattggcctttaacagacctagtctacatcccagctctgcaacttgctagcagacagcaggaccttaggcaagtcactcaacctctatgccccagtactctggctcccaaacttaggtgtacattggaattacctagggagcttaaaaaatatgaacacctggccgggtggcatggtggcatagtcccagctacttgggaggctgaggcaggagaatcgcttgaacccgggaggtggaggttgcggtgggccgagattgctccaatgcactccagcctggcaatagagcgagactgtctcaaaaaataaaaaataaaaaaaattaggctggccgcagtggctcacgcctgtaatcccagcactttgggaggctggggcgagcggatcacgaggtcaggagatcaagaacatcctggctaacatggtaaaaccccgtctctactaaaaatacaaaaaagttaaccgggcgtagtggcgggtgcctgttgtcccagctacttgggaggctgaggcaggagaatggcgtgaacctgggaggcagagcttgcagtgagccaagatcgtgccactgcactccagcctgggcgacagagcgagactccgtctaaaaaaaaaaaattaaaaaatataaacacctgtgttccaatccaaaggctgtgatttaatgggtctgtggtgtgacctgggcttgggaagtcagaaaagatccccaggtgcttctaacttgaagctaagtttgggaacctctgtctcagtgtcttcaactgaaacttgggagaatagcagtacctatcacatgggactactgtgatcactgaaaagtgcatggcatataggagactgcattcattcaaagtatcaagtatgcactatgtgctaagcactatgctagagtcacagaaatggtccctctcctcacgaagctgacattctagtaaaggagcagacagtgaattagcaaacaaataaatgaacaaaatcctgacagagcatgggaagtggttatgaaaaaataaacggggtgatggtgtagggggtaaagcaggtagggggaggatctattttggatgaagcaatcacctctaaggaggtgacatttaaattggaacctgaagacagagtgagccagccatgcaaagagccagggaaaagtgttccaggtagaggtaacatcatatgcaaagaccatgtgttgggaaagagtgggcaaggtcaaaggataagatcgaggaggttaggcccaggtcatgcagatcttgtgggcatacggaatctggtgaggcatagggaaagggcagggggctggttggtttaagagtggatgaggttagtggtctctgaaccaagccagctctccttccagcagttcttaactatcacataccttctaaagtcagatttttactgttcacttagtccaattcctccctttacagtaaaggaaattgaggtgccaaaagggacagacatagctaggatcacccagtggactgatggtagagcagggcttggaaactggtgtgtccatctatctgatggacagatgctctttgtctttcctttctgcccttatccccactggtggggccttccacagtcagacatgcaacggctccacgcccctgcacctggcagcccgtgacgg

SEQ ID NO: 5707 - DNA, 513 bp, Homo sapiens
taaaagaaaagacagctgggcccgggggaccactaccaccaagagggcagagatcggtagtggccccgaatgcctggctgtgctgttatttattggatacaaggcaaaaggggcagggtaaggagtgtgagtcatctccaatgattgataaggtcacgtgagtcacgtgtccaccggacagggggcccttccctgcttggcagccgaggtgggtgggggtgggggcggggacagggggagggagagagagagagagagagaggacagcttacgccattatttctgtgtatcagagacttttagtactttcactaattttgctactgctatctagaaggcagagccagatgtacaggatggaacatgaaagtgaaacaggagtgtgaccgctgaagtacagcgtcacagggagatgtttaggcctccagataactgtgggcgggcctgactgatgtcaagccctccacaaaaggtggtggagtaaagtcttctctaaactccccctgggaaagg

SEQ ID NO: 5708 - DNA, 1335 bp, Homo sapiens
tgggaatcttaagtgaatcctgaaatggggagggctttggggctgctgactccggcacaccgggtctgtttcagttccatttctctccagttctcagccctatcctcctctgatgtcagggtcaccagtcctcagagtcacacactgtccagaggaggcaaggcccatctgtttcctgtagctctaaccttttccagaagctccttgcatcttccctcatctcttatggcctcaattcgatcaagtgtccattctcgttcctttagctagaactaaaggaaagccatatgctgactgacttaggtctggggcaaggtctgatggaattatgatgattggcttagcccaatcagagcctgtgcctggagctgggtcaatctccaaagcctctgattgcttagcaacagtctgggatagtgagacaatggcggtgggggaggttctatgacaatatatggaaggctccgtggaggcaaggacagagctagattgagttgctgccaccgggcctggagagccagccaactgtatcctccctacatgacttctcaaggcccaccacttccaagaagcgtgtccacatcaggccatccagtcctttctgctttctctttccagggtcaaggatgcagtgtgcacttcccatttgccttttcccccatcacaccagagactctcctatggcaggacatttctctactatcagactgtggattcctttggagaagaagggaattgtctttctgtaagacttgaggttttccctagggcagggactgtgtctcccatgtcaagttggagtctcacctagggcagaggctacatctctcccatcagattggagatcccccctttgggagaggtgctttgtctccccactcagcccaggggctcccttatggaaaaagttgtctcccccatcggaacaccggctcccataaggcaggtgttgcttccatcagactcagactttccctcccatcagactcagagtttccctcatccttcagactgtggtttccgaaagctacagccacaggacctccttgcccagaagcagagggcagcagtcctccatgactctcttgtgccctctgttgttgcagaaagagcacaaaattctcagagaagctgctatcagaaagtggctccacggcaagctgcacccaggccactctctggtctccaataccaagcaagcccgggccaccgccctctccaagaccccagagcaacgggaatcgcagcgttccaggagcttccacccctctgtggatgcacgcctgcaatgcattccacagcccacggagatgcccaagcccatctacaggaagc

SEQ ID NO: 5709 - DNA, 6658 bp, Homo sapiens
gataacatgttcgcaatgtatgaggaaggtggggctctggggcttccagcagattgaatcgtccatgactgacctggatgcatcctttggcctgaccagctccccaatcccaggccttgaggggcgaccagagcgcttacctctggtgcctgaatctcctcggaggatgatgacccggagccaggatgccactttctccccaggctcagagcaggtattcacttagcttatttggggtggaattttaaacaacattcttggcaaaagtgttgttggtagaaagttggaaattaatttaggtggataggcttctcttcccactacattggttacgataccacatagtgtttctgttcactaatggggaagctaaattcagccagacccggtggctcacgcctatgatcccagcactttgggagactgaggcaggcagatcacttgaggttaggagtttgagaccagcctggccaacatggtgaaaccccgtctctaccaaaaatgcaaaaattagccaggtgtggtggcaggcacctgtaatcccagctacttgggaggctgaagcaggagaatcacttgaactcgggaggcagaggttgccatgagccaagatcgcctcactgctctccagccttggcaacaaagcgagactctgtctcaaaaaaaaaaagaaaaaagattaaagaaagaagtatttctgaccataatcattaatatcattcgtgtacttccattatctcccctttccttcaggctgaaaagagccctggtcccattgtctctcgaactcggagctgggactcttccagtcctgttgaccgtcctgagccagagctgaagccccaccaccagaactcgcccagtgacccgaagcatggaacaggagacacccctggcctggagtaccatctagccctctgcggaaagccaagcgagctcgcctctgctcctccagcagttcggtgagtccacctcgcatgtagcagtggctgagcataaacagcatattgggccctccctaggcagcatggagaagcaggcaggagcccttccgtggtccaatgcaaaaagtagaccatgtgaataaatttaaagttggatgaccaaagggaaaaaatgtcagtcatgttttttgctcctttttgttcctttggagtggattctggagaaataatagatatttcaggcaaatggaacaacggtgtgatacagggacaaacctgatctggcagcggtccccaacctttttggcaccagggaccgttttcatggaagaccatttttccacggaccacggttgggaggatggtttcgggatgatacgagcacattacatgtattgtgtactttatttctattattattatattgtaatatataatgaaataattgtacaactcaccataatatagagtcagtgggaacctgcagcttgttttcctgcaactagatgatctcatctgggggtgacgggaaacagtgacagatcatgaggtgtcagactctcataaggagcccgaagtctagatccctctcatgtgcagttcacagtagggttcctgctcctataagaatctaatgccactgctgatctgacaggaggcagagctcaggtggtaatgcaaacaatggggagcagctgtaaattcagatgaagctttgcttgcccgcctgctgttcacctcctactgtgcgacctggtacccatccatggcctgggggttgggtatcccttatcccttgtgataaggtatagtttgtttaacacaaaaggagtgaaaaaataaagaaaatgagaggaaaatgtgtaggcaaagtttgaaggagagcataaacactcgaagtatgggtagttgtgagattctggacttgataactaacagcagtgcctccctgaacttacatagcatctacctatgaatgctatttctttttctccttcctcaggacacatcttcccgaagcttctttgatcccacctctcagcatagagactggtgcccttgggtgaatatcacacttggcaaagaaagcagggagaatggtggaactgaaccagatgccagcgccccagcagagccaggctggaaagcagtgctgaccatcctcttggcgcacaaacagtctagccagccagctgaaacggactccatggtgagatacgccactgccttgtgtgtgggcagcacttgctgtttatgggaggtggagcagaggctgggcctataattagcaccccgcctgccttcagctttcatacgtcaagttatttgggtttttttgtttgtttgtttgttttttgagatggagtctcgttcttgttgcctaggctggagtccaatggcacgatctcagctcactgcaacctccgcctcctgggtcaagcgattctcctgccttagcttcccaagtagctaggattacaggcgcccaccaccacacccggctaattttgtatttttaatagacagggtttcaccatgttggccaggctggtctcgaactcctgacctcaggtgatccccccgcctcggcctcccaaagtgctgggattacaggcgtgagccaccgtgcccggcttatacgtcaagttagactcattctgctttcgtcctagggattaggcatagaaccggttcgtctttctgtagtttagcatatggcattccgtcaagttctgataaattcttttgttctcctaaataaagtgactccaagtagaaaaggagtacggaaacagaaatagatgaacaggcagctgctccggcctcatgttgcagacagctgctttttctttcatttgctgtcacttgcacttggagcctggccagttaacttagctgtttggagcactgggctctgacaccaagatgatggcctcattccgcacgctgggcacattactttactctgttccacagcccagactgtgactctgctagccattgcagccataactgctgtgggttacaaatgtgggtgacaactgagaagaaaagtcaagtgtttgctctgtgtaaagattggaagtgataggctgggtaatatggaaccatgaaaactgggttctctccttcgctggctcactcccaaattttccttgtagctggtaacaatttctgatcgtagtctataactttcaaggacaaagtaaaataatacttgtcagcagatatttatgagcagcactcctagattcatggttttctagggttacaggattccactggagggaactatagtaatgctaaaagtccaaaattgcatggctgggtgtggtggctcacgcctgtaatcctagcactttgggaggccaaggcgaatggatcacctgaggtcaagagtttgagacaacctagccaacatggtgaaacctcgtctctactcaaaatacaaaaaaaaaaaaaatttgccatgtgtggtggcaggcgcctgtaatcccagctattggggaggctgaggctggagaatcacttgaacccaggaggcggaggttgcagtgagccgaggttgcgctccagcctgggcttcagagagagacgctgtctcaaaaaaaaataaaataaaaataaatgtatattagtacccttagtaaatatgcaggtgaaggttttccaagttttcacagaaaaaaaaatccgcatttctctgcctagatcttcaggaactagtacattggcagttttcagtaagactcctctctgtcactgccatacgaaaaagaaagcctatgggttttgtttttgttttgtagtgggaaaagttggcctcataattggccctggattccaggactttttttttcggtagtgtgtcttaaccttctgacagctgctgtgacgaagctagaaagcttaatgagactgtgtggtaaaggatcctgatgttcgaaaaaaaaaagtatataccgaggccaggcacagtggctcatgcctgtgatcccagcactttgggacgctgacgcaggggaatcacctgaggtcaggagttcgagaccagcgtggccaacatggcaaaaccccatctctactgaaaatacaaaaattagccaggactgttggtgtgcacctgtaatcccagtactccagaggctgaggcaggagaattgggaggtggaggttgcagtgagccgagatcgcactactacactccagcgtgggcaacagagtgagactccctttcaaaaaaaaaaaaaaaagaaaaaagtgtatactattttttcaactcaggtttctttcaactttgtcactctattaactaaatttccctcagtcattagtaagagttcaaactttttcctcctggaacttattgaaacatcctcaaagaggatagatttttaaaaaactgtgaaagtgggccgggcgcagtggctcacgcctgtaatcccagcactttgggaggccgaggcaggcagatcatgaggtcaggagatcaagaccatcctggccaacatggtgaaactccatctctactaaaaatacaaaaattagctgggcgtggtggcatatgcctgtaatcccagctactcaggaggctgaggcaggagaatcgcttgaaccagggagtcaagaggttgcagtgagctgaaatggcaccacagcactccagcctggcgacagagcgagacctgtctcaaaaaaaaaaaaaaaaaaaaaaaaaacctgtgaaagcgtcatatgagaaactggaggtaactgtggatcatcttgctagacattctttgtactctcactgagaccctttctgcgtggaatacttgctcttcattgtgactctcaaaggcagacagaaccaagtgttctgattcaccaagagcttttgtctcctaatgaattactttgtctccctttaccaccatttctcagaatctcagagtacttcattggcatgatcagatggcactgcgattcttcctattattagcactgctggctaaaacataaaagcggtgaagaccaaggccagagcttaaactcataggggtcattcaactctgtttttattagttgtccttggtttatactgttaacctcagctaggcatcacattaagtataagtacttattcacaataaataatgaactagggccaattcagcatcatgaatgaaaaaccagtgcaggccgggcgtggtggctcacgcctgtaatcccagcactttgggaggccgaggcaggcggatcacgaggtcaggagatcaagaccatcctggctaacacggtgagacccccatctctactaaaaatacaaaaaattagccaggagtggtggcgggtgcctgtagtcccagctactgggtgaggcaggagaatggcgtgaacccgggaggcagagcttgcagtgagccgagattgcgccactgcactccagcctgggtgacagagtgagactccgtctcaaaaaaaaaaaaaaaaagaaaaaccagtgcaaaacatgtgctgtactaacggcaagtcagaagtgtcatcctcaagtacaaagatgaggacagatacagatgcctgaagggaggatatgagccgtgtcttagaggctcagagtgtgttaacaggagtctgacagtagaacgttggcccctcgatctttagtctgactttaggtatacattatgtatagcatactacaaaatgaatttttacttagtcctagacatatccagatcattgtgggacaaatgatctatcctttgtctctataaaagaacgtaatcactaataataagcttttctacctacagagtctctctgagaaatcaaggaaagtattccgaatatttcggcagtgggaatctctgtgctcatgctgaagatactccagcgccttcctggagatagctggaatgagagtgactttttgaaaaattaaggctgagttcctttcggtcagctgacactaagtttttcctgttctgggttaatcataaggagccccctgccatagcaaaggcagtgagtgtcaactatctgcatctggctgagagagacccgtttcctttcagggatgtggacagggtaagggcagcaagcatggttctgttaaaggagtgtgggattaacagactagaaggaagactaaggacctgaccacccatttcagcatcttcaatgtggagcagtgttctgaggactcttctatcctaggactatgacagtgtgtattaataaaatatttgctaagattctcattgttggagaactgttttcccccttgccctgtgggccggagaaacttcagtggaacattcaacttttgattttcagattggctgcaaagcctaaaatttgtgattccagtcaaggaggtataatctttcctaaaccaaaagcaagatgattttcattatgccaccaggaaatttcctggtgtgttatagtgaatggtcaactgataattttctccttgctttgataataacagaataaaacaatgtaatggggaggaaggcacttcagaagagacccctctccatgtgccattgaatgcatgagtcccccagttgggcttccccaagactcgttgcttttgggggatcatcagtttttgtggtagagaaggtggaccctgaactgcccactgataaagtaaccatgacctagcaaaggctagaaagtgattattctctgatatgccatgtttttcgtcactgagattgttt

SEQ ID NO: 5710 - DNA, 100 bp, Homo sapiens
tcacgcctgtaatcccagcactttgggaggccgaggctggcggatcacgaggtgaggagatcgagaccatcctggctaacacggtgaaacaccatctcta

SEQ ID NO: 5711 - DNA, 650 bp, Homo sapiens
ctcccatctgtctctccttcaggacaacaagtgattgaagagcagcggcggcgactggctgagctgaagcagaaagcggcagctgaggcacagtgccagtgggatgcccttcacggggcagcacccttcccagcgggcccctcgggcttcccccctctcatgcaccactctatcctacaccacctgcctgcggggcgggagcgtggggaggagggtgagcacgcctatgatacgctgagtctggagagctctgacagcatggagaccagcatctccaccgggggcaactcggcctgctcccctgacaacatgtccaggtacacccgacgcctgggcccgcagcctccctcagccaccgcctcagctccttgatgcacttcctcttccccttctctccccagcgcgagtggtctggacatggggaagatcgaggagatggagaagatgctgaaagaggctcatgcagagaagaaccggctcatggagtcgagggtgagtctgacctggatcggggaggcagaaggtgttggggcacagagctacctactgcatgtcaagggcctgtgctccaccccaagcccttccacccacattagccttgccacattcccttggggtagaaaatgttttaaaaggttgtattctggccg

SEQ ID NO: 5712 - DNA, 7086 bp, Homo sapiens
aggagcgcctggccatcctggacagtcaggctgggcagatccgggctcaggccgtgcaggaatcagcaacgcctggcccgggacaagaatgcctccttacagctgctgcaaaaggtaggtcctgaggttggccgggagatttggagtaggtaagtggaggggagtgcagaaggactggggtgtaaatgtgctggggtggagcacagggcccccctcacacagtctcctggctcccactcctctttgactctgccattctgggctcgcaggagaaggagaagctgactgtgctggaaaggagataccactcactcacagggggcaggcctttcccgaagaccacatcgaccctcaaagaggtatcatgattggattagccccagcttcaggcccaaggcgtgtcctgggaggctctgagtaacacatggcactttcaccccagtagctgaggttgtgtgggggcatcttcctgaatgggagagatttgaggaggaatggccccaagctctgggatttgattttccatggctgccagctgcctctgtttagttgcctctggggttcccaggagcccacagatttcactgtttttggtggctgaatatatgtggggggactcaggggcctggttgggtggttagacagctcagaggcttggtaggggccgggctggatggactcaccttgaaggggagcatagggatataggggtgctgatcctggggctcttgggcttcagtcctgagttaggcatttgtctcagaagaggatattgaggccccttaagtggttcttccccaagtctgtatgtctggtgtgtgaattccaaatagaacatatctggtttaccaacttcgttccctccctccctccctccctgcctcactacacaaacaatttaggcctgcggtggggaactgggccaagtgtgagggatgcagcccctcaccatgtcccctctctgtaggccgagctgctcatctccgagtcctcagagatggggctggggactaaggctctgggccttttcccagggtcttctcaggctggggcctcctctgtctctttaaccccacctgcttccactcttctctgccccaaagcacaagaggtaatcacagctaactgcgtgctctgctttgcccactgcctgtctgcctgcccgctgagcccctgcctacagctcctcccagggcttagctgaagggcatgtggtgatagtttcttggctggccagagtttgggagagtgtgtgcgagcatgccatgccgccattccatagagtgcctgtgcagcccattgaattgcatatttatttgccatgcagaatataattctgcatgccattcattagttctcacaacatgctggaccctctgactgactttccttttccatgaccccagaggacaacctggttctagagctaggcctggatgggccccttgggtagagcaggcttatgatcctgcgctttgattcagcatgcattgtggaggtctaccatgctcccagcacccagataagctcagtttctaaggacaggtgatgaatacgacagtccctatcctcccgacccacagttgaatgtgttggcatctttccaaggactcaccttgggcagtgggcccatttttctgctaggcttttagctgttcttgctaaggcctctttctcacagcccatcttgctcaggccctggtgatgtctccaccttcccccacctgtttctagctcctgtccaggctgatggggtgtgaggggaccctggggaatggtgtgactggtgctcaatgctgcatgtgtgtgccccactggggactgccaggttgttggggacggggagggggtctctggaagctgggttctgatcctcagtgaactcttagaaggccttctgtgggcttctttgcctgcccccagcccagggcgaattcaggcatgggccttcagggtctgcttggggcaggactggatgccaaagtggctctttaagagtggagggcaggaggagccttcagacagttggttctgctgcccttttctggtctctgtcactccctgcagccatctatgggcatagcaggcaccctacccctgccttggattttgtattgacatggagtgatggccctgtggcctggcatggagtttggggtgttgggcaccttattgaaccctgttaaccccttctttgcccacccctaccccttctactgggcaccccaggaatatgtgaccctggcagaagttttccagctgtgttcccgcttggacccctatgcttctgccacttcccccagtgtgctcgcccagcccctgcctgacagtgaggtaccagccaccgagggtgcccaccaatgcccaaggacctctttatggatggcctagattcccccttgggcctgggtggagctagggggacagaagggtctgtgttcgacagtgagggagaagggcagcctgcataaggggaggttgggagtggtttctttttttccctggggccttgggagctttctttagctcctatggcctggggaggggcacgccttctgctctaggatgagggtgtcgagttgagaggactctggctttcctaggctgcaggctctgtactttctgccctttccctcccttcccctgtgggtagggccatctcatgtgttctggttccattaacctcttatattccctcctgcgtctggccttgctccaagtacgtgatgcttgagcagctaaaggtgatgcggggcacctcgcccatgcccccagcccctgtgccaggcctttctccctgggcctccgcctcccgggacctggttcccaccacctgccttcctcccatgctgccctcctcctcgttcgcttccatcacgccttcacctaaggttggtggtttgtgagttcttgctacccccacccatgactggtgtgctctgtgtgtgttttgctcctgctcacctggcctcttggctctgggccagcccaaggggagtgcccagtgcctgcaggctctgtctggtggctggtttcatggctggtgtagcacatgtctgtggtctggaagttgtaccctgactgtttctctttgcccttagtacattcagggcaactgttgtctcactgtttttctcttctttttcttgatgctctcctttctcccttccttcctccccttcttccttcaccttcctgtccatttccctgatgtggccttcctttttaaccttccccttccttcttcctcttctttcttctttctcccttctcctgccttttcctttccctttatttcctggcctttcctctccatcctcccctcctgtccccttttcccctccccattcccacctccagatggagaagctgctgctccctgctgtagacttagagcagtggtaccaggagctgatggccgggctggggactggccccgctgcagcctcccctcactcttctcccccgcctctgcccgccaaagcttcccgtcagctgcaggtaacccctccttcactgcccgtcctccccagcctttgcacctgtccactctgatacctcctgccaatccatcagccacacagtaccaccttgagtggaggcgtcagcccagtcagggcaatgagggcacctctgggccctgagagggtcactccttgggcagccatcctggcatgtgggcaaccggggggccagcctccatagtctaaaactatctgattgagtgtctggtggaagaggattctggagctgtggtcagtttgggatctgtttggtgccctgtgctgagctaggctgtgggtctggcctatgcttggcagcccccaacacctggagcttctcacccagtctgggggcctgacaggctcttgggcctgtggcaactggaactagtgtgtcctgggaagaactgccagtattttgttctcctggtctctccagcagtgacacttggaagcagaaaacaaagggcaaagactctgaagtgacagcctaagcctcctcagagttgccatggagggcgtgggcctacctgaacctgcagcaagcaactgaccatggggtgggaaagggggctgggctagtcttctcctcaggtttcctccactgaccagctgcagtgcctaagattgaccatttaagatcaccccttgagtgaaggcactgcatctgtaagactgtgacctcagctaaaatttcatgtttccttggggaggagtttgatcatgtaagacttctactgtgtacccagctggttagagattttaacgtgttttgattctctgatcatcatcataggcctttgaggtagatgaagttaactcattttatagatgaaacactggggcctagagaagataagtaatctctccaaggccacacagctaggaagtagcagagcttatgccacgtcagggtttgtgacactaaaggccatattcaccacatgctagtgctgcaggggagcttggccattatttagtctagtcctacccccttcttttgcagataaggaagccaaggcccagagtagggaggtgtgtggcccaaggtcacacagcctgttagtggcagagctaggaccagagggaacccagcttctagttggtctcctgcacaactgcctgactgacattaaatccttgcatgggtctgtttacaggtcttttcttagacccagggttgggctagggattggcccagggaggaacagcctggaaaggagaattggcagctgccaatagcatctggccattgggctggctcaggaggcttgttgtcagagccagaaggcctcagaggcctagtgccagggcggtacgtcagatcacagcagactaggtgacatgggggaggtggccaatgggggagccaggaatcactgggcactatcttttctttccaggtttaccgctccaagatggatggcgaggccaccagcccccttccccggacccgcagcggccccctcccctcctcctctggctcttcctcctcctcctcccagctcagcgtggctacctggggcgtagcccctccccaaaggtctgaggacagtggtggggctgcacatgtggctggggatggagacttccaccctggggagaggccaagaccttgggaatgggggtaagggccttctgagcccaggtccgaactctccattcctctgcagagcgctctactcacccagaatggcacgggcagccttcctcgcaacctggcagccacactgcaggacatcgagaccaagcgccaactagctctgcagcagaagggtgagtgactgccccgccagcccacctgctctcctgaggggaccctgggtagttgccatgcctcctctatgctcacacctttcacaggatgtttttcctttaattgggatctaggcaagaccagaaaggatttagagtgggtacctaaagaagagcttcctggatatttatctaaagccttcagggcaggagactaagggcttagggggctgtgacatctttcctagagagcctagccaataagggaactgcttgttgacctgagtcgggttagacattgccctctctggagggaggggatggatttgatgacttctagaaatggttgcctgagatattggctctggggacccaggagtccttgttgcttgtgtgcaatttggttgttttgaaagcccatgtctgtgcctctctctcctcttaccccctctgtgtctctaccgtaccctctgcctggggtcccccacgccagtcgagtcgcttcccgccgagcccctcccaaccgacgacccagcaggtagaacgttggtcatagagggcattgctttggccaggcagcccctgccctggcatcagcatgatgtgtcctgcccaggtccccactgcctgcaggcagggtcccaggctgagctgggttggggtgtctgctggcctcacccctccagctggcctctcttctgccctcatctgtgctctaccgtgtctcccctgccttctttcttgcgtttgttgcttttgcttctgcattgcaggggggtctgcattggcagtctgggtgctcatggggtttctgccatctcttccttctcccttctccagcaggcagggtgggtgcatgtatcctgcctagacctacttaggccttggttgtgagctggagccaactggctgtcgtgctgccccagcactacttgggtaggtttggtgtcctatatggactcagggtgcgaaagagcactgaagccagactgtgcatctgtggccggttgtgcaggcgactgaagcattggcagagcagccaggcctggagctgcaggggccttagggaagctgcggggagagggggctgctctgtgttaacctctccctgcttgcccctccctctgtgtgttgtgctgccagtggcctgctccttagctgcgtggggagcccactgtgactcccatctgtctctccttcaggacaacaagtgattgaagagcagcggcggcgactggctgagctgaagcagaaagcggcagctgaggcacagtgccagtgggatgcccttcacggggcagcacccttcccagcgggcccctcgggcttcccccctctcatgcaccactctatcctacaccacctgcctgcggggcgggagcgtggggaggagggtgagcacgcctatgatacgctgagtctggagagctctgacagcatggagaccagcatctccaccgggggcaactcggcctgctcccctgacaacatgtccaggtacacccgacgcctgggcccgcagcctccctcagccaccgcctcagctccttgatgcacttcctcttccccttctctccccagcgcgagtggtctggacatggggaagatcgaggagatggagaagatgctgaaagaggctcatgcagagaagaaccggctcatggagtcgagggtgagtctgacctggatcggggaggcagaaggtgttggggcacagagctacctactgcatgtcaagggcctgtgctccaccccaagcccttccacccacattagccttgccacattcccttggggtagaaaatgtttacaaggtgtattctggccg

SEQ ID NO: 5713 - DNA, 7388 bp, Homo sapiens
aggagcgcctgccatcctggacagtcaggctgggcagatccgggctcaggccgtgcaggaatcagaacgcctggcccgggacaagaatgcctccttacagctgctgcaaaaggtagggtccctgaggttgggccgggagatttggagtagggtaagtgggaggggagtgcagaaggactggggtgtaaatgtgctggggtggagcacagggcccccctcacacagtctcctggctcccactcctctttgactctgccattctgggctcgcaggagaaggagaagctgactgtgctggaaaggagataccactcactcacagggggcaggcctttcccgaagaccacatcgaccctcaaagaggtatcatgattggattagccccagcttcaggcccaaggcgtgtcctgggaggctctgagtaacacatggcactttcaccccagtagctgaggttgtgtgggggcatcttcctgaatgggagagatttgaggaggaatggccccaagctctgggatttgattttccatggctgccagctgcctctgtttagttgcctctggggttcccaggagcccacagatttcactgtttttggtggctgaatatatgtggggggactcaggggcctgggttgggtgggtagacagctcagaggcttggtaggggccgggctggatggactcaccttgaaggggagcatagggatataggggtgctgatcctggggctcttgggcttcagtcctgagttaggcatttgtctcagaagaggatattgaggccccttaagtggttcttccccaagtctgtatgtctggtgtgtgaattccaaatagaacatatctggtttaccaacttcgttccctccctccctccctccctgcctcactacacaaacaatttaggcctgcggtggggaactgggccaagtgtgagggatgcagcccctcaccatgtcccctctctgtaggccgagctgctcatctccgagtcctcagagatggggctggggactaaggctctgggccttttcccagggtcttctcaggctggggcctcctctgtctctttaaccccacctgcttccactcttctctgccccaaagcacaagaggtaatcacagctaactgcgtgctctgctttgcccactgcctgtctgcctgcccgctgagcccctgcctacagctcctcccagggcttagctgaagggcatgtggtgatagtttcttggctggccagagtttgggagagtgtgtgcgagcatgccatgccgccattccatagagtgcctgtgcagcccattgaattgcatatttatttgccatgcagaatataattctgcatgccattcattagttctcacaacatgctggaccctctgactgactttccttttccatgaccccagaggacaacctggttctagagctaggcctggatgggccccttgggtagagcaggcttatgatcctgcgctttgattcagcatgcattgtggaggtctaccatgctcccagcacccagataagctcagtttctaaggacaggtgatgaatacgacagtccctatcctcccgacccacagttgaatgtgttggcatctttccaaggactcaccttgggcagtgggcccatttttctgctaggcttttagctgttcttgctaaggcctctttctcacagcccatcttgctcaggccctggtgatgtctccaccttcccccacctgtttctagctcctgtccaggctgatggggtgtgaggggaccctggggaatggtgtgactggtgctcaatgctgcatgtgtgtgccccactggggactgccaggttgttggggacggggagggggtctctggaagctgggttctgatcctcagtgaactcttagaaggccttctgtgggcttctttgcctgcccccagcccagggcgaattcaggcatgggccttcagggtctgcttggggcaggactggatgccaaagtggctctttaagagtggagggcaggaggagccttcagacagttggttctgctgcccttttctggtctctgtcactccctgcagccatctatgggcatagcaggcaccctacccctgccttggattttgtattgacatggagtgatggccctgtggcctggcatggagtttggggtgttgggcaccttattgaaccctgttaaccccttctttgcccacccctaccccttctactgggcaccccaggaatatgtgaccctggcagaagttttccagctgtgttcccgcttggacccctatgcttctgccacttcccccagtgtgctcgcccagcccctgcctgacagtgaggtaccagccaccgagggtgcccaccaatgcccaaggacctctttatggatggcctagattcccccttgggcctgggtggagctagggggacagaagggtctgtgttcgacagtgagggagaagggcagcctgcataaggggaggttgggagtggtttctttttttccctggggccttgggagctttctttagctcctatggcctggggaggggcacgccttctgctctaggatgagggtgtcgagttgagaggactctggctttcctaggctgcaggctctgtactttctgccctttccctcccttcccctgtgggtagggccatctcatgtgttctggttccattaacctcttatattccctcctgcgtctggccttgctccaagtacgtgatgcttgagcagctaaaggtgatgcggggcacctcgcccatgcccccagcccctgtgccaggcctttctccctgggcctccgcctcccgggacctggttcccaccacctgccttcctcccatgctgccctcctcctcgttcgcttccatcacgccttcacctaaggttggtggtttgtgagttcttgctacccccacccatgactggtgtgctctgtgtgtgttttgctcctgctcacctggcctcttggctctgggccagcccaaggggagtgcccagtgcctgcaggctctgtctggtggctggtttcatggctggtgtagcacatgtctgtggtctggaagttgtaccctgactgtttctctttgcccttagtacattcagggcaactgttgtctcactgtttttctcttctttttcttgatgctctcctttctcccttccttcctccccttcttccttcaccttcctgtccatttccctgatgtggccttcctttttaaccttccccttccttcttcctcttctttcttctttctcccttctcctgccttttcctttccctttatttcctggcctttcctctccatcctcccctcctgtccccttttcccctccccattcccacctccagatggagaagctgctgctccctgctgtagacttagagcagtggtaccaggagctgatggccgggctggggactggccccgctgcagcctcccctcactcttctcccccgcctctgcccgccaaagcttcccgtcagctgcaggtaacccctccttcactgcccgtcctccccagcctttgcacctgtccactctgatacctcctgccaatccatcagccacacagtaccaccttgagtggaggcgtcagcccagtcagggcaatgagggcacctctgggccctgagagggtcactccttgggcagccatcctggcatgtgggcaaccggggggccagcctccatagtctaaaactatctgattgagtgtctggtggaagaggattctggagctgtggtcagtttgggatctgtttggtgccctgtgctgagctaggctgtgggtctggcctatgcttggcagcccccaacacctggagcttctcacccagtctgggggcctgacaggctcttgggcctgtggcaactggaactagtgtgtcctgggaagaactgccagtattttgttctcctggtctctccagcagtgacacttggaagcagaaaacaaagggcaaagactctgaagtgacagcctaagcctcctcagagttgccatggagggcgtgggcctacctgaacctgcagcaagcaactgaccatggggtgggaaagggggctgggctagtcttctcctcaggtttcctccactgaccagctgcagtgcctaagattgaccatttaagatcaccccttgagtgaaggcactgcatctgtaagactgtgacctcagctaaaatttcatgtttccttggggaggagtttgatcatgtaagacttctactgtgtacccagctggttagagattttaacgtgttttgattctctgatcatcatcataggcctttgaggtagatgaagttaactcattttatagatgaaacactggggcctagagaagataagtaatctctccaaggccacacagctaggaagtagcagagcttatgccacgtcagggtttgtgacactaaaggccatattcaccacatgctagtgctgcaggggagcttggccattatttagtctagtcctacccccttcttttgcagataaggaagccaaggcccagagtagggaggtgtgtggcccaaggtcacacagcctgttagtggcagagctaggaccagagggaacccagcttctagttggtctcctgcacaactgcctgactgacattaaatccttgcatgggtctgtttacaggtcttttcttagacccagggttgggctagggattggcccagggaggaacagcctggaaaggagaattggcagctgccaatagcatctggccattgggctggctcaggaggcttgttgtcagagccagaaggcctcagaggcctagtgccagggcggtacgtcagatcacagcagactaggtgacatgggggaggtggccaatgggggagccaggaatcactgggcactatcttttctttccaggtttaccgctccaagatggatggcgaggccaccagcccccttccccggacccgcagcggccccctcccctcctcctctggctcttcctcctcctcctcccagctcagcgtggctaccctggggcgtagcccctccccaaaggtctgaggacagtgggtggggctgcacatgtggctggggatggagacttccaccctggggagaggccaagaccttgggaatgggggtaagggccttctgagcccaggtccgaactctccattcctctgcagagcgctctactcacccagaatggcacgggcagccttcctcgcaacctggcagccacactgcaggacatcgagaccaagcgccaactagctctgcagcagaagggtgagtgactgccccgccagcccacctgctctcctgaggggaccctgggtagttgccatgcctcctctatgctcacacctttcacaggatgtttttcctttaattgggatctaggcaagaccagaaaggatttagagtgggtacctaaagaagagcttcctggatatttatctaaagccttcagggcaggagactaagggcttagggggctgtgacatctttcctagagagcctagccaataagggaactgcttgttgacctgagtcgggttagacattgccctctctggagggaggggatggatttgatgacttctagaaatggttgcctgagatattggctctggggacccaggagtccttgttgcttgtgtgcaatttggttgttttgaaagcccatgtctgtgcctctctctcctcttaccccctctgtgtctctaccgtaccctctgcctggggtcccccacgccagtcgagtcgcttcccgccgagcccctcccaaccgacgacccagcaggtagaacgttggtcatagagggcattgctttggccaggcagcccctgccctggcatcagcatgatgtgtcctgcccaggtccccactgcctgcaggcagggtcccaggctgagctgggttggggtgtctgctggcctcacccctccagctggcctctcttctgccctcatctgtgctctaccgtgtctcccctgccttctttcttgcgtttgttgcttttgcttctgcattgcaggggggtctgcattggcagtctgggtgctcatggggtttctgccatctcttccttctcccttctccagcaggcagggtgggtgcatgtatcctgcctagacctacttaggccttggttgtgagctggagccaactggctgtcgtgctgccccagcactacttgggtaggtttggtgtcctatatggactcagggtgcgaaagagcactgaagccagactgtgcatctgtggccggttgtgcaggcgactgaagcattggcagagcagccaggcctggagctgcaggggccttagggaagctgcggggagagggggctgctctgtgttaacctctccctgcttgcccctccctctgtgtgttgtgctgccagtggcctgctccttagctgcgtggggagcccactgtgactcccatctgtctctccttcaggacaacaagtgattgaagagcagcggcggcgactggctgagctgaagcagaaagcggcagctgaggcacagtgccagtgggatgcccttcacggggcagcacccttcccagcgggcccctcgggcttcccccctctcatgcaccactctatcctacaccacctgcctgcggggcgggagcgtggggaggagggtgagcacgcctatgatacgctgagtctggagagctctgacagcatggagaccagcatctccaccgggggcaactcggcctgctcccctgacaacatgtccaggtacacccgacgcctgggcccgcagcctccctcagccaccgcctcagctccttgatgcacttcctcttccccttctctccccagcgcgagtggtctggacatggggaagatcgaggagatggagaagatgctgaaagaggctcatgcagagaagaaccggctcatggagtcgagggtgagtctgacctggatcggggaggcagaaggtgttggggcacagagctacctactgcatgtcaagggcctgtgctccaccccaagcccttccacccacattagccttgccacattcccttggggtagaaaatgttttaaaaggttgtattctggccgggcgcggtggctcatgcccgtaatcccagcacttcaggtggccgaggcaggcggatcacgaggtcaggagatcgaaaccatcctggctaacacggtgaaaccccgtctctactgaaaatacaaaaaattagctgggcgtggtggcaggcgcctgtagtcccagctgcgcgggaggctgaggcaggagaatggcgtgaacccgggaggcggaggttgcagtaagccgagatcgcaccactgcactccagcctgggagacagagcgagactccgtctccaaaaaaaaaaaaaaaaa

SEQ ID NO: 5714 - DNA, 2355 bp, Homo sapiens
accgctccaagatggatggcgaggccaccagcccccttccccggacccgcagcggccccctcccctcctcctctggctcttcctcctcctcctcccagctcagcgtggctaccctggggcgtagcccctccccaaaggtctgaggacagtgggtggggctgcacatgtggctggggatggagacttccaccctggggagaggacaagaccttgggaatgggggtaagggccttctgagcccaggtccgaactctccattcctctgcagagcgctctactcacccagaatggcacgggcagccttcctcagcaaccttggcaagcccacaactgcaaggaacaatcgtagacacaagcgccaactagctctgcagcagaagggtgagtgactgccccgccagcccacctgctctcctgaggggaccctgggtagttgccatgcctcctctatgctcacacctttcacaggatgtttttcctttaattgggatctaggcaagaccagaaaggatttagagtgggtactctaaagaagagcttcctggatatttatctaaagccttcagggcaggagactaagggcttagggggctgtgacatctttcctagagagcctagccaataagggaactgcttgttgacctgagtcgggttagacattgccctctctggagggaggggatggatttgatgacttctagaaatggttgcctgagatattggctctggggacccaggagtccttgttgcttgtgtgcaatttggttgttttgaaagcccatgtctgtgcctctctctcctcttaccccctctgtgtctctaccgtaccctctgcctggggtcccccacgccagtcgagtcgcttcccgccgagcccctcccaaccgacgacccagcaggtagaacgttggtcatagagggcattgctttggccaggcagcccctgccctggcatcagcatgatgtgtcctgcccaggtccccactgcctgcaggcagggtcccaggctgagctgggttggggtgtctgctggcctcacccctccagctggcctctcttctgccctcatctgtgctctaccgtgtctcccctgccttctttcttgcgtttgttgcttttgcttctgcattgcaggggggtctgcatatggcagtctgggtgctcatggggtttctgccatctcttccttctcccttctccagacaggcagggtgggtgcatgtatcctgcctagacctacttaggcctggttgtgagctggagccaagctggctgtcgtgctgccccagcactacttgggtaggtttggtgtcctatatggactcagggtgcgaaagagcactgaagccagactgtgcatctgtggccggttgtgcaggcgactgaagcattggcagagcagccaggcctggagctgcaggggccttagggaagctgcggggagagggggctgctctgtgttaacctctccctgcttgcccctccctctgtgtgttgtgctgccagtggcctgctccttagctgcgtggggagcccactgtgactcccatctgtctctccttcaggacaacaagtgattgaagagcagcggcggcgactggctgagctgaagcagaaagcggcagctgaggcacagtgccagtgggatgcccttcacggggcagcacccttcccagcgggcccctcgggcttcccccctctcatgcaccactctatcctacaccacctgcctgcggggcgggagcgtggggaggagggtgagcacgcctatgatacgctgagtctggagagctctgacagcatggagaccagcatctccaccgggggcaactcggcctgctcccctgacaacatgtccaggtacacccgacgcctgggcccgcagcctccctcagccaccgcctcagctccttgatgcacttcctcttccccttctctccccagcgcgagtggtctggacatggggaagatcgaggagatggagaagatgctgaaagaggctcatgcagagaagaaccggctcatggagtcgagggtgagtctgacctggatcggggaggcagaaggtgttggggcacagagctacctactgcatgtcaagggcctgtgctccaccccaagcccttccacccacattagccttgccacattcccttggggtagaaaatgttttaaaaggttgtattctggccgggcgcggtggctcatgcccgtaatcccagcacttcaggtggccgaggcaggcggatcacgaggtcaggagatcgaaaccatcctggctaacacggtgaaaccccgtctctactgaaaatacaaaaattagctgagcgtgtggcaggcgcctgtagtcccagc

SEQ ID NO: 5715 - DNA, 104 bp, Homo sapiens
atcccagcacttcaggtggccgaggcaggcggatcacgaggtcaggagatcgaaaccatcctggctaacacggtgaaaccccgtctctactgaaaatacaaaaa

SEQ ID NO: 5716 - DNA, 421 bp, Homo sapiens
ttggtgttctcacctataaaatgggtataaatgcacctgcctcataaaggagcttattaaattacgtaacaaatgcaaaacatttagcagagttcctggctcctaatgggttcttagtagatggcagctcttgcggtgaggattactgcctagcctactttgttgttgttgttgattttgagacagagtctcgctgttgtcgcccaggctgggttgcaatggtgtgatctcacctcactgcaacctccacctcccaggttcaagcgattctcctgcctcagcctctcaagtagctgggattacaggtgcccccccaaccccacacctggctaatttttgtatttttggaagaggtgggatttcactctgttggccaggctggtctcaaactcctaacctcaggtgatccagcctcctcagc

SEQ ID NO: 5717 - DNA, 421 bp, Homo sapiens; identical to SEQ ID NO: 5716

SEQ ID NO: 5718 - DNA, 790 bp, Homo sapiens
caaaggccagaaaggcagggggaaggactgacaaaccaaaggctcctgagtgagtggaccaccaatggatggtggcatcaacacacagtttggtgattttcttcagcagggctgcccatgtgaggcgtagaatggatgctgagagccacaggtctgtaggacagaacagcccaagccatcctccaggggttccaccagattataaacacctagattttaaagctcatgttgcacactggagaaaacatgggctttggaggcggcaaactgaaagtcattacctcctgctaagcgttctgcctcacctgagcctgggtcctctagtttgttaggatccatgcctccccctgccccccagaagggcactgtaaagactaaatgagataaggctgtggaagaccccagcatctccccagggtccacagaaggtactgaattaaatgttaatttttttccttgtatgggaagatacttattcctttgtctcttctgactgcataaatactgaattgtatgtatcatatttgcattttttaaaatctccagatctaaatttataaaaatagattctttgctttgtacaagcgttcacagcagggttcttttcagtagcaacagcccccacaacatttaaaacatggttcagttgacagtgatttcagggacacatcttaggcctaagcataaacgcgtatgtgttgtggttgtgaccctagaaagagggatttaccaaccaagcataggtgctgacgtcacgatccccagcttcccttgacccagatactgtttt

SEQ ID NO: 5719 - DNA, 789 bp, Homo sapiens
caaaggccagaaaggcagggggaaggactgacaaaccaaaggctcctgagtgagtggaccaccaatggatggtggcatcaacacacagtttggtgattttcttcagcagggctgcccatgtgaggcgtagaatggatgctgagagccacaggtctgtaggacagaacagcccaagccatcctccaggggttccaccagattataaacacctagattttaaagctcatgttgcacactggagaaaacatgggctttggaggcggcaaactgaaagtcattacctcctgctaagcgttctgcctcacctgagcctgggtcctctagtttgttaggatccatgcctccccctgcccccagaagggcactgtaaagactaaatgagataaggctgtggaagaccccagcatctccccagggtccacagaaggtactgaattaaatgttaatttttttccttgtatgggaagatacttattcctttgtctcttctgactgcataaatactgaattgtatgtatcatatttgcattttttaaaatctccagatctaaatttataaaaatagattctttgctttgtacaagcgttcacagcagggttcttttcagtagcaacagcccccacaacatttaaaacatggttcagttgacagtgatttcagggacacatcttaggcctaagcataaacgcgtatgtgttgtggttgtgaccctagaaagagggatttaccaaccaagcataggtgctgacgtcacgatccccagcttcccttgacccagatactgtttt

SEQ ID NO: 5720 - DNA, 6153 bp, Homo sapiens
actgaatgtgagagctgctgtacccctgctgctgtgggctgggaaggctgtttaagcactgcaggagacatgtatggagaaaagacttcagtataattgcaatcacaacccacgcactgacactttcccataacacacattaagagtgacatggtgccaggccgggcgcggtggctcacgcctgtaatcccagcactttgggaggccaaggcaggcggatcacaaggtcaggagatcgagaccatcctggctaacacggtgaaaccccgtctctactaaaaatacaaaaatttagccgggcgtgatggcgggcgcctgtggtcccagctactcgggaggctgaggcaggagaatggtgtgaacccgggaggcggagcttgcagtgagccgagatggcgccactgcactccagcctgggcgacagaggtgagactctgtctcaaaaaaataaaaataaaataaaattcagggccctgaatctgcgtattacctacccccaccccatcatgtgcagctatctgtaactgcacagactttaatacaaatttctagtcctgtcctaacatcttggggagggaagacctgctgctgccttgaagacccacagtggcagcaacagcccactaaattgcagaaggacgccgctgtagtagaaggtacagtggaatagtttgaaagtttgaactcacgttttttacttcctctgctgcagtccagggctcacttgaaaagctaaaaccttacctgctaggagctccaggctgctgttatcaggtgcgtcctcagtgccctgggctgagtcctttttttctagggttagctgcttaaaaaaattagaagtcctaagtgagttttgtagaaacatgaacgagccctagtgaaacaggagtgtgcctggtggcttcactgacctcacaaggttatctgccctcacctggaactccctcttcctcctggctcatgaatccccctacccaccctccagtcttcaaggtttccctctgtggatccttctccactctggccattcacggcacatcctttcttctctgagctccagtctcttggctactgcctgcccattcctcgggctctgcatactctgcaagtatcctgtgtgcccattcatcaagtaatgtgcaaatgtccattttctacaccctaaatcccttcaaaggcaagggccatcatgcctttatcactttacagctagcagagtgccttacaccaggtaagtttgactgagaaagtcaaacctgggaagccacagggtatattctgtagtcatcggtagcctcctagagccctgccacactggttagttcaataatttggacagagaaaaagaggttcttactgagaccagaacccaatcctcccagctccttttcaagaatacagatgtataaaaataggtatcttcttcctcaaaattaaaaattcatagccaggcgcggtggctcatgcctgtaatcccagcactttgggaggccgaggcaggcagatcacctgaggtaaggagttcgagactagcctggccaacatggtgaaactccgcctgtactaaaaatacaaaaattagctggctgtggtggtgggctcctgtaatcccagctactcaggaggctgaggcaggaaaattgcttgaacctgggaggtggatgttgcagtgagctgagatcacgccattgcactccagtctgggtgatgagtgagactccatctcaaaaaaaaaaaaaaaaaattaaaaatttgtgcttctcggccaggtgcagtggctcaagcctgtaatcccagcactttgggaggccgaggcaggcggatcatgacgtcaggagattgaaaccatcctggctaacacagtgaaaccccgtctctattacaaatacaaaaaaattagccaggcgtggtggcaggcgcctgtagtcccagctatgcggtaggctgaggcagaagaatggcgtgaacccagaaggcagagcttgcagtgagccaagatcacaccactgcactccagcctgggcgacagagtgagactctgtctcaagaaaataaaaataaaataaaatttgtgcttcctatgaacaaaagtgaaaagtcaatccacaagaatgggagaagacatttacaaatcatacctgctaaggtactgttacccaaattaaagaactctttttaaaatttatttataggccacgcacggtagctcacgcctataatcccagcactttgggagactgagccaggcagataatgaggtcaggagtttgagaccagcctgaccgacatggtgaaaccccgtctctactgaaaatacaaaaattagccaggcgtggtggcgcacacctgtaatcccagctactcaggaggctgaggcaggagaatcacttgaacccgggaggtagaggttgcagtgagctgagaatgctccccttcactccagcctggggggcagggcaaaaatccatttctacaaaaaaaaaaaaaaaaaatcatattttctgtagtgacgaggtctcactatgttgcccaggctggtctcaaactcctgggctcaagcgatcctcccacctccgcctcccaaagtgctggggattacaagtgtgagccaccttgcctggcccaaggtaaagaactctcataactcaataatttaacaaaccaatttaaaaatgggcaaaagagggccaggcacggtggctcacgtctgtaatccctacactttgggaggccgaggtgggcggatcacaaaatcaggagattgagaccatcctggctaacattgtgaaaccccgtctccactaaaaatacaaaaaattagccgggcgtggtagtgggcgcctgtaagtcccagctacttgaggcaggagaatggtgtgaatccgggaggtggagcttgcagtgagccgagatagcgccactgcactccagcctgggcaacagagtgagactccgtctcaacaacaacaacaacagcaaatgggcaaaagatttgaatagacctttcttcaaagaagatatacaaatggccaataagcacatggaaaagatactcagcatcagtattcactagagaaatgcaaatcaaaaccacgaaattacttcacatgcactagaatggcagtaagaaaaacaatgacaacagttaatgagggtatagagaaattggaaccatcacacagtgctggcaggaatgtaaaatgatgcagactgtggaaatcagctcgaaagttctttaaaaagttagaacatagtgttatcatatgactcagcaattctactcctagatatatacccaagacagttacaagcatgtccacacaaatatgctgttcgtaacagcatattcataatagccgaaaagtggaaaaaacttgtgttcatcaactaattaatggataaaatgtggtatatcaatacaatggattattattcagccataaagaatggatgaaattgttatatggtacaacatagatgagccttagaaacatgctaaatgaaagaaggcacataaaggcccatgttgtatggtcccatctatatgaagtgtccagaataggcaaatccacagagatgggaagcatactagtggttgccaggggttgaagggagaggggaactgggactcactgcgaataggtactgctaatggcatgatggagatgttctgtaattttagtggcgatggctgcacagcacagtgaatatacttaaaatcaatgagttttattctttaaagtggtaaattttatggtatatgaattatctccatgagagatctatcatatattgtttactaaaacaagttttagttcccaagtaattatattccaaggaacataggaggggcaaaaataattctaaagacataaagaaagaaacaggatattttctaaatatttttatcttgagacagaacttggttttttttttggctttagcttggaaaatctcgtgtcatagataaatctttctcctatcttgaaattggtcttatcaaggaactacccgcattgagatatgaagctctgggcctctctggtagccttgcacacccttcattcatcacctggtcccccagataagacagccctgacctcagaatacaccttggatttaacattctatgggacatttatttctagtctaccccctcccccgacccgccggaaacaatgcctttccttagaaaattgcctccttgatactactcctgctcattctgggtttaagttctcagtccctacatatatctatgacactaaaccctggagtactatcttgttcactccttcctggcccactgtctctgttcaaacattcaggcttaaaatatccactcctcgccaggtgcagtgatgcacgcctgtagttccagttactcaggaggctgacacaggaggatcacttaagcccaggagttcgaggctgtagtgcaccatgatcacacctatgaatagtcactgcactccagcccgggcaacatagcgggaacctgtttctaaaaaaataaaaacaaaataataccttctccattcctgcatgacctttccctgaatatattcactctgaatacacactccctcattttttcagtttctcaataaagcatataatagatggttttcttccctgttactcaagaggtcagctattctacctttcctgtttagaaatggaaacagaatggcccagaggtcaaagaatttgacctatcatccttagtcttgtagttctagctgaagccactgggtgccactcttgtaccactaacaagttatttatcactaaatggccattaccagaggatgttgagtggagaatcatgggttctactcaatgacctggatcactcatctgccctgggcttgcaacctagtcctctgtgttaacaatattaccaggtttcagagccgggagctctcggtacaaattctagccttgctatttactgactgtgattctgggcaaattatgaaagttctgtaatcagtttcctcatctgtaaaatgggaaaactatgacctaatttataacatctttgcagagattaaagtgaaaatctcggcacagattagggattcagtaagtgttccttctttccaagacctatgactactggtaagaccttgagttcactagccatatgccaaattaattgggctatgaatggccctgaggctatgagccatgactatagcaaaagaacagggtaaaagaggtcagatctttttttttttttgagacagagtcttgctgtgtcacccaggctggagtgcagtggcatgatcttggctcactgcaacctccgccccctagattcaagcgattctcatgtctcaccctcctgagtagctgggactacaagggtgtgccaacaggcctggctaatttttttatttttagtagagacggaattttgccatgtttgccaggcaggtttcaaactcctgacctcaagtgatccacctgccttgccctcccaaagtgctgagattacaggagtgagccaccgcacctggcccagattatcttttttaggtcttactgggataccacagaggcccaagtaaaagtacttcagaggctgaagcactcctagatcctgaggagtccctctgcgcttatatcctgggtcctatgataacagcacatgccttaccctgaacctgtccctagaaagctgaagatgtggatggctgtagtgaactgcattctcccccaccccaaatatgtccaaatcctaacccccagaatttgtgaatgtgagcttatttgagaaaagtctttgcacatgtaattccagatcgcaagacaggattagcctggatttagggtgggccctaaatccctaattacctgcctgtaatcccagcactttgggaggccaaagcagccagatcacctaaggctaggagttcgagaccagcctggccaacatggcaaaaccccgtctctactaaaaatacaaaaattagttgggcatggtggtaggcgcctgtaatcccagctactcgggaggctgaggcaggagaatcacttgaacccaggaggcggaggttgcagtgagccaagatcgttgccactgcactccagtctgggcgacagagcaagactcggtgtcaaaaaaaaaaaaaaaaaaaaaaaggg

SEQ ID NO: 5721 - DNA, 471 bp, Homo sapiens
actgaatgtgagagctgctgtacccctgctgctgtgggctgggaaggctgtttaagcactgcaggagacatgtatggagaaaagacttcagtataattgcaatcacaacccacgcactgacactttcccataacacacattaagagtgacatggtgccaggccgggcgcggtggctcacgcctgtaatcccagcactttgggaggccaaggcaggcggatcacaaggtcaggagatcgagaccatcctggctaacacggtgaaaccccgtctctactaaaaatacaaaaatttagccgggcgtgatggcgggcgcctgtggtcccagctactcgggaggctgaggcaggagaatggtgtgaacccgggaggcggagcttgcagtgagccgagatggcgccactgcactccagcctgggcgacagaggtgagactctgtctcaaaaaaataaaaataaaataaaattcaggg

SEQ ID NO: 5722 - DNA, 106 bp, Homo sapiens
aaaagcccagggagggaaaaaccaggcgagtcatagccttacagtgccaaattttgcacatagttcagatacaatgaaggtaaatgcaaaatttggtaattaagag

SEQ ID NO: 5723 - DNA, 106 bp, Homo sapiens; identical to SEQ ID NO: 5722

SEQ ID NO: 5724 - DNA, 3284 bp, Homo sapiens
gcgcaccctggagcgcagcgactcgccgccggcgcccctgcggccctgggtgcccctgcgcaaggcccgctctctggagcagcccaagtcggagcgcggcgcaccgtggggcacccccggggcctcgcaggaagaactgcgggcgccaggcagcgtggccgagcggcgccgcctgttccagcagaaagcggcctcgctggacgagcgcacgcgtcagcgcagcccggcctcagacctcgagctgcgcttcgcccaggagctgggccgcatccgccgctccacgtcgcgggaggagctggtgcgctcgcacgagtccctgcgcgccacgctgcagcgtgccccatcccctcgagagcccggcgagcccccgctcttctctcggccctccacccccaagacatcgcgggccgtgagccccgccgccgcccagccgccctctccgagcagcgcggagaagccgggggacgagcctgggaggcccaggagccgcgggccggcgggcaggacagagccgggggaaggcccgcagcaggaggttaggcgtcgggaccaattcccgctgacccggagcagagccatccaggagtgcaggagccctgtgccgccccccgccgccgatcccccagaggccaggacgaaagcaccccccggtcggaagcgggagcccccggcgcaggccgtgcgcttcctgccctgggccacgccgggcctggagggcgctgctgtaccccagaccttggagaagaacagggcggggcctgaggcagagaagaggcttcgcagagggccggaggaggacggtccctgggggccctgggaccgccgaggggcccgcagccagggcaaaggtcgccgggcccggcccacctcccctgagctcggtaaggcctcagggagggctgacaaggtgcctgaacccccgtcggggggcgtttgtggagagcaagactgctcagcaggagccggggggtcgggggtttcgcctggggctgctagccagctgcaagggtgggtttgccaaagaaggcacagacacaggctcgactttgagtgaaggattgtcaaagtccttgtgctaggactgctactggtgaggcagagcgtgagtgttgtgatggaggctaggtgaggctgagatgtgagctaagactggtgcccagatgcccgccatagctcccctgggtccagtggcctgctaggctgttggatcaagaaccactactggggggatgcactggtgggaacctaaggacccccctccatacccccaatccctctgttggggagagatggtagatggtctgaaataattttcaaatccctgttacagacacgctttgtgccagataactctttactctgcctctcccacccgggcaccatcccctgacccatgtgtggccacccagcctgcccttctagcctcctcacctcaggcttacaccccgcatggctgagctcactgtggtccctacacaatgcctgcctgtgtgttgtctcccaaccttcccatggatgatgaccaacaccaccaacaggagaatggctctgcaccccacccctcatcctgcacatcaactcgaggcccactcctggagagaggcagaggaaggcgtccttgacccacttccactgctcctccagaatagatgcctctacctgctgctcctgggagaccctgccaggatctctttcattgcacttaccatactgtatttttcttcatcaaaattattttgcatttaagtattaccaccttagaatctttagagataattaggcccctgtccatcatcctcctggacaccattattgcaaacacacaactatgtgccagcattgtgttaactaggcccttacagatgttatttcatttcagcctatatgtcagtttcagagggtcttttcccctccatcttacagataacaaaactgaggctcagagaggctaatttgcccaaggttttgtagctaggaaacagcagaattgggattttcactgctttttttggctatgtacattgtcctttatctagcttatggaatgtcagagttggagaatgcccagagacccatgacagtggagtttgtcatctctctgtatgtatgagcttcctgtaagcagggaccactggtccttcctctagtgttcttggtacccatacagtactcagtatgccgggagtacagggtcactatttggtgaacggatgaaatcaaatctgatcttcgtaggcctctcagactgcctaccattcactcttttgaatctgacggcttcacacatttgacaattcacctcgtgttgctctgtgacaccgctgttattgcttaagtcttgggttgcttttagcttgttctttgtctgtttgaaagcttgtgcccctccaggtgccttgcatggggcctggtacgccatacatgatggctgacgtgttaaagacatacacagtgcagtcctgtctttctccagaagccaacgctctaattgtggatgaagttgaggaacggccacactaacatggagtcaaggctgccctgacctgtttcgagaatgctccttctgacttccttttttccctaaggacattcaggaggcagaccctcttctccccaagtccctgctttctagaagcccctctgtctgggtttggctttctaggatgcaggccaccaggactctctctcccgctgtcatccctgcagggatcatggccccttaccccgttattcctgtgtccggcagagtcttcggatgactcctacgtgtccgctggagaagagcccctagaggcccctgtgtttgagatccccctgcagaatgtggtggtggcaccaggggcagatgtgctgctcaagtgtatcatcactgccaaccccccgccccaaggtgagctccagcactgggccaaggtgcggtcgaggttgggagggggtgtgtgagaagggaaggggaggttcccccggactcctccaagggaggggtgggaaagaggggaattatcccctccacgggggctgccctgacttgggtgtgtgttcagggacatttctcaggacccccgagagaagggagggcaacctgagcttcccaaaatgagggcggactcttccagattccctggggtgctgagaggagaggtttggtctcctgtgtggtgtgtggggtaggagtagagattctcagtgggcgcctgtgggccgtggcgagccgggtccctgtgcctccccacagtgtcctggcacaaggatgggtcagcgctgcgcagcgagggccgcctcct

SEQ ID NO: 5725 - DNA, 3283 bp, Homo sapiens
gcgcagcctggagcgcagcgactcgccgccggcgcccctgcggccctgggtgcccctgcgcaaggcccgctctctggagcagcccaagtcggagcgcggcgcaccgtggggcacccccggggcctcgcaggaagaactgcgggcgccaggcagcgtggccgagcggcgccgcctgttccagcagaaagcggcctcgctggacgagcgcacgcgtcagcgcagcccggcctcagacctcgagctgcgcttcgcccaggagctgggccgcatccgccgctccacgtcgcgggaggagctggtgcgctcgcacgagtccctgcgcgccacgctgcagcgtgccccatcccctcgagagcccggcgagcccccgctcttctctcggccctccacccccaagacatcgcgggccgtgagccccgccgccgcccagccgccctctccgagcagcgcggagaagccgggggacgagcctgggaggcccaggagccgcgggccggcgggcaggacagagccgggggaaggcccgcagcaggaggttaggcgtcgggaccaattcccgctgacccggagcagagccatccaggagtgcaggagccctgtgccgccccccgccgccgatcccccagaggccaggacgaaagcaccccccggtcggaagcgggagcccccggcgcaggccgtgcgcttcctgccctgggccacgccgggcctggagggcgctgctgtaccccagaccttggagaagaacagggcggggcctgaggcagagaagaggcttcgcagagggccggaggaggacggtccctgggggccctgggaccgccgaggggcccgcagccagggcaaaggtcgccgggcccggcccacctcccctgagctcggtaaggcctcagggagggctgacaaggtgcctgaacccccgtcggggggcgtttgtggagagcaagactgctcagcaggagccggggggtcgggggtttcgcctggggctgctagccagctgcaagggtgggtttgccaaagaaggcacagacacaggctcgactttgagtgaaggattgtcaaagtccttgtgctaggactgctactggtgaggcagagcgtgagtgttgtgatggaggctaggtgaggctgagatgtgagctaagactggtgcccagatgcccgccatagctcccctgggtccagtggcctgctaggctgttggatcaagaaccactactggggggatgcactggtgggaacctaaggacccccctccatacccccaatccctctgttggggagagatggtagatggtctgaaataattttcaaatccctgttacagacacgctttgtgccagataactctttactctgcctctcccacccgggcaccatcccctgacccatgtgtggccacccagcctgcccttctagcctcctcacctcaggcttacaccccgcatggctgagctcactgtggtccctacacaatgcctgcctgtgtgttgtctcccaaccttcccatggatgatgaccaacaccaccaacaggagaatggctctgcaccccacccctcatcctgcacatcaactcgaggcccactcctggagagaggcagaggaaggcgtccttgacccacttccactgctcctccagaatagatgcctctacctgctgctcctgggagaccctgccaggatctctttcattgcacttaccatactgtatttttcttcatcaaaattattttgcatttaagtattaccaccttagaatctttagagataattaggcccctgtccatcatcctcctggacaccattattgcaaacacacaactatgtgccagcattgtgttaactaggcccttacagatgttatttcatttcagcctatatgtcagtttcagagggtcttttcccctccatcttacagataacaaaactgaggctcagagaggctaatttgcccaaggttttgtagctaggaaacagcagaattgggattttcactgcttttttggctatgtacattgtcctttatctagcttatggaatgtcagagttggagaatgcccagagacccatgacagtggagtttgtcatctctctgtatgtatgagcttcctgtaagcagggaccactggtccttcctctagtgttcttggtacccatacagtactcagtatgccgggagtacagggtcactatttggtgaacggatgaaatcaaatctgatcttcgtaggcctctcagactgcctaccattcactcttttgaatctgacggcttcacacatttgacaattcacctcgtgttgctctgtgacaccgctgttattgcttaagtcttgggttgcttttagcttgttctttgtctgtttgaaagcttgtgcccctccaggtgccttgcatggggcctggtacgccatacatgatggctgacgtgttaaagacatacacagtgcagtcctgtctttctccagaagccaacgctctaattgtggatgaagttgaggaacggccacactaacatggagtcaaggctgccctgacctgtttcgagaatgctccttctgacttccttttttccctaaggacattcaggaggcagaccctcttctccccaagtccctgctttctagaagcccctctgtctgggtttggctttctaggatgcaggccaccaggactctctctcccgctgtcatccctgcagggatcatggccccttaccccgttattcctgtgtccggcagagtcttcggatgactcctacgtgtccgctggagaagagcccctagaggcccctgtgtttgagatccccctgcagaatgtggtggtggcaccaggggcagatgtgctgctcaagtgtatcatcactgccaaccccccgccccaaggtgagctccagcactgggccaaggtgcggtcgaggttgggagggggtgtgtgagaagggaaggggaggttcccccggactcctccaagggaggggtgggaaagaggggaattatcccctccacgggggctgccctgacttgggtgtgtgttcagggacatttctcaggacccccgagagaagggagggcaacatgagcttcccaaaatgagggcggactcttccagattccctggggtgctgagaggagaggtttggtctcctgtgtggtgtgtggggtaggagtagagattctcagtgggcgcctgtgggccgtggcgagccgggtccctgtgcctccccacagtgtcctggcacaaggatgggtcagcgctgcgcagcgagggccgcctcct

SEQ ID NO: 5726 - DNA, 176 bp, Homo sapiens
cttggttctgcagcagcgtccctcagagcgggttgcgcagggaggagcccgaccttcagcctcaactggccagcgaagccccacgccgccctgcccagccgcctccttccaaatccgcgctgctccccccaccgtcccctcgggtcgggaagcggtccccgccgggacccccggcc

SEQ ID NO: 5727 - DNA, 870 bp, Homo sapiens
gacgccgagggtggtgcttcctccgagcctccggtggtgaggccgctctcagaaggtcatggaagcgcaggggagagcgaggcggccgagcccaggcaaatcctcgagaaaggccgagtgcgcgacggctctgcggggaggaccgcgcctccccgaatgcggccgctgctgccgctgcaaacagtgccttgaggagaggaaagcggggaaccgtgttttcgccgcctctgtaaccactgcacacaagaaaaccagcttctgggagagggggatgattgttgggactttgcgaattacctaaacagcccagggccgaggcgccgccgctcgcgtcctggtcctcctgccgggtgtggggctcccctgcccgagatggccagcgggcgcgccgagagtatcctggagccatctagtcttgcctcggaggcggggtgggcttatttgtgcggagaagaaacggatctcttaatggggtgagatttttcctccgtacattgttcccatttccgcagtttcacttggcctcggttttctagcagagtaatcaccaaatgaaattagctggagagcgtttgatggcgcagaatcacggtctgaagatgtttacgctgtatgccggacgcgtttgatggtgttctcttcggcacaattaattttgcaaagttcagaaatgtgccagacagagcccctggcacgcagtcaggactctacagacacaccttgagtaggaaacaggcttgtttgtttcatctgtgatttatgtgatgcaccagcaccaaggccaacgtgttttttaaagacctttcgatgaaactccaaagcaatttataaattggcaaaatgaagcttgttttgtaaaataactcttcc

SEQ ID NO: 5728 - DNA, 465 bp, Homo sapiens
ttaaatgggcaacaaaacacctgaaaggacatttactgaaaagtagactcccaaaacaaaaatatgtatttcacagctagatacggtcgctattagcgtcctaatggccaactccatccatgtgcgtattttgaacactaaaaacgcctcctgttacccctaagaccttgtttggataacatttttctattataagtactcgaaaccaaccccatttaagatgtttacccttattcttgagtccttgatggtttgggaaatttatcattattcatattgcacaatcctgtcactgtcttttccattaggcacagtgcctaaggtccacaatatttttagaggcccacaaaaaatattttaatttcttttcaaatcagaaggaaaaaaaatttaggtttaagaaagtattttaatatatattaatatatttgtttttgtgctaatacaatcttaaaatgtatgtat

SEQ ID NO: 5729 - DNA, 6565 bp, Homo sapiens
cgcgcgggtgctgggaggccttagaacgccgtggcgtgccgcaggacgcgacggctgcagaacatccgccgcaccgctgggggccaacgttgtcggaccgaggagtccgaggtggcgactgagtgagatacccagctgtgcggagctaggacgcggaacatcccagaggccagcatcaacatgtcagtaccgcacccttcccatttgctgcctgtaggtccaccccgcgcgtgcggtccccaagtggccatgccaccctgcacgccctccccgcgtcagtcgttcgtttccagaccatgccgagccacacctgcccacagagtcgagctctcgaagtcctcattcccaaaagctccacagcctgtgacccactaggagggagggggaaaccgaggcccgggagagacggagaagccactctctgaggaccccggagccccgcccacagtgggtggggtcggcactgaaggggttaaggccgcggggaagccccgggctcagccctaggggcggatcctggggcttcctccctctagaccaaagggtgcggctgctgcagaggtggctgatgcaggtgaggggcttacagccctgtgaatggtgtgggaggtgaggggaggggggtgcctgttactgaccagtgtttaattggcctcaagctcaggagaggtaaggggagccaggaggccccctctggagcaggtgagtagaaggagggggctcagctgcccgcccacgactagaaaacccccagcatagacctgccggacggcaggaccttggttaagatgggaaaacagtagggtttgggcacaggaggtctgggcccccaacctggtgaccgttggacaccctgtggatataggaaggaagctgtggtccttatctagggtgcctgcgaaactcaagccagtggggaaccaagcctgcagaggcaatactgctgtgtgactgtgggccaggcccagtgctggtgctgctggggccccatctgaggagacagttgggtctatatccaaagtgtcctgagatgggcagagttgggaagggggccatgggctccaggtggggaaggcagtcaagacaggccaaagctcagcctgatgggtgcatgagtggggccccaggatccactaaggcagtgggcatagcccaggtagttgaaaaggctgggagctggaggagactcggaacatagggagaagaaagggacaggaagactcccgggcagtttttcctatggagggaaccttgggtaggtttgagcagggggtatagtgtctgctttgcatcttctatcccatgccctagtggtggactaggaggactactggaagacagaaggccagcaagtagattgggtcggctgttttatagacctggtggttacagaccccctgtgaggggaggtcctgaggaggacaaatttgtagccagagcaggctggggccaggactcctaggttctgccccagccttaagcagctcatccatcactcccagcctccctccaatgtggggtagacacctggatctatctgccctgctctataggggatgggtctcttccaggtcacctgtgctatcaggtgagtgtgggacaaagtgcagcccaccactccccagttccagtatgcatggtcccccctgcactctgtcagcccttccctgctccaaccccaccctccctcctggcacagcccagcatggctgttatctacaggaggagagccactgtggtctgaagagatgctactgcctggagactggggtcttaacctccagcctggcactgagccacctgcaacctagcagcaggtgaccttggctcccagcctgactcagctgaacctggatcctgtgcataggcaagagctgactctgagccctggcccagccaagctgacccctacactagaccctacacaccggatggagctgatcctgagtaccagcccagctgagctgactctggatcctgcgtgccagccaaagctgcccctggattccacatgccaaccagagatgaccttcaatcctggtccaactgagcttaccctggatcctgaacaccagccagaggagaccccagctcctagcctggctgagttgaccctggagcctgtgcaccgccgacccgagctcctggatgcttgtgctgacctcatcaatgatcagtggccccgcagccgcacctcccgcctgcactccctgggccagtcctcagatgccttccccctctgcctgatgctgctaagcccccaccccacacttgaagcagcacccgttgtggtgggccatgcccgcctgtcacgggtgctgaaccagccccagagcctcttagtggagacagtggtggtggcccgggccctgaggggccgtggctttggccgccgcctcatggagggcctggaggtctttgctcgggcccggggcttccgcaagctgcatctcaccacccatgaccaggtgcacttctatacccacctgggctaccagctgggtgagcctgtgcagggcctggtcttcaccagcagacggctgcctgccaccctgcttaatgccttccccacagccccctctccccggccacccaggaaggccccaaacctgactgcccaagctgccccaaggggtcccaagggacctccattgccaccaccccctcccctacctgagtgcctgaccatctcacccccagttccatcagggcccccttcaaaaagcctgctggagacacaatatcaaaatgtgagggggcgccccatattctggatggaaaaagacatctgaggccatccagggcaaggaactgtctttctggttcaatagactgccccgacagtctacaagcctcagcccactgaccatacctcagcccctagcccctggggggcagctttaacctgggcatgtttcctgggtaccagtggggccaggaggtggctctggctcagagccgtcagtgtggctgaataaaggctctcttgggtatggctgtgacagtttatttgttgatccccctaccctcacctctcacctcttctgcaggtcccttatccctgcagaagtctccagatccaccttggccctgaggccattgatgggaggatgcctgtcctttgcctttaccccccacctggctcaggagacagggtggctgttttcttccccattcactcattaccattcactgagcacctactgtgtgtcaagccctggacgggacataggcaatgggtaactagacaaacaggcatacagtagcaggatccatgtggcacaggggaggtacagaggctttgggaacccaagtgacttcactccacctggggatccaggagacctcccagggcagtgatgtcacagcagagacctgagtgctaggtaggaattaaaccaggcaggtgaggaggtgggagctgactgttcttggaagagggaacaaggtgggcagaggaaagaaggggacttgtgacagttgtgggaggacacagtggtgtattgacaaagacggaacatgggagggaatgtaccctcagctcactgtaaagcccgctttggtgtgcacctgccactcgatgcccggggcatcatagccagcttgcggtgtggctgctttaaaaggcccaagagacccctggggaaacatgctttccccagctcctcctgtaaggatggggaggagctgggggagctttcctggctttccctgccatgtggaaggtgtggccatagctgcggactctaagcttacacccccctctctcctgcaggtttccatccttggggaatgaccacgcaactgggcccagccctggtgctgggggtggccctgtgcctgggttgtggccagcccctaccacaggtccctgaacgccccttctctgtgctgtggaatgtaccctcagcacactgtgaggcccgctttggtgtgcacctgccactcaatgctctgggcatcatagccaaccgtggccagcattttcacggtcagaacatgaccattttctacaagaaccaactcggcctctatccctactttggacccaggggcacagctcacaatgggggcatcccccaggctttgccccttgaccgccacctggcactggctgcctaccagatccaccacagcctgagacctggctttgctggcccagcagtgctggattgggaggagtggtgtccactctgggctgggaactggggccgccgccgagcttatcaggcagcctcttgggcttgggcacagcaggtattccctgacctggaccctcaggagcagctctacaaggcctatactggctttgagcaggcggcccgtgcactgatggaggatacgctgcgggtggcccaggcactacggccccatggactctggggcttctatcactacccagcctgtggcaatggctggcatagtatggcttccaactataccggccgctgccatgcagccacccttgcccgcaacactcaactgcattggctctgggccgcctccagtgccctcttccccagcatctacctcccacccaggctgccacctgcccaccaccaggcctttgtccgacatcgcctggaggaggccttccgtgtggcccttgttgggcaccgacatcccctgcctgtcctggcctatgtccgcctcacacaccggagatctgggaggttcctgtcccaggtaagtggaagctgaggtctaggggtctgagtcaggaggtatggccctgttctaggaaggtcccaggagaagaccttgcctaggggttggtcctaatctaggcgttctcagcggaaggccctgtcctggagcatctgatgagggaggcatggctttgccctggaagatgttgaggggtagggaggcccagcctttggagtgctggcctgaggggagatattctgagtggaaggcctgagaagccactcagagactcgatacaaaggggccctacttgggctgggtgagtgtctcacacctataatcccagtactttgggagcctgagatggaaggattccttgaggccaagagttcgagaccagcctgggcaacatagtgagaccccaacctctaccaaaaaaacatttgagacagagtcttgctctgttgcccaggctggagtgcagtggcaccatctcagctcactgcggccttcacttcctggttctagtgatcctcccacctaagcctcctcccgaatagctggactacagatgcataccaccacacccagctaatttttatatttttgtagagatggggttttgtcatgttgcccaggctggtattgaactcctgggctcaagtgattctcccgcttttgcctcccaaagtgtgggattacaggtgtgagccactgtgcccagcctaaaaaattattagccaggtgttatgcacctgtagtcccagctgcttgggaggctgaggtgggaggattacttgatcccaggagttcaaggctgcagtgagctatgatcatgccactgcactccagcctggatgacagagtaaaaccccgcctctaaaaccaaaccaaactagagagtccctactgtagagttagaatcagattgtgacagtgaaccagaagagtttcttgaatgtggatgtgtgcccacatggatctggccagcccagcactggcttagcagctctctgcctccaggatgaccttgtgcagtccattggtgtgagtgcagcactaggggcagccggcgtggtgctctggggggacctgagcctctccagctctgaggtgatcattgcccctttgagcctgccatgtagcacatgctggggtcccagggtgggggacggccatgtcaagattatagagcaggcatattgacacatatcttcccttctcctcaggaggagtgctggcatctccatgactacctggtggacaccttgggcccctatgtgatcaatgtgaccagggcagcgatggcctgcagtcaccagcggtgccatggccacgggcgctgtgcccggcgagatccaggacagatggaagcctttctacacctgtggccagacggcagccttggagattggaagtccttcagctgccactgttactggggctgggctggccccacctgccaggagcccaggcctgggcctaaagaagcagtataaagccagggcccctgccactgcctcttcttttccctgctgccacttttccagtcctggaactactctgtcccactcttgctctattcagtttacagtcaaccctcccaagcacacaccccgcttcccttggaatccctgaggggtagaaggggccagaaaaaacgcttataaaaccagaggccctctgagatcatgtgagtcctccatggcaaggaagcagttccagggagagtcaggttccagctagttagggctgccagcctagggctttgtgcctacacctcactaagcccatggagaggtcacagatgggccgtgcacgggcagatgggccccaaaaaatcttggcgaaggtcggtaaagtgctaagctgttgtctgcactctttcatcataaagtcacttttttccactgcc

SEQ ID NO: 5730 - DNA, 6565 bp, Homo sapiens; identical to SEQ ID NO: 5729

SEQ ID NO: 5731 - DNA, 1145 bp, Homo sapiens
agctggagtggtgctctgggtgagctgggaaaatacaagaaccaaggtgagcttaggcctggcatgagggtgggggtgggggaggggtggggccattaagctgacggggtagaccctgacttaccctttctacctgcaaagtcctggctgaccagcaggtgagtgcctcagtgccctgggtgggtccatacatggccatggtgtccctgacgctatcctcccttcccacctaggaatcatgtcaggccatcaaggagtatatggacactacactggggcccttcatcctgaacgtgaccagtggggcccttctctgcagtcaagccctgtgctccggccatggccgctgtgtccgccgcaccagccaccccaaagccctcctcctccttaaccctgccagtttctccatccagctcacgcctggtggtgggcccctgagcctgcggggtgccctctcacttgaagatcaggcacagatggctgtggagttcaaatgtcgatgctaccctggctggcaggcaccgtggtgtgagcggaagagcatgtggtgattggccacacactgagttgcacatattgagaacctaatgcactctgggtctggccagggcttcctcaaatacatgcacagtcatacaagtcatggtcacagtaaagagtacactcagccactgtcacaggcatattccctgcacacacatgcatacttacagactggaatagtggcataaggagttagaaccacagcagacaccattcattccatgtccatatgcatctacttggcaaggtcatagacaattcctccagagacactgagccagtctttgaactgcagcaatcacaaaggctgacattcactgagtgcctactctttgccaatccccgtgctaagcgttttatgtggacttattcattcctcacaatgaggctatgaggaaactgagtcactcacattgagagtaagcacgttgcccaaggttgcacagcaagaaaagggagaagttgagattcaaacccaggctgtctagctccgggggtacagcccttgcactcctactgagtttgtggtaaccagccctgcacgacccctgaatctgctgagaggcaccagtccagcaaataaagcagtcatgatttactta

SEQ ID NO: 5732 - DNA, 4867 bp, Homo sapiens
ctcgccttcccggcgacctgtttggcagggcggggcgcctcgcgaagatggtggcgcgcgtggcgtgtggctcccgtcgtctggccaagtctcagcgcagcgcaccggccggcgtctcgttggcctggagcccacacccaccgggtccctgaccccgcgccccccgcgcccggttcccggcatgcctcgcgcccgtaagggcaacacgctccggaagggtggtcagcgccgtggaggaggtgagtggggtggggggcgcgggacagctgtatgagcggcgggcgggggtcctgctggatccccttggttgttctcgagggccctgggtggggaaccccctcggccagccccacgcagcttcccataactctaccgaggctggcacgtgccccagcagtcattggccacgtgcgtgcccaacttgagctcgctgcccactgcctgttgggagtccgcgctcccagcggtgacccggccagcccctccgggcctcagttgcctgctgggtggacaaactcaccggacagggcaggaagccagtcctcttgccaaaccctgatcctttcctggactggtcaaggaagttggcgggagtcctggcctgctccggtgaagagagggagggggctctgttgggaagctacctggttagggccttggcagcttggcaggcctgactccacaaggtagctgagtatcctggagcctgaggcagtcttgggactcgcttatcagcttagaccaggagcctatcttaatgcgttaaacacatatgtttactctgctgggatggggtgcctaccacgcacaaatttatttatttttattcttgagggggaagggaggagggccgggcacaggaaggaggaaaatacctaggcacaactttaaactggtcaccaccatggtgggttttgggtgggggacatctaatagggtgtggaacatgttcactgagtggtgtcagccccagacttaggactcagggaggcctggggggaagtgcttctgggtgagtcctgagaggatggagaagagagcaagttgtacaaagacctggcagctggagggaccccagcgcagtggagtgaatgagggaaggctgggctgctccggcaggtagaatagtaagataaaatgggagcaggctgggcgtggtggctcacacctgtaatcccagcactttgggaggccaaggcaggcagatcacctgaggccaggagttcgagaccagcctgaccaacatggagaaaccctatctactaaaaatacaaaattagctgggtgtggtgtcgtatgcctgtaatcccagctactcgggaggctgaggcaggagaatcactggaacccgggaggcagaggtcgcagtgagccgagatggcgtcattgcactccagcctgggcaacaagagcaaaactctgtctcaaaaaaaaaaaaaaaaaaaaaaggtggcggggagcagaggccagtgcgcaggctggactttgtcctgcagatgaggggtgtgagtagttcttagaagtagggccagcctggtgatcacaccctgtccaaaactctgccacagcagccaaccttgccaatgtcagcccttggccctggacagaccccacacacaggagtgcaccagccctactgaactgacccttggctttggtttttcatctctgagagggacaccattctatcttttgggattatgaggtcgagtgaggtacccccagccatccctcatcagtagaggcaagttgagtgtcctattccaccttctccaggtgcccggagcagtgcccaagctgactcgggttccagtgacgatgaggcagccagtgaggcccgcagcaccgccagtgaatgccccagccttctcagcaccactgcagaggacagccttggtgagagcgggtggaagtttgacaggggcttggtgagggctccatgggctgaggacaagaagcggtgctgaccaggtggccttgcagggggggatgtcgtggatgagcagggccagcaggaagaccttgaggaaaagctgaaggagtatgtggactgtctcacagacaagaggtacccctggctgccagccaactcctacacccagctccaagtgtgatcaagggagggctggcccatatgaccccccttctcgacctcccccagtgccaagacccggcagggtgctcttgagagcctgcgcctggccctagcgtcccgcctactccccgacttcttgctggagcgccgcctcacgctagccgatgccctggaaaagtgcctcaagaaaggttggacctgggggtgtgtgggagacttaaactgggcagacactggcccttgctgcatgggctgactggaaagcatcccacagggaagggcgaggaacaagccctggctgctgctgtgctaggcctgctctgcgtgcagctgggccctggacctaagggtgaggagctgtttcacagcctgcagcctctgctggtctctgtgctcagtgacagcacagctagccctgctgcccggctccacgtgagtgtgcctgtgccccatgaaacccttcctgcaccttatccctcagcagagtggtgggttccccctatcttcagcctcctttactctgaggggagtgagctccagggctgggaacccaggttcacccgctgaccgtggcattgcattgcccttctcccaacagtgtgcttctgcccttggcctgggctgctacgtggctgccgctgacatccaggtgaggggtctttgggcacaggtggtagagcatctagggctgtaactctgcctctgagctcccctgcctctctgtgctcctaggacctggtctcttgccttgcctgcttagaaagtgttttcagccggttctatggcttggggggcagctccacaagtcctgtggttcctgccagcctgcacggcctgctctctgctgccctgcaggcctgggcattgctgctcaccatctgccctagcacccaaatcagccacatccttgacaggtaggggtggctgtccactgggagggggaggggatctcaaagaggcccccaagccacacatatagctcagcctgccccttccctaggcagctgccccggctgccccagctcttgtccagtgaaagtgtgaacctgcggatcgctgccggtgaaaccattgcactgctctttgagcttgcccgggaccttgaggtgcgagggacaaggatggggggtgcttggtgacaccacctgcccatcacaggctggatgcagggggtgccacacaaaacagaacagctttaggtcattatgcagaggaggtggccccaaaacagatttatctcctagatgtcatgatgggtgccctcagcagtggtgtcctggcctgacagaggccaaggaggggtcaaaggggccaggcagagaagagagggtctctcagtgaaaggaggggtttgggcagtgccctgttcagagccagcagagctcaagcatctaccacacaccctccaatgctcccattgcaggaggagtttgtttacgaggacatggaggccctctgcagtgtcctgcgcactctggccactgacagtaacaagtaccgtgccaaggctgatcgtcggcgccagcgctctactttccgcgccgtgctgcactccgtggaggtgtgtgtgagaacatatgtgtcctagcaagggtgcacccccaggcatagcagccaagcccagttgtgttggcacctctaccctgcagggcggtgaatgcgaagaagagatagtgcgcttcggctttgaggtgctctacatggacagctgggctcggcaccggatctacgctgccttcaaggaagtgctgggttcgggcatgcaccaccacctccaggtgcggggacggacagggaggggacatctggtgtggttgcttcagtctggcctgagctcactgccctctgccccccagaacaatgagctactccgtgacatctttggcctgggccctgtgctgttgctggatgccactgccctgaaggcctgcaaggttccacgctttgagaaggtttgcacccttgggcacctttctcttccccctattcccatttcctggaggcctggaattctgtagaggccggaagaggacccccagccctttcccttcccagctccccagggtgtcactctctgtccccactctagcacctgtacaatgctgctgccttcaaagcccggaccaaggctcgaagccgtgtgcgggacaagcgggcagacatcctgtgaagcaggacctgctgaagaggagactttctatgcccttggtccgtatttttaacagaagacagtgcaacaactggtctccaccagtatttgtcactttattttttttaatgacaaaaccaaaaacagacatggggtgggtagctgggggcccggacacttgggaccctgacccctttgtccctgcactcagccctgtggccccttcctgtcctgtctcaggccaggctaaatatgtgccttcctcagggctgtggggcaggcactagggggcctttcccttcctttcctttctcaggccttgctcccccaggatgacccactcttaggggggtggtggcatctggacaaatgccaccacagcaggtggggtggcaaagctacctggaatggatttgtgtgctgatttttaaggattattacagataattaaacagaacggtcagccttctgtggtcttaacccctgggtatttttctgttctccctccccatctactatcccaggcttgggcccaactggtcttccacgatgtcacctttgccctccaaggcagtcttccccaggtggtgcctctccccctactcagagcccagcctgtcttt

SEQ ID NO: 5733 - DNA, 4867 bp, Homo sapiens; identical to SEQ ID NO: 5732

SEQ ID NO: 5734 - DNA, 1145 bp, Homo sapiens; identical to SEQ ID NO: 5731

SEQ ID NO: 5735 - DNA, 558 bp, Homo sapiens
cattgattttcttctctatactgctctggtcaagaaagctggagtttttgccttcaaagttttgttaccttgggtgattcatttgacctgtgttagacttaacacccttctgtgacatgaggaggttatagaactagggtccttccatcttcaaaattctattcctatgatcatatacaattgtggggagggggagatggctaatataaaacatcaattatatagtggaactagtacttaaaaaaaaaccaacttatgaatgacatcctcatgagagttgctagtacatcataaaattgttggttgggcctaaaacatattcatccttgtcgcctattataattagccagttgccagacccattaccatgctcaagtaagggaaggcagacatgagagtggctggagttaaagcagaataaggttgacagccttaaactttctggaagtattgtccttgtacagaaattgtccaaaggtcattgacctttaaagtgaatttttgccttaacctataaatttataaatgtcatttatgttaaataaatttctgtagagc

SEQ ID NO: 5736 - DNA, 558 bp, Homo sapiens
cattgattttcttctctatactgctctggtcaagaaagctggagtttttgccttcaaagttttgttaccttgggtgattcatttgacctgtgttagacttaacacccttctgtgacatgaggaggttatagaactagggtccttccatcttcaaaattctattcctatgatcatatacaattgtggggagggggagatggctaatataaaacatcaattatatagtggaactagtacttaaaaaaaaaccaacttatgaatgacatcctcatgagagttgctagtacatcataaaattgttggttgggcctaaaacatattcatccttgtcgcctattataattagccagttgccagacccattaccatgctcaagtaagggaaggcagacatgagagtggctggagttaaagcagaataaggttgacagccttaaactttctggaagtattgtccttgtacagaaattgtccaaaggtcattgacctttaaagtgaatttttgccttaatctataaatttataaatgtcatttatgttaaataaatttctgtagagc

SEQ ID NO: 5737 - DNA, 194 bp, Homo sapiens
cacgcctataatcccagcactttgggaggctgaggtgggcagatcacgaggtcaggagatcaagaccatcctggctaacacggtgaaaccccgtttttactaaaaatacaaaaaattagctgggggtggtggcgggcgcctgtagtcccagctactcgggaggttgaggcagaagaatggcgtgaacccgggag

SEQ ID NO: 5738 - DNA, 316 bp, Homo sapiens
  SITE (13): n equals a,t,g, or c
ggccaggcgcggntgctcacgcctataatcccagcactttgggaggctgaggtgggcagatcacgaggtcaggagatcaagaccatcctggctaacacggtgaaaccccgtctctactaaaaatacaaaaaattagctgggggtggtggcgggcgcctgtagtcccagctactcgggaggctgaggcagaagaatggcgtgaacccgggaggcggagcttgcagtgagccgagatcgcgccactgcactccagcctgggcgaaagagcaagactctgtctcaaaaaaaaaaaaaaaaaaaaaaaaaagaaagaata

SEQ ID NO: 5739 - DNA, 2013 bp, Homo sapiens
gccgtgtataccacgcccttccacctggtctccacagagtttgagtggctgcccttcggctctgtggccgctgtgcagtgccaggctggcaggggagcctctctgctctgcgtgaagcagcctgagggaggtgtgggctggtcacgggctgggcccctgtgcctggggactggctgcagccctgacaacgggggctgcgaacacgaatgtgtggaggaggtggatggtcacgtgtcctgccgctgcactgagggcttccggctggcagcagacgggcgcagttgcgaggacccctgtgcccaggctccgtgcgagcagcagtgtgagcccggtgggccacaaggctacagctgccactgtcgcctgggtttccggccagcggaggatgatccgcaccgctgtgtggacacagatgagtgccagattgccggtgtgtgccagcagatgtgtgtcaactacgttggtggcttcgagtgttattgtagcgagggacatgagctggaggctgatggcatcagctgcagccctgcaggggccatgggtgcccaggcttcccaggacctcggagatgagttgctggatgacggggaggatgaggaagatgaagacgaggcctggaaggccttcaacggtggctggacggagatgcctgggatcctgtggatggagcctacgcagccgcctgactttgccctggcctatagaccgagcttcccagaggacagagagccacagataccctacccggagcccacctggccacccccgctcagtgcccccagggtcccctaccactcctcagtgctctccgtcacccggcctgtggtggtctctgccacgcatcccacactgccttctgcccaccagcctcctgtgatccctgccacacacccagctttgtcccgtgaccaccagatccccgtgatcgcagccaactatccagatctgccttctgcctaccaacccggtattctctctgtctctcattcagcacagcctcctgcccaccagccccctatgatctcaaccaaatatccggagctcttccctgcccaccagtcccccatgtttccagacacccgggtcgctggcacccagaccaccactcatttgcctggaatcccacctaaccatgcccctctggtcaccaccctcggtgcccagctaccccctcaagccccagatgcccttgtcctcagaacccaggccacccagcttcccattatcccaactgcccagccctctctgaccaccacctccaggtcccctgtgtctcctgcccatcaaatctctgtgcctgctgccacccagcccgaagccctccccaccctcctgccctctcagagccccactaaccagacctcacccatcagccctacacatccccattccaaagccccccaaatcccaagggaagatggccccagtcccaagttggccctgtggctgccctcaccagctcccacagcagccccaacagccctgggggaggctggtcttgccgagcacagccagagggatgaccggtggctgctggtggcactcctggtgccaacgtgtgtctttttggtggtcctgcttgcactgggcatcgtgtactgcacccgctgtggcccccatgcacccaacaagcgcatcactgactgctatcgctgggtcatccatgctgggagcaagagcccaacagaacccatgccccccaggggcagcctcacaggggtgcagacctgcagaaccagcgtgtgatggggtgcagacccccctcatggagtatggggcgctggacacatggccggggctgcaccagggacccatgggggctgcccagctggacagatggcttcctgctccccaggcccagccagggtcctctctcaaccactagacttggctctcaggaactctgcttcctggcccagcgctcgtgaccaaggatacaccaaagcccttaagacctcagggggcgggtgctggggtcttctccaataaatggggtgtcaaccttacccaagg

SEQ ID NO: 5740 - DNA, 5932 bp, Homo sapiens
ggtcacagcactcgagaacctcatcccactaaaaacaactattaaatacggcagctggaagaagacctgacgcttgctggtggaagtggccccagaaggctgcagctatgagcgattgtgacgaggtggaaggagggttccctggaattggaggggacgttgtgacccaagcatggatggtgtgggtagcaggatgtgaactgaggggctgataggtgtttgtggtgtgtgtgtggctggggttggccgggtgctgctttccacattgacttggcgcctgccagcggtgcggtccagttctttgactgaagttctcgccagtcatggacttcctatcctcctgtttcacgagctccatctccatcttctgctgatgtgtgagagctgccggcacggccagcagtggcaacagtaacgccttggagtgcagtccctcgccgggtggagcagtgtctggaacggcgctcagccgctcgcagcctttgaggagagcagtgtgccacgtggtgttccagtgctgaagcccctgcagctggtgtattagcaatgttctaaagcagaggggcagccaggcgcactgcattacctcccagctctgagatcccgactcccggcttctggtgggcagctggtttctgtgggagtcgctcgtggagccacaggtgtcttgggctgcatgtgaccacattttagccagactctgaggtcagcttggacagagtgttggggcataggctgtggccgttcatcaaaacctacgtttcatgtatgttggtttcgaaaggaccacgtttgtttcttcatgaagctgaatttttttttgagtattcggaagtgtgttaaatttaacttggattctggcaggtcgttgaaatgtgaacatatttttcttctccctagatcgaaaagtatcctccttgcacacctcccgagttcagaggcagatggtggtctccgttcacgacttacccgagaagagctttgtgcccctgctggacagcaaatacgtcctctgtgtgtgggatatttggcagccttcagggccacagaaagttctgatatgtgagtcccaggtacagctcaggatgagagtcgcacgtttgatgggaggatgggcagtggacagagcgtgaaggtgcaggtggggagagtcacggagagaggtgcagggacaggaggtgggtagggacttatgggccattctctgtctctcacagctggcctcagctgtgctgtgggtgcagcgagacacatgggtgtgcttgtagttcagaatgagcaaacgagaattttcacagagcagccctttgggtcagctgagaattaggaaatggaggtggttgtaggctgaatgaaaatactcaccatgctgggtgtagctctggggccctagatgcctgtgtttttgccttgcactgttttggtcctgagtgttttagaggtttcttagactgcgtggaggtttcttagactgcatggaggtttcttcaactgcactgaggtttcttagactgtgttgaagtgtgctgtcgctcacagcccttctggaggcctcccattcaccgcccaggaggctggcaccgaggcttgaggactgtgcggtgaggggtcagggctgcctctcttatgtttgggaaaatgtgcatttgtattttcctagttatgtattccctggcctcaaacccattgatttccacaaaagctgtagagaagaataacttgaaattgtaacttttgtaatacaagatgtaaataaaatggcgcaggatggaactgctacttctgaggttcagccgattgagctgagtggacaggctcccggcaggctttgtgtgaccagatgagtgtcagcaccttgcgtttgtgatcataacaagcctacggggtgggtttctcatccctattctccatttcaggaacctgacaagccaccttttatttctgtgcaggagtctacgttctgcttactgggccctgcaggtgactcccgtgcaaagtgaaacatggtcagacaccccactcagtaaatgcagcttgtgttagcatgcttctcatattcttctgtcattggctttctgtgcctttgtcttttaggtcacgtgttgctgcttgagccctttgaaagcatttttactgtttgccggaacagcgcacggctcagttgtcgtctgggatttgagagaagactcaaggctgcattactctgtgacgctgagcgatggcttctggacgttccggaccgccacgttttccaccggtcagtgtcatctgcctgccaattgtgtgtctgctagaaaagccacacggatttgaggaacaaagctttacatggatttgcatttatttattcacattatcccagaggacggggtctgacccatgggcaaaagaggcatttgataaatacaaaaaacagaaatcaattccaatcatgattatccagtgaccaagaatgacttgaatttcctttcttaataaatttgtggattctaaaaaatcctcaatgaaattacctttagttttaaagtagcttgaggcatcttggcatgggtgttcttcagggcaaagatagctcacactcacgtgagcaaagccagtcaccctgagggctgccaggaaccagcacaattgggcctccctgagccttggcttgactcgggtggacattcatactatgccgtgcccagccaccacagtaggcacctggcataagtgttccctgtgttctgggactcgccctagtgtgtagtgtacattgtctcatttaattcccctgatagccctgtatcctagctccacaggaagatgccgcgtttatccaaggtcacgctgacgacatggtcgggcctgcactgggaccccatgccacgccctgcaccgccccttcccgtaggggttggggcgctgtggactgaaggtgcaggccgaggtcatcactcacccctctgtgtggctttattatcatagatatgttgcgtgtctgtctgtgtttgacatgtgtatctgtacattgtacataagagggccactttttaaattccccaaccatgaattgtgcccctctgtgtggggcaatactactacttactgttaaggctgtttgaatttatcgcaacttatgggttgcgatgctattttaaaagatatcttttaaataaataatctttgccttttctaactgctgctgctattactaaaaaatttttgaattcagcaccgttttcaaaaacagtaaatctctagactgtacatacaaataaattattccattaaaatacatccttctttttttttttgagatgtggtctggctctgtagcccaggctggagtacagtggcacgatcttagctcactggaatttctgcctcctggattcaagtgattctcctgcttcagactcctgagtatctgggattacaggtgcccaccaccagtgctcggctaatttctgtatttttagtagagacggggtttctccatgttggtcaggctggtcttgaactcctgacttcaggtgatctgccctccttggcctcccaaagcgctgggattacaggcataagccaccgcacccggccttgtctttgaaatattatcaataaaacctacaaagttttaaataaactcccagtagtgaggagctgtggaacttctgattcagaccatgagtcagaggaaccaaattctcacccgggagaccagccctttcctcagtcgagccatcagtgcttcatctgggtcctctcacttagacaccctgtaatttattcttaatttctgagatggttttgtctttttcttcagtttctttcctgagttcaatcccagttctcatttcatttcttgcttttttgggtctaattctgttcttgatttctgattcccggtgttttttcttgcttgttgttttgatatgtttccagatgccctttgaggagatgtgattccatttggaacgttgagttttgtgtcttctgccttttgcttgtttttaggagggataattttcatcagctgaaatgctttcatttacattttttctgttttcttcttatagtagctttctatggagtttggcgtttttctacttgtagacattctgtaggtgtatattttaggtcagtgagctttgctttattgattggcgacaggtatcttttcagtgggcattgtgcctcgaggtggtaggtggggtgggtttgcctttcctttggttttgcaaatgcctggattttgctcttgctggcagttgtgaggtgtgtgcggaggtctcccccatttcctgttcacgtcccccttcccatcggccgtgctgctccgacctcctctgcctcccagctccttcccctcagttgtttgagtggcccccaggatttggcctcgcagagactttctctgtctgagttttctttcgggctgtgtggcatgctctgtttggatggtgggctttagctttcttcctgccttccagactggagagcaggggctggggcccgtgtgtcctaggaatctgaaagtcgtggtcctgtgtcagttgtgtgtgtcagtcgtgtgtggtccatgttggttttggggtgttttgggaagatgtgtggagagagttggatctgtgagacccagaagcacctcgtgtttgtccctgtgtgatgcgaactgcatttcttcaacttactacttacacgtggatgctgtgggcttttgaactccagatggaatccttacctcagtaaaccaccgaagccctcttcaagcagtagaacctatctcaacgtccgtccacaaaaagcagagctttgtgctttcacccttttctactcaagaaggtacgtgattcttcactttcttaaaatccttcatcaatggttgtgaaatatggtttccttatttaaagccatttctttctttttgtttctgtcttcatcagaaatgtcaggtttgtccttccacatcgcttccttggatgagagtggggttctcaatgtatgggtgagtagtggcccaggccgggcacatgcggggcctgagtgaggtggtctgggtggaggtggcgcctgaatggcgcagggggcgggacccagttagctgtggtgggaaacggagagcaagactgggcttcttggtcctgagcagaagggatgcagaaggccacacatggcaggtttggggccctttcgtgacagtgaaatagggactctcacacagggctttgggaacgcggaatgaaagtgagaagggaacaaaatgttagggctgaggtgatgctggattggcttgtcctggaggatgcgccaagactgttgattaagtcaccaagtgaagagaacacgaggagatcaaagcaaaggagtcaacttgtagagtgttagttctgaggctaaagatcagtctctttttctggagcagttatgttttagtacctaaatagcactccatcttaattagagctatgctttgcttaggttgtttcataattataaaatgtatcaatattcattttcaatattctgtttttaggtggttgttgaattaccaaaggcagacatcgcaggttcaataagtgatttaggtaactattaagtaaaaaaattaattttagtgttttctaaaatgaatcgagattaaaagtactgataactgcggtcaggtgcagtggctcacacctgctgggagcctcagcacgttgggaggctgaggaaggaggattgcttgagcccaggagttccagaccagcctggacaacatagcaagaccccgtctctacaaaaaaattcaaaaattggctgggcgtggtggcacacacctgtagtcccaactgcttgggaggctaaggtgggaggattgcttgagcctaggagtttgaggctgcagtgagccgtgatcatgccactacactccagcctgggtgatggaatgagaccttgtctctctgtt

SEQ ID NO: 5741 - DNA, 517 bp, Homo sapiens
catgttttgatctcaacttctttctcacctcattggcctcccacaacccagtttgtaatgacaaacccccctttcaccttgcttgaatcaggggtgttttcccatgtagatctggcaaaaaataatatgagtgagaccggctttgttcctaacctcttgagatgagggaagaggccactttggcccttggagcaaatgctctgtgccccgtagtcacacgtctgtggtggcccttacaagtttactgttgattctgacttcagtaaaaataagacagtcgtggtgctcatttcactgctaaatgcttttgaggtggagtcaccatgtttctcaatgtattctttatgcggcaccctctctgctcatggagccgttctgctctgtgttgtccactccaggctgcccctagaatcctggagtgtcagagctagggagcctgggcaggggtcctggtgcctccttctcaacgtacacaggtcacgggatgggttagtgatggggcgagacccacatagtc

SEQ ID NO: 5742 - DNA, 307 bp, Homo sapiens
caaggagtggagggtcttgtttgcttagttttgtgttctggtaaaatgaatattgagatagcagaaggaatatgagactgcaagagaggcatgagacggagtgtgtgggttgtctcaccctgcgaatccagaatttgactcacattagattctgatctgtgatcagatgtagagatacttcagccttcctagggtccacccagtaccctcatcactattaaaacacgcggcagaatgacacagccagcgggtcgtcctcatctctattaaaacacgcggcagaatgacgcagccagcaggtcgttca

SEQ ID NO: 5743 - DNA, 554 bp, Homo sapiens
gaaatggctgcccactaaaaccgtgtgttaagatgtgatgctagcatccccctttatcatcgtaagaagcagtgtgatgtgatagcttagagcctggatgccagagctagctggcccagtaaccagctgtgtgacctcaggcaagtgataccagctctctgtttccttatctgtagcatggggatgataataggactttattcctagggttgttctgatgatcaattgatatacagaaagtgcctacccggaagatgctatatgagagttagctattattattttcataaagcttgccttgaccatgttaatccagtttaaaagtcctcatgttgacattttaaagattgcgaaggcttctctagacagtttatagcatataaggaatgaacaattgaagaagttaagatcttaacatgtctttaaaaagaggtggagacatgcagaaaatatacatgcaaatgcaaagttctttataacataagttagactgtatcatcaagcaaaaaaaaaaatgggtatatgtatgagcaagcaaaaggatatgagtgact

SEQ ID NO: 5744 - DNA, 599 bp, Homo sapiens
ggaaatagttacacagtaaaatatttgtaaataccacctcttggtgttttgaattctctcaaggatactcttttcccaaaaaatgatggcttcagccgctgattgacaagccttctcaaaatatttcctgaacacagctacattctttccatactttctttttgctctattttaatttttgctatctcagcagcttaacaaaagtttacctgcaaattgatcacaaaaatttaaaaattttaactattacactccaataagtgtaacaaatactctcttcacatccaggctcaacattaatgctctgtccaagtacattacatttacttcatctttagttttatctcactcactgtatttgtaggactcactcaaaagtcataaacaaatgtcaacataaataaaaataatgtgcagaatggtagagtatcccattattaaaatttctaggttgtttttgatataccaaagattaagactttagaagactgttggggaaaccacccccacaccacccagcaggtaccctgagtctagcggcgacaaagctgatagaaagagagagaccgaataagtgttgaaaaggcaggtccggggga

SEQ ID NO: 5745 - DNA, 599 bp, Homo sapiens; identical to SEQ ID NO: 5744

SEQ ID NO: 5746 - DNA, 599 bp, Homo sapiens; identical to SEQ ID NO: 5744

SEQ ID NO: 5747 - DNA, 199 bp, Homo sapiens
  SITE (45): n equals a,t,g, or c
  SITE (58): n equals a,t,g, or c
  SITE (110): n equals a,t,g, or c
ccataatgagttcttgagtcttaacatcaatatgaggaacatcangggtacagcccangatgatcttcacttctgctggccttgtttcttttttacagtttttcctctantgtgaggagattcccgcaaaggtgatggtttcaactcctgatctcttgtgatccactcttcagtctaaataaacatttccataagaaca

SEQ ID NO: 5748 - DNA, 367 bp, Homo sapiens
  SITE (120): n equals a,t,g, or c
tttttttttttttcctgagtctcgctctgtcatccaggctggagtgcaatggcgagatattggctcactgcaacctccacctcctgggttcaagcgattctcctgcctcaacttcccaantagctgggattacaagtgtgccaccatgcccaactaatttttgtatttttaagaaagacaaggtttcgctatgttggccaggctggtctccaactcctgacctcaagtgatccgcctgcctcggcctcccaaagtgctgggattacaagcgtgagccactgtgcccggccctttctttttttaataaaataaatcttttccccgaaatctactttaaaaggaagatgacagccccctcttgagaaca

SEQ ID NO: 5749 - DNA, 3894 bp, Homo sapiens
gtggcttgacttcacagtttattcagagcaggtgcaggtgacctggtgggcagggtgcccaggaggggcaggggtgggcgggcgctccgaaccttgtggtctgaggcaggaactccattaaatcagctcctgcgacacagaagtgcaggggctcaggcccgtgtggtctctggaggccccacggggcttcgatgagggccacacggcgggacttctgtcctcgctgcctggttttgcgcaaagcacccagctccctgagcgccttctcaatctgcaaaatggggtaacaggcccagcctctagggccaagacaaagcgaggtgagggagacactgggttctcgcagtgcccaacatgggagccctgaggcagcgcccgcaggatctgtgccccgccgccgacgggaccttcgggggcagaagcagccggcagtcctgcacagaacaccgaagaaaaggcgccatttctgctcccctgccccacccagctctgcaccccgtgaccccagcctcccagggtccctgcctggcagcctagggtcaccaccctggaggttccagctctttccaaaccaggagacagactcatctctggagctgcccaccagtggtgtttggtgtcctgttcacaggaaggggtgagaaggcccagcccagggccgggaggcggagccacgggggctcctgacagggccagggactgggccaggggcccgggaacttcagcacaggccagggtcgggggtcaggctcacctccttcaggagctcggcacaccgccctgcaggataggccagcatgaggagctgcagagtcagcccacagggcccagcccagcctccaccccaaggcccctgggctcaccaggccgggccgccaggtagagaccagtgtctgctgtcagctcccgaaacttccagaaccccagccggtccttgtcctcaaggctccgagctgtggggcacaggggggctgggcgggcagtccctgggagagcagcagctgggcagagccccccagggccaagcttactaaagtacttgaggacgcgaaagttcctgccccgccacatcagggacacccgcaggatggcgtagccctcgtagtcggtgtccagcacgtggatctctctgtggccttcaagagccggccatggcgttgggggagacgtctgagggggacggacctcgaaggccagggtctgcagggtctaactccatcctgcccccacccagtcccagcacttgagtggttggagacactacagaagcttttgaaggatgatccagtgtgttggtgggagaatgggaaggtctggggcatgaaatgtgcagggaacagcatggggaacagtgcagggaaccctgcagggaacagcatggggaacggtgcaggaaacagcatggggaacagtgcagggaacagcatggggaacagtgcagggaacagtgcagggaatgcatggggaacggcacagagaaaagtgcagggaacagcatggggaatagtgcagggagcagtgcggggaacagtgcagggagcattgcagggaacagcatggggaacagtgcagggaacagtgcagggaatgcatggggaacggcacagagaaaagtgcagggaacagcatggggaatagtgcaggaaacagcatggggaacagtgcagggagcagtgcggggaacagtgcagggagcattgcagggaacagcatggggaacagtgcagggaacagcatggggaacagcgcagggaacagcatgtggaacagcgcagggaacagcatgaggaacagtgcagggaacagcatggggaacagcgcagggaacagcatggggaacagtgcagggaacagtgcagggaacgcatggggaatggcgcagagaaaagtgcagggaacagcatggggaatagtgcaggaaacagcatgtggaacagtgcagggagcagtgcagggaacaacatggggaacagcacagggaatagttcagggaacagcatggggaacagtgcagggaacagcacagagaacagtgcagggaacagcatggggaacagtgcagggaacagcatggggaacaataaggcctagctgtgtgcacagccgggttccacctgccatcacagggcaactgcacttaccaggaaaagcgaattttcccgtactgtctatttctgagcccacgatcttctctatctcacagcttcctgagctgaaaggcagcaaagtgcccatcggtaaaatgctagcctgtgtcccgcctgctgggctccttcccggagtggggctgtgtctttaggaagggcacaggcagcactgtggagtatcccaggcctggagcaggatgaggcggggaatgtgccaggtggggccttcccctggggattctgttccctccagccagtcacctgtcccacaccccttttccttccttctaagttcacggggcttcattaaaacactatgcttatatttgggataaaatgcagatccaggagcctgggggtcgagggctcaggcagacgggcaccgggagtgctggcccaccagcgggacggcactcagcccagaccccacgctgcagcgggtgcagcaacccacgcccagtccccggccatgcatgcctcttcctctccagcagcccccaggcctcttacctgttatatgcaaccttcacggtcaggttactcccgctcaaggtgaggaacaagccctccacccgcttcggggccgtcagcaccaggctttgatcggaggccacaccgacttccctccagaatcctccaatctagagagatacggagcctggccaagagctgagcagtgggtctgagacccccaggggcattccacgaacccccgggcaggggcctgctgggctctgagaggtcagcagatggctgtgaggctcggtggcaaagcagcaagacatctgtgagcccactgtccccaggcatgtgtccctccaagcggtgccttcaggccatcagacagcaatgcccacagggcagcccctccccactgggccatctagagctgcggaacagtccctagggcttctgcgacatgtcgggaggaaccacaggccctgcctgacctcggaggcaggacccaggagcagaggcctggaaaagaaagcccgcagggcgcggcggagtgagaaacgccagagaacaggtggctcgggtagcgcagctcgccagcctgccaaccacgccagaggatgggcctcctgccctcagcaacccgcccagagccgggacttccgctgagacttttaaaaaccctaccattttcgggaggaaagaatcttcgtctccggcatctaccttctctgggcctgctaatgtgcctctggcccagcagccggcacagactcagcggagaagaaaatgccgctaacaggaagtgtctagccgggcaccagcgtccccacgagctccccacaccgggagaggcctccttccctgagcctgaggggttgggggtgtaggaggagccccaccaactaagaaggagaagccaccttctgccggtccagctcctccatggctgctgccacctgcgcccggagcaccacgaggacacccaggatggtgcacggcagcctggcctccgtggcggggtccgggctccgggttcccctgctgcacagcctgggccgattctatacggacagtgcaggcttgtgcgcccacccgggaatgtcatcaggacagcttggctgctggcagctcagagacgtgggtttctgcacaagcgccatcggccctggtgacacccacgcccaccgcaggggttagcctggcctagacagcagcctgcccagccaccctcctggcatatggacagcggtggacgctgctggggccgtctcggagcctgagaggaaga

SEQ ID NO: 5750 - DNA, 412 bp, Homo sapiens
tttaacataggtcatacttttctgtgtctttggacgtccagtgacttttgggcaggacgttgttgatgacggcagccctgcatctactgtcaccctctaaacagcactgacttttgttctgggatgaattctgccctcccaaaattcctgcgttgaagccccagatcccatggtcactgtttcaggagatgggactcttaggagacaatcgagattaagtgaggtcaaagggagtggccctaatttaacaggctgatgtccttattaggagaaaaagaggcacccagagagcgctccctgccaggtgaggacacagcgaggggctgccttctgcgaatgggcaggaagccctcaccagaaactgcactttccggcaccttaatcttggacttccaccctccagaacggtgag

SEQ ID NO: 5751 - DNA, 403 bp, Homo sapiens
ggccttgaaagatgtgtgtcccagaagctatataaccaggtataagccacatgagtccctcaatcctcctggagaagtgttccaccctggagagctgcttctcttccagaggactttgaacaagaaagaaactatctttcatgtgataggccactgagagctggaagtttattaccacagtacagcctttcctattctgattaatacagaaattggaaacagaagtgagaattactcacaacaaaaactaagaataattgccattggctgagcagtggggcaagaaggtgagaaaatgaatatcatatttgggaaatattaaaatatggagctgcttgtcatgcaatgctcaatgtattatacatttcaaaactgcttaaagagtggattttaagtgttctca

SEQ ID NO: 5752 - DNA, 629 bp, Homo sapiens
ggccttgaaagatgtgtgtcccagaagctatataaccaggtataagccacatgagtccctcaatcctcctggagaagtgttccaccctggagagctgcttctcttccagaggactttgaacaagaaagaaactatctttcatgtgataggccactgagaggtggaagtttattaccacagtacagcctttcgtattgtgattaatacagaaattgggaacagaagtgagaattactcacaacaaaaactaagaataattgccattggctgagcagtggggcaagaaggtgagaaaatgaatatcatatttgggaaatattaaaatatggagctgcttgtcatgcaatgctcaatgtattatacatttcaaaactgcttaaagagtggattttaagtgttctcaacacaaaagataagtgaagtgattgatatgttaatttgcttgatttaataatttctaaatgtacgcatatatcaaaatatcacatcataccttaaaatgtatacaattattgtcagttaaaaataaaataatacaaaagaagtaactttaaacatttcaaaacatatgtatagaaagcctgttacccatgttcatttgggagacggatgctacctattgaaatagg

SEQ ID NO: 5753 - DNA, 656 bp, Homo sapiens
attgcatataaaaagttacttttttggaaacataaaagtacgttttaaaacttgaacatgacatcattagcactaattctggtttaaatgaaagtcctgcagaaatgccaaagaaggcagggcagagcggcacggattctaggtaattaaaagtgaaagaggcagaagaatagtggacagaactgcaggatagtccttaaaataatggtggtgggaaaggaaaacacagaatgctcctggcaattctaaattcctaggtttgcctttctagaattccttaagaagctgacagagaaatcagagggttacaagaatttcagaaaatttactccaagtgagaggacatactcacaactcctatgaagggtttctaaggtctttgtcctgtgcaatttgacaatgtgccatttctgtgctgtctctgccctctccctatccgtttgttatgggatgggggattaccctgggaatgatttcagctgcttcttacacagatgcctctcaaggtgttcttttgtgtcctctattttcttcttgtgaactgttaaagctacatgcattattttttttccatttactgaaataaagttttcaagttctaaataaaaatattctgactcgatgaaataaataaaggctacaaaagaaggaagaaa

SEQ ID NO: 5754 - DNA, 488 bp, Homo sapiens
actgcttaattagcaatggctagggagatctataaaagcatgaataaatgtaggactacagaacacagaaaggttattctaattagtagatataaatgagtaatggaaatacatggttcacagatttcataggaaacaatctatttttaaccatctgtttctatttagagcttgaagttggatatccaaaatggccgtgcaagcttaggctggggattctggatgcaacgtctttacaaccttacctagatatctgctactcacatttttggtagtgtttcaaacgttctttatccagacagacaatgtttaagagaaacaacttatttctgttaatatttaccggtagaattcacaccctctatcataaacatatgctgcagaaaaaaaatgtcttgtggtctttcaaatgctctttagcacaatataaaaattcgtaaccttgctgtagtattttcctacaaaatgttactctgctttcttttaag

SEQ ID NO: 5755 - DNA, 5786 bp, Homo sapiens
cgcaggacctcatgagtaagctgtggcggcgtgggagcacctctggggctatggaggcccctgagccgggtaagcgcgaatagatcaagcaatttaggtcgtgttagaaaagaagtcccgttcttgctcctcggagagtccagggtacttcggccacaggtggcaaggagaaaggcggtgctgttgttatggtaacagcgagtactgcgggaagggtgggatccagtaggggcttaggttattcagggcttcccctgccaccctccggccaaacactgtcgacaggctttccttccacaggagaagccctggagttgagcctggcgggtgcccatggccatggagtgcacaagaaaaaacacaagaagcacaagaagaaacacaagaagaaacaccatcaggaagaagacgccgggcccacgcagccgtcccctgccaagcctcagctcaaactcaaaatcaagcttgggggacaagtcctggggaccaagaggtgaggccaagagggtcatagttttataaggggaactttaggagcagagatagtagttagaagccgactgggctttctagaagaccgaatggacactgtgacttcagggtccagatttaggcagcaagagtctaagagggtggggaaagttgggtgtagctacggagtaggaggaggagacgcttgctcattttaaagagtagtgttgcttctctgcagtgttcctaccttcactgtgatcccagaggggcctcgctcaccctctccccttatggttgtggataatgaagaggaacctatggaaggagtcccccttgagcagtaccgtgcctggctgggtgaggatctggaggtggggaaactgggtttcttattatacccgcctaaagaaagaaggttggttctgaaatgggttaggattttccatgtcccagtattaactcagccaaattagggtgccccatctgaacaattctgtttttctttctccaacttccttcccagatgaagacagtaatctctctccctctccacttcgggacctatcaggagggttagggggtcaggaggaagaggaggaacagaggtggctggatgccctggagaagggggagctggatgacaatggagacctcaagaaggagatcaatgagcggctgcttactgctcgacaggtatgttggttcattgtttattcactcaccaaatgtatacagtattgagaactctccacgacccacgcactttgcgtggcattggggatatcgatagtagagaaaagacaaagtttctgttctcctggagctagtattctagtgtgtgtgttggggggctgggaagtaaataagtaaataatttcaaaaagctatatggtttatgacaaaaagaaaagggtgatgaaatagaaagtggcgtaaacaaacagatagaaatgatggaagagagacattagggtagttagagaaggcttctttgaagagataacatttgcaataccagaagagcttttgagcagagaccagcaggcgcacagaccttgagactggaacatgtctagcaaaggagaagaaaaagtggacaagccactgaagggctgtacgcagagaagtgacatacttggtttacatttcaatagattactttggcatctttgtagagaatgaatcttcgtggagacaagagatagaagtatggagaacaactaggaagctgttgaagtaatcagctgagaggcagtggttgctttaaccaagacgaaagtggtggagatggagaaaatcagatgaattatggctatattttggaagtagatacttgtggggaggggaatggagagaaaatatatcaaggctaagcctgggattttggcttgagcagttatccacctgatactctctattgagataagattaaaaataacaacagacctctgggaaagctggtacagttttggtgcacaggtcaggcaggtaacattactgatgcttctccccttgagagataaggacctaaagctaaatgtcaggagatctgggaggaggcagtatttatgaagaggaacctatggaaggtgtcctggagagggtgctcattaattaatatcccgcctccgaaggcctgcactgctcaagaccctgccttccatgtcccttctttcccctcccccgatctggccgacctcgcctctccatcttcctccattttcagacagcaccccgtctctgtctctccctagcgagctctgctccagaaggcgcggagtcaaccttcccctatgctgccgctgcctgtagctgagggctgcccacctcccgccctcacagaggagatgctgctgaagcgcgaggagcgggcgcggaagcggcggctccaggcggcgcggcgggcagaagagcacaagaaccagactatcgagcgcctcaccaagactgcggcgaccagtgggcggggaggccgggggggcgcacggggcgagcggcggggagggcgggctgcggctccggcccccatggtgcgctactgcagcggagcacagggttccaccctttccttcccacctggcgtccccgcccccacggcagtgtctcagcggccatccccctcaggcccgccgccgcgctgctctgtccccggctgtccccatccgcgccgctacgcttgctcccgcacaggccaggcactctgtagtcttcagtgctaccgcatcaacctgcagatgcggctgggggggcccgagggtcctggatccccccttttggctacgtaaggcccttaacccggactctgcgccccgtcccatgcccgctcttgagtatcttccccaccctattaaattacatccggtgcttcggcttgtacagaactgggggagtgggatgttgtgggcagaccagtctccggtatacacgtattttgcccctgtcggagcttgcgtcgatgcctggggcttggaaaccaccgcaaaaaaccaggctgcaaaccagcggaccgacttttgggactccgcctcttccagccgggattacctggcgtgcttcggcctttggcgtcattccgaaaacataccgcaagccaatcagcggcaaccttgctcttcggggcggctgttcgttggttgatatgccagagcctgttctgttgtctgtattggctattgccgctgtcagtcagggccgtgggtcgaaccttcacctactctttgtctgtacaagctcttgttgtctgggtgagcggcggaggcgctgctgtggattggtcacagggagaaacctctgatctgttcctattggcccgtccgtcaagggacgatgatgattggtagggcagagcaatctgagtcctagttggtggagttctgcccggatggaagctccggccgcggagtgatggtggcctcagcgaagatgggccgggcagggaccatggcggtggcagcagaggtggcaggggcggggcggctggcggtagaggaggctgtggtcctcagggggctgtaggtggaggtatggctcgggccagcagcgggaacggcagcgaggaggcctggggggcacttcgggcgccgcaacagcaggtatcccaatagctccaaaacctatcacgacagccatttgtctctttcccctttccttgtcccttccttttgggggtgggggaggaactcacggagccaaaggtactgtgaagttcctaaacatgtctcttccactctttgtctaaactttgtaacgtagatgcagctgactttgcctgtagcctcatagaacccatcccatggctgcagtggaagcttgcggtggctctccagtgaccagaggcatagtgaggtcccagggaggctccctctgtcttgcaacagttatttgtgatctttttctatgtgcctattgtcacaacagagtccggcagcgtcttctcttgagggagcaatttggagaagagctggaacccagactcgcgccctggatgccatcctttatcatccacagcaatcccatctggttgggagcactgctctgggtctcacactgcccctcctctatcctagggagcctgaggcccaggggtggaaagatccagttgcgggtggggggtagtgaaccgcgcaggataatgaaagcaacttgctttggaaatgacctaccgctacccgttgtctgagactgagattatctcagactgtcttctggcttctgccaaaacactcccttaacagaaagcaccgaggggatgggggtaggggggttggggagagtgaggcttgagtgtgaaggaagtctcatatatgcagagctgaaatctccctctttgtatgtccacacttttgtcttgttctctagactgattcttgctattccaaatcctcttccacgttgacagcccttcagatatttcaacactcctctcagcatcctccacttcccccatctctccaagctgaacttggttcacagggtgggattgtgtatgtgcatgcaggaggtgggggtggacagtgccctgggctggaatcccccttagttctaagtgcctccttgcccgcagcttcgagagctgtgcccaggagtgaacaaccagccctacctctgtgagagtggtcactgctgcggggagactggctgctgcacctactactatgagctctggtgtaagtctccaagagggctatttccaggtccctgtgtccaccctcccttggacctcagaatttcggccttcagggccccttctctgcatgaaagatgcctgagttgctccctccttgcctcttgcagggttctggctgctctggactgtcctcatcctctttagctgctgttgcgccttccgccaccgacgagctaaactcaggctgcaacaacagcagcggcagcgtgaaatcaacttgttggcctatcatggggcatgccatggggctggtcctttccctaccggttcactgcttgaccttcgtgagtgacttgatgccctgggtcagctaccagtggccctccccaaaccagaaccccaaatcgtctcacattcccttttccacacatttcaaagtatttttccctaatataaaaactagcaccctatacctggttgtcttcaaccaatcatgccaattttctcccctgcaggcttcctcagcaccttcaagcccccagcctacgaggatgtggttcaccgcccaggcacaccaccccccccttatactgtggccccaggccgccccttgactgcttccagtgaacaaacctgctgttcctcctcatccagctgccctgcccactttgaaggaacaaatgtggaaggtgtttcctcccaccagagtgccccccctcatcaggagggtgagcccggggcaggggtgacccctgcctccacacccccctcctgccgctatcgccgtttaactggcgactccggtattgagctctgcccttgtcctgcctccggtgagggtgagccagtcaaggaggtgagggttagtgccaccctgccagatctggaggactactccccgtgtgcactacccccagagtctgtaccgcagatctttcccatggggctgtcttccagtgaaggggacatcccataagtagttttgagagggtggatgggttacttgcccaccagaaacagccctagtcccaactccttgcgttcctttggcccctccctgcctacctagaatctgcctgaaagggctggagaggggcagtattgggggactgtgctagctttacccccgcaggacatacacaggagcctttgatctcattaaagagatgtgaaccagctacttgtg

SEQ ID NO: 5756 - DNA, 4332 bp, Homo sapiens
tagagttcaaaatgttttttccaatttatttagaaaaatagactctggattcacattcaccccagggctatgtgggatgacagcaaggagacacctgagatgaaatgaggaaggtttgaattactggtatccaaggggctgggggcaaaagccagaagcctttgtcccttcagagccagagtggcatgagtgtcttggctcccctcctctccctcccttcagtagtcttcagccatggccagtaagacaaggctggtccagccgtggaaagggcggcagcccatgcctcgcccatcgcggtcactgtactgctcccaaagaaagcctgtagcctggtactggcgccatacattgcctaccacgttggcacggagctcaccgtggagtttggcagcccgagcctggtgaggaccctccagatgcccatagtggtggagtgctcccaaagccaggtagttgacattgagccacacagcaccccgccagtaggggggatcatgctctgaattgcgctggccataaaaggagctggaggctgcaagggagcgtaaaccaaaggggctccagagatggcggctgtcggctagaatgtccagcaggggcccaaggcgggatgaggtggggtccagcagtcgcagcagcaagggaaaaagactgacatagccaagagcatctacatactgcagttgaggttggggccgacccaccacccgaacgagcccctgagggggcctgggcttcagctgtactgcttttgtgtggttcccaaagtctgcaaagactcctagctctggggcccagtgcagctcatccaggctctctgctgcctccagtgaggcagccagtgggcccagctcagcagctacctcagcctcacccagatgctctgccagccgcgtcagcacacgggcacccagtgccacccaacatcgcaggtccaggtgccgctcggttactgaagggtgtgaagcccgggggtagtcatccagcccagagggtagggtcttggggttcagtaaggttggtaaggcagggtcccgtccccgccagcggtaagatagtggcagtgggcctgcctggctctgatggagccaggaaaaccaggcatgcaggcggggcaaggcctttcggaggaaagccaagtcgtcagggtcaccaacctctagcatatgggctacaggcaaaagtagggttggggggttggcgtggactgctcgttgtactaggaattctggaggcacccgggctcgggcctcatcccccagtatctgctccctcccaatccagccatcagcatttagcagccccagccagtggccaagggcttcccgggtgagggagggatcccaccgctgaaccaccagctggtgaaagccttcatcccaaaggaagcctcgtgggaagaatgaccgggagggcactgctgtaaaaagaggtacgggtggaaagagggctgggtccaccttctgctcagacccttccaccccgatgtctggcaataccagcccttgtccgtagaagtagccaattccaccaaggaggccgctgagggcagcctgacccaaaacctgctcgccagagctcaggcccttctccttcagctggaaggtcttctcaaagcgctctctaaagccttcagcatggctctccagggcctgggtcagtagactgcctgccagtcttggcagggcttgatttcctcctgcctgggcactgcctgattcaaacacaaactctatggaaatgggaattttcagggtcacctgctgtatcaagaactgcccctgcccttgcccacttggacctctgtcctcccacttcagggatcctggcaagccgaggtagcgttcagggggggcccctgggggccgatgctgaaaccagctatttaggcgactctttaccatctctgtcagcaggggcagtcctgggttggaggtccagaagacattgtagcttgaaggggagaagataaataggaaatattattcaagagaaggcagtgggcattataaagagaaatacaaagtgttcaggagtcaggttgggaggtctcaggcaggggacatggagactggtgaaaatgggaataaccaccccttccatcccccaacattcttttcccccagttacctgccatacttgggggctgtatcccctggactggttggtggcaaaagtgtaaagcggaagtcaccaagttcactggtgtgcccactgataaacttcaactgccccttggccccaacctctggtagtaggacttccttgccatctgtcaccacatagaagaacagggagaccaaagggagggcagaagtacctgagtcctgagtgaccaacgaggacagaaaagaacagtgttagattggcattctctcttgaattccctcttgagaatcagccttagtgagggaaaggaacagtaggcaggggtaatgtaaacaacatacgtctggcagtaatgagggtcactgagggtaaccaggtacacccaagcgggatgagataaagagccttgcactgggtgccctgggagataacagtatacttttgtactatgtcctacactaagaactctacacagttgatttcatttaattctttttttttttttttttttttgaggcggagtctcgctctgtcgcccaggctggagtgcagtggcgcgatctcagctcactgcaagctccgcctcccaggttcacgccattctcctgcctcagcctcccgagtagctgcgacaataggcgcccgccaccacgcccagctaattttttgtatttttagtagagaccgggtttcaccgtgttagccaggatggtctccatctcctgacctcatgatccgcccgcctcagcctcccaaagtgctgggattacaggcgtgagccaccgcgcctggcttttttttttttcttgagatggagttttgctcttgttgcccaggctggagtgcaatggcacgatctcggctcagcgcaacctccacctccctggttcaagcaattctcctgcctcagcctcccaagtagcttggatcacaggcatgcgccaccacgcccggctaattttatattttcagtagagacggtgtttctccattttggtcaggctggtctggaactcctgacctcaggtgatccgccagcctcggcctcccaaagtactgggattacaggcgtgagccaccgcgcccagcctctttttcatttaattcttacagtcctgtgagttaagtgctattattatctacattgtacattttacaagcaaggaaatcaaggcttagagatggtaaatagaaatggttatacaggcagttgtttaaggcaggatttaagccaggcagccagagcccacttcatgctgcatttgctggcagcaagggaaggatggagggggtctgggctgagaaaagggtgtcctgaggccctgacctgaggctctacagtcactctccagctccagtcccctccgtgctgacccccaggcctcttgacgaactcagtggtgagccttaaggccccatcctggatgtgttggcgcccgaaggagaggccgtcgtggaactcccagccatagggacccacaccgtccccctgctcacacgtgtgcctgagcttaggagtccccggggtggtgccctgctgcgcccacatcagtcctgggggtagaatggccacgtaagtcaaagagcaggggacctgtccctccgggtctccgggtcatccctcttcataactctcctgatccattccttcccacccttgctctcgcttcaagctggggcgcccagattaggagtccgcctgcctgcccgccctggggcccggttaccggtgaggaggggcttcgggctgcgggtcttcatgccgaagtagacgtgagggcggtaggttccccagaagaggtccggggccacggcggggctggaggagtcggcaggcaacacaggaggcgcggagtgcagcgtgaccgcccgccgcgcacggtaccacgccagcacccagcgccccgacatacccagggccaaagacaggaccacgacggccagagccactcctccagccgtgctacgcggcccgccgccccggccgtcccgtcgcccggggcctccccgagccgccctctcggctgtccgcactccctctgccggcactgcgcggcgccgccgctcgccccgagccatcctggcactgaggtccgcgtcacaagagctcggagaggcggcagtggagcccgggtcctgcctcacctctccggctcccgcctctcgccctggcgaccaccgtccggttagcgacacctgccagccagcgcctgcgcctcc

SEQ ID NO: 5757 - DNA, 143 bp, Homo sapiens
tgagacggagtcccgctctgtcgaccaggctggagtgcagtggcgcgatctcggctcactgcgacctccacctcccgggttcaagcgattctcctgcctcagcctcccgagtagctgggactacaggcgcgtgccatcacgcc

SEQ ID NO: 5758 - DNA, 704 bp, Homo sapiens
agcaggctggagctacccagcctgcagtgaaattaaactgtcgtcgctttcactctttctttatagatgatttttttgatgccatcgttctacgtgagacgataataaacggttgttagttcttttattgttaagcttatcccaattatcgtggaattccttatcctgtttttttgggtggagtaataatttctgcacatctaaccattattaaatttaataataagtatcgggtttgttacgatagaatatttctatatcctcaagaatatgctttgccttattgcctgtgactttctgagattcaattatagtatctgttaaattctaatgttaaagagaactcttttttccgctttgtgtaagttaacctatattgattaccaatatcaaataaaaaggtcctgtaatgagaataatcacctttaacctcctcggcaaaacagcaaagcgtgcaaatatacataaagtctttcttacccctgattttgttaactaatatcaattaaatgcgtgaaaaactttgacttgctataaacttgatacttcttctccaggtctaaatatatcttttgcatttttaactgtgtttctatgtataaaaagaaatctttggcataagagatatctttattatttagtgcatctagctcaacaggtaaagatgtcgttttgttgctattcacatatgatatattcatatc

SEQ ID NO: 5759 - DNA, 32249 bp, Homo sapiens
ggatcattgggtaactcaagaagttcaacacaaatgaattcttattccgacagtggataccaggaagcagggagtttccacaacagccagaacgtgagcaaggcagacaacagacagcagcattcattcataggatcaactaacaaccatgtggtgaggaattcaagagctgaaggacaaacactggttcaggtaagccaaacgcatcaagatctctgcaaagaaataccttccggccgggcacagtggctcatgcctgtaatcccagcattttgggaggccgaggcgggtggatcacctgaggtcaggagttcaagaccagcctgcctaacatggcgaaaccccgtctctactaaaaatacaaaaattagccgggcgtggtggcgggcgcctgtaatctcagcaactcgggaggctgaggcaggagaatcacttgagcccaggaggcagagcttgcagtgagccgagatcgcaccactgcactccagcctgggcgacagagcgagactccgtctcaaaacaaaaaaaaaaaaaaggaaaaaaaaagaaatacactcctagttgaatatctgttataggtatttcttattagaaataaatgtgtacaatttttatagaatggataaaatagtaaaatcattttattctatttgagatacaatgttaaatatgtttgtttctatgagttagctcccattgatgaattctgatgagttcctggatacagtagagtaattcttctggaaacaacaagtttggcatgaggagaagagtctaaggggaatgtaagagagttgaatggaatgttttggtccctgaggggttatgagttcctaaaaatactagggctaaaatatgctataaaaagctctagagggcagggtgctatacccacacctgcataaaatgggatttgcccattctaaccaaaggttattaccatcatcactggaattattctctaaaactacatttcttttcttttactagatagaatacagctattcctgcttaaagaaagttattgtatagaaacatatccattctgttaagttagggttctctaacttgatagcaaaaaatatatattgcatgtatatttataaaaactcttcagctcctttctcattaccactgtattcacatcagtccaccagcatgtcccaggattcagagaggcaataggagtcctgcatggtggtaaccagtgaggctaactatctgtgccaggaccccaaaaccccagtgctttctttagagctgaaaagtagcaagataatcaaataagttaggaggacactgtgctgcttctactgcaatacaggaagctctacaggtacacagcaatgggtcacggttcccaacgcccacagagaaacataatacaactttggcacttttgctcagcaattcaggagaaatttcagagtcatttaaaacatgtttgtattaaacacaaatataacatatgaatttttcaagctaaaatgggaaatcttgtgcatgtggcaagcaacttcaggctgcaccccaagtcctcagattatatatttattcttttgctgttggggatgctttggtggaaaagtttgagaagctctggactaaatgctaatgggagttcatccgcttaggtgaatttctgtgtcagcaggtctgaaatcacacttttcaacagcagttaccttatatctatataaattttattgcccttagtaatgatcatgtaaacacttttttctttaagagtaagttgattttctcactagagctaaagaattgtttgcaagggggtgtctgagacttaatttgcatgtagtctaggcaacacattttctagttgtctggaccaacttatcacttcattttggtagttgcaagtcatgtgggattttctttgcattttgttaccactattaccacccaatcatgctttttttgttgttgttcttaattaatagagacaaggtctcactctgtcacccaggctggagtacaatatggcaaaatcatagctcactatagtctcaatcccctgggctcaagcgattttcctgactcagcctcctggagtagctaagactgcaggcacatgccaccatgcccagctaatttttttgtttgtttgttttttgtagaggctgggcctcactatgttgccctggctggtgtcaagctcctggcctcaagcaatcctccctcctcagtctcccaatgtgtagggattataggtgtcagccaccacacccagccccaatcatgcttgttaactttccagctgtctactaatttttaaaccccatcttttttgccttgttgtttaccatcctctttcctccccatgtcttctcccctgctattgccttcccaaaattgttgaacttgaacacacagtgagttctcactgcaagtgtttcagccagcccagttgcatgcgacacctggaggcagagcagacatcctcatatgacccctaagggtatacaaagccctcatctgatccctgcttctttccttacctccccacctaaaagtggatgtgggttgatgacaactagactctagcagccactaaggaggtaacagagcagcctggtcctagtcttctaacctggatccctaatgtctttatttctcagttggctctcctttttcccatacatgtttcccttgggccccttctccagcctaaccattcctttttattgttgcacagcatgaaaaacagtgtccagcacctgctgtaactgcaggaatcaacagattcagagtaggatcagcaatggcagaaatgttcactttccatcctggtcttttccagctgtctaggccaagaacccaaaagaggctttgaccattcctcctgctggaatagatttgggggtgccttttttttgcatctctttaaatccaccaattaaagctaagaactcatagatcagaagaggtaaaaagaaatggctaaagtgagaagctatgcttgatctaaaggaatcaacaaatttgcctagagcacctgtgtagccaagctgttccccgaagtaaattcacagtggagagcgccagacccacacttgatccaaatgttcatttattccacaatgaaagaacatgttccttttgttaatgggaccaacccataaagaaaaacaatgataaatattccactagctacatttagactgatatattcaaattatattcaaatttttgttttacataaatgcattgccttggccaaactttgcttcatagggaatgaagtaagtacattgttctggtgccccttcacgctcatgaattacatgtaacacttagaataaaacattttatgtgctgtgaaaaatgcataggcaatagttaaaaatgtaaagataaaaaaggagtattaaatgtcttcagatctctttttacaggttaattttagcatttggtttaaaccaccaaaaaaaaaaaaaaaaactaaaacaactaaagcaccgtgaggaaaaattaatgtctggctcaaagcataaaaaggaaaagaatcttagatgcctaaaatagtggattcacattctgtagtgagctatgtgtatttcttttgtaatggcaatgaacacaaaaccctggataaacccattctcttttttccccccctttcatcagccatcagtagccaatcgggccatgagaagagttagttcagttccatctagagcacagtctccttcttatgttatcagcacaggcgtgtctccttcaagggggtctctgagaacttctctgggtagtggatttggctctccgtcagtgaccgacccccgacctctgaaccccagtgcatattcctccaccacattacctgctgcacgggcagcctctccgtactcacagagacccgcctccccaacagctatacggcggattgggtcagtcacctcccggcagacctccaatcccaacggaccaacccctcaataccaaaccaccgccagagtggggtccccactgaccctgacggatgcacagactcgagtagcttccccatcccaaggccaggtggggtcgtcgtcccccaaacgctcagggatgaccgccgtaccacagcatctgggaccttcactgcaaaggactgttcatgacatggagcaattcggacagcagcagtatgacatttatgagaggatggttccacccaggccagacagcctgacaggtgcgtacaaggtgacagtgctacataaaacccagtgaggaaatcttctgtgtaacttaagttgaaacaaagaatgaaaaggtggaaaaggctcattcgtgtttttaatctcagattttaaactataaacttaaggttaacttgtctttcaggttctgtaattcttaatacatgaaattatatacatttatatcaatagaatccttttgcaatggatataactcttttgtaatattttcccactaaatattagggtttaaaatgtgctttttttgcatttcataagtattagttgcaattctaagcagttgactaattttttttaatgaaatattttttaccagccaggcctacccctaaacataccctaaagttatgttaaaaggtggtatcagaatatctgtttaaatgtttaaattttttctttagaaatgctttggtaatatagactagactatgaattttatcccctacttgattttggcattttaacggtaaatgcacaaagcgcttatgaatcacttttacatgccactcctattaaagcagaaagacaccgggtccctaatacagctgttccaacttcagggtttttcgtggagggtttcctacatggtgtaaagatttggttattttaaataaaatgcaatttaactttagtgttttaaattatattttaaaagtaacatatacagaatggtaaaaattaaaactatatgggaaaatattgaaataagtgaaagccttttaccctcacccagtcccatcacagttgatgtggctttcagaatgtttctttgcatttacaaatatatgcaatccatgcaaatctgcacacacattgtgttttctattgatggaattctatcatatagatcttctatactttgttcttttcactaactatgtcttaagagctctacctcattcttaatagatgcatgggacccattttttatagatatatcataatttatttgcattttcctcctaatggacagttaggttgtttgttatgtttagctgttagagatgatgtagtacatacattgttctccctgcatatttcacataagtactagggtaactgggatccagtagaattgctgcatcaaaatatatgtgtatttttactttgagagatattacgtagaattgccttctaagaaggttacacacggatttatatttctgccagtagtttgagtgcctgtttgtctataccttgtctacactgcactagtgctgcatattccaagtttttcatctttgccaatctgataggtaaaaagctgtacctcattgtttttaagggcttttattgagttatgactgaggttgaagatttaatctgttcatcaacgactttatttcattttgtgaaactacaagttcttttgtctatttttataattcgtgaaagcttttttttactagagataagctagcacctcgtaatatgcttctcaagtattttttccattttgtcacttctttttatttcattttggttttaatttacaaaactgtttaacattcttacatagtaaaattagtatcttttttatgtcttctaagaaaatttaagcctttttgagatttttgtgattgaataattttgcctggagaatttatattgaacttgatttttgagctcaaagaaattcttagtggagaaaccacctctttttcattcatctatccaagaagtgtgcttgacttagatattttctgaaatgcctctgaaaagtatgcagcaaaatgatgtaggaatcatttatgaaattctacctcccaaggaaatcttagaaaataaatagttctgaggacttccatattcccccgtgtgtatagaacagctatgtagaaatctctgcttgtaagagagtagagaggagactggaggaaggaagccagcatataaattattgtctccatatttaaccctaagaggactcatttcctctggtttaaacagtctgtttctctgacaatgcaggtaaaattagactttatgtcttggggggaaaatatatataatgtctattttttaggcccagcctctcagtgatttttttctagaaatactgcagtgttctcaagaagcaaagtgttcttgatttcaaaggactaatagcctgctaattgataagcaatgttttgtactacattcagggacttgggtatttgatgatcataatttaaatgatacaaactacagaaatatatatatatatactctaaaatgttcatttcagaataatcatggcatgtaaagaaaacttttgaggagataaagaattgatctttgaaagataaatttatgtttatttctaatgccataaatataaatatttttaatcacatggaatcaccgtaataatagctaaactaatatgtttgtggaattgcaaatagaaagtattggttggataaataatgcagtggcgtatcagtgttttccattatttggaaggggaagtaatgttattaaaaattaatcagtggaaatgcttctgaaaaaattattttttatttatttttatttatttttatttttttatttttttttgagacggagtttcgctctgtcaccaggctggagtacagtggcacgctctcggctcactgcaacttccgcctcccgggttcaagcgattcttctgcctcagcctcccgagtagctgggactacaggcgcctgccaccatgcacggctaatttttgtatttttagtagagacgggttttcaccatgttggccaggatgttctcgatctcttgacctcgtgatctgcccgcctcagcctcccaaagtgctgggattacgggtgtgagccaccacacccagccctgaaaaaattatttctaataccaattatagaacataattatttgaattccagtttcaataatagtaaattatagtgagctgtctacacatattcattttacttaatctacagaggctatttactgtaattttttaaaatgctaatctataggactgtgtacttgtgtttttaaacacacgagcgggtaaacaaaaatagtttactactatttattatgtcattcagaaggattcttaatatcaagaaagtgctacatcccactaaagttctaagtcttttatttcccattatagcctatcacataatagtaattccaatttactaatgatcctataacgagtgaacatctgctggttattttttatatttctaaatgcaaaaagctcattttgttacctttctcatgaaatcatagtctgtgcttacaaaacctttcagattgcatggattccagtgacgaatccagccagatacttgtaaaatgagaatataacattgtaatcgtggtgcagaatgctttgtcttatttcacatccctgtgcagtagtgggaacatgaggactcaaccgatgtcagaagcatccagtcttcggcttggctctgtccaagtgtaaatgatcctcagtgtcttgcactgagtcgtgagtgtctgtggctctgttgggtgttacaatagcacctcataatgataagattatcgaggactaggtacattcacctgtctgctttatgtcactgttaacaaaaactgtgcacttttgtctaaggtattcatgggctccataaagaaatagagcttagactctgctaaaaatgataataataatgagaaattggccagtgcctaaaaagctgaaatcctcaaaagggaattttgcaatagcaatcacagtgtcatctttaaagttggtttccatggccccctccttggtgtgcttaccttcctctttaacctggtgtttgtggagggctctgtggagttcagacttttcctcaccatgtgccgttgctccatgagggatagctgtgtccagtattgggtgtataatgacagaacactgacctgtgctttcctgtcagctcggcaaggaagtagctctctaatgggggcgaatcacatttccttttggactctgtttcctcggttttgaaatgaggtttggctggataatctcccagttataagattgtataaacctgtggtcttcgttatagcaagaggggagccagtagctaaaacccacattgattcgtttagtttctttccatgtcacattgctgtccagggtaggtaataatcattcactttagaagctttatgcatgtgttaactttcttgcctctcctcactaaccaacatgtaattagcactcttattcaggtccatttgcttttagttgtgatttgattaactgaactaacaggatgggagcaatctttttttttttgagacagactctgtctctgttgcccaggctggcgtgcagtggcgcgatctcggctcactgcaacctcccgcccccagattgaagcagttctgtgcctcagcctcccaggttcaagcaattctctgcccagcctcagctgggattacaggcgcctgccaccatgcccagctaatttttggatttttagtagagtcggggtttcaccaccttggccaggcttgtcttgaactcctgacctcgtgatctacgtgcctcagcctcccaaagtgctggaattacaggcatgcgccaccgtgcctggccaatcttacctttttataattacttactttgttaatgatttgctatttttttaaaagcaaatatatgctgactggcttcagatatgtttgtcctttctcttatatttgggatatacccttaattgatatttttacaagtgacagattttacttaccaataatggaagtcacaaacttctgagcatcataatatagaaaatattcagtctttttaagaaattgaaatgtttgggtttgaagtatacctttttatcatgagtcccatgtgtaaacattagttattagcagtttgaatcaaaatatttaaaatgatttaaggttcatgtactactaactttgtactttttctttatactagaaagaaggtaaacaagaatctggtatgtgagttcttataaaaacagtttttgggtttgattttttttaaaagaaaggaaaaacaatgataaatagtatttcataataatgttagttcactgataatattacaaaacttatagcacaaaacttccagtgtttttctgtaaaaattatatgtgagttaattgacatttcaaaacagcttttaaacatcagcctttaccaagtacattatataggcgttctcttagatgttgggattcaaagaggtgcgagatggtgggctttgtgcccagagagaagctgattgtccactgaatgagactggcaggtccgcaggataggaagagagcagcatgaaccactgctcatataaagcttttaaagtgaaaatgatataataataagtcattctctgtttgatcagcatcataaaatagcttactggaggatgaatctcagtgtatcaaatcatttaattttttgttatttttcttagaaaacctactttcatcctgctgccaagagaaagtgtttttgtttgtttgtttgtttgtttgtttttgagacggcgtcttgctctgttgcccaggttggagtgcagtggcgcaatcttggctcactgcaagctccgccttccgggttcacgccattctcctgcctcagcctcccgagtagctgggactataggctcccgccaccacgcccggctaatttttttttgtatttttagtagagacggggtttcaccgtgttagccaggttgatctcgatctcctgacctcgtgatccaccctcctcggcttcccaaagtgctgggattacaggcgtgaaccaccgcgcccggcagagaaagttgtatttaaaatatatatatgcagtacttttcacgtgtggcatttctctttggtaaaacttactagttttagtgtttagacttaacacttggtcctattggttaggattttcttagtatatatctatgtatgtatatatgtatttatttattttgagacagggcctcacctggtcacccaggctggagtgcagtggtgtgatcatggctcactgcagcctcgacattctgggttcaagcaatcttccagtttcagactcctgagtagctgggatcacagacatacaccaccacacccaactaatttttttttttaattattttttgtagagatggggtctcactctgttcccagactggtctcaaattcctgggctcaagccattctcccacctctgtctcccaaagtgctgggattacaggggttaggaatttaattagggtttatgtttttaacctcactgtgattgtctcagttcttaacgatgtaatttttgtgcctctaggcttacggagttcctatgctagtcagcatagtcagcttgggcaagaccttcgttctgccgtgtctcccgacttgcacattactcctatatatgaggggaggacctattacagcccagtgtaccgcagcccaaaccatggaactgtggagctccaaggatcgcagacggcgttgtatcgcacaggttcaggtgggcatcaactctgtttactggtttcctgatttcataggccccacagtagaagtgttttattgagattgggttccctgttagaaggaaatcatgttgcccatttggttgtcagataagcagctgtgacagcagatcaataagcaataaaacaggttcatttagtacctatttataggtgatatatttttaccttagtacattctaatcaatgaacatagtgattatactgttaattcaggaataagtttgtaaaactgtaaatctgactctcctcgggttagatgcatattcagtatcaaaaggaaagccttgttggaatatttctttgtaattcttttgccaaacaagtttttggagaaaatccatacatgagttacttggccatctttgatttagcaagcatgaagcccaagtgtatttggcattactccttttttaatgttggatgttctctgaatagttaaatgtagaatgtaaaatagataccccttgcaatggactcaaactggtacaggattcaatagcgacatttataaaagcagggagctggagcatcacacccttgtaccgccagtcctcatgtttatgccataccatcaaggctcatacagcagatgctgtagcccatggtggtgtgagctgccaggttgtgctgcacggctagctcatggagtctcaagactacttttttttttttagtaagtatcacaaatttattaacatgcttacaaatgaaccctaggtagcaataataacccctcaaaggtacaactctagaacaccagagtggggaagactgtatctgaatttgttctttgcaggaaactgacagtttgatccactgagggatttatcttctaataaaatgtaccatttctaatagacattaataaagaaatatttcgcttttccttatgtctgtaaattgaggaattcctttaataagactaagaaatagatattgtttaaaatctttttaattgcaggaagatatgtacacagttactggagggatacccactgacataattagtaaagtcattttaaatacagtgtagagtatctttgtaatagcatcatacagtaatttaggggagtagctgtagaatcatttgatatatcagtcttctttccctcttgtgaagtagattttccagtgttattacaatccacaggtctagaaataaaatgtataatagtctgtctatatccatggagaatacgttccaaaaccatcagtggatgcctgaaatggcagatggtactgaaccctgtatatactatgtgttttcctatacattcattcatgtgataaagtttaatttataaatcaggcacagtaagagattaacaacaataacaaagaatgaaatagaacaattaagtaaaataagggttgtttaaacacaagcactgcagtactgagacagtaaatctaatagtcaagacagctgctaagtgactaacagactagtagcatctatagcatgggtacactggacaaagggattattcacgtcccagtgggatcacagctgaatggcacagatttcatcatgttactcagaatggtgtgcaatttaaaacttatgaattacttgtttctggaattttccatttgatatttttggacaattgaccacgggtaactgaaaccatggaaagcaaaaccaaaagataaggatggactactgtagaataaaataagtaacctgggtacacgaagtgttaaaattttgatggttttaattacttacaaatttgaataaatatcttgtttttaccactagaatgaaattaataaattttgctattttatcatttatctctaagattcttatatttctctcagttttgttactgaacctcaatgaacatactatataagcagatttgtagtttcacttttgctgtttcttgctaaaaaattaacaaaatatttatgtacattaaaaacttaagtaccctttttagcactaataaggtagaattttaaaatctaaaagtaagcgatttatataattgccaaaaaatatagtccttaaaattaaaaatgttttacctttaattaaagtgtgatctcatggagaacatactaatctttttcaaaatgttgactttctagtaggtattggaaatctacaaaggacatccagccaacgaagtacccttacataccaaagaaataattatgctctgaacacaacagctacctacgcggagccctacaggcctatacaataccgagtgcaagagtgcaattataacaggcttcagcatgcagtgccggctgatgatggcaccacaagatccccatcaatagacagcattcagaaggaccccaggcgagtaccagttaggagtctctagaaggctacagtattgcaggagtcagccagttcctccattttgacttttttaagttgctaagtctattatactatcattatactatcattaattccatatatattaatacttccagttgtattccagctatataggtcattgaggttaatttcattttaaagatagattccttctttccatcctttcataataagttagagaaggcacagatccatgggaatatctgcagcattcatcactgaaatatttcatcaagacaacaacctggaatagcctcttggaattaaacaaggctttgaaagatcaatttaccctttgcccttatcctgaccgacttcttcgataacagcttcaaaaaatggatttggttattacaaactagagaaagacccgtgttacatgttttcaatcatagtggtcaacaatatataacgctgttattaaccaggtcctttgaaaacaatttgtgacatttaggagaagacagtctttataagaaattctatctaataagcaaaaagtgtttggcaaatcatagacgtttcctccttctgattttatttggccctgtagacagcatttttattaagataatatgagtcatttaatacttgattgattttgaaaaactgaccttgtccttaaagccatttaaaatattcaggaaataaagatattttgaaactaaaagaattttcatttctgaaagagtgaaattgttgctaaattttaagcgctttagtgttattttaaggcatgtatgcaagatttcattcactcttcgcccacaaatagttgcttcactggaaaattgttataattatcaattcatttttagcagcctaccaacttgttttaatgaatgtgaattaaaatgatgagtgaggttttggtcattaaaacaaaatgactaaagataccttaaagttgagtgggaaatccactgcttcactaaaaccgcttcacttattcacttctattcctgaaattctttaagctatataaatgcatttggttctgctactcctggtttgccacctttttgtcatttttaaggagtttcaaaaataacttgtctaataacacctacagcttgtcagagatactcttactgattttgttttttcaaatcctcaaaatgacaaagacctaaggcacccaaatagatgcagaaattcccaaaagagttttgaattgtaggtaatttagaccatcccttggctggacctgaagagaaaataatagctacctagaaaggcagtgaaatgtgatgagaactttgagtttaatatgtgtccctgaagacttcagttttgacctctaatgtgagttgattctctataaacaaggacttcatgtatgataatatacctcagctattcatagtgtgataatttcatagtctaatgcataaaactgatggctgtctttgattatgtgaaactttactgataatgcatttcgtaaggtgaataagtgattatttggtaggtgcatttattctagctaaaactggaattcaggtgactttgaagtttgaatatttaaaccaaaattaaaagctcatgacaactgttaatttttagttttgaaaatagcaatttgaagtaattcactacaagttttattcacttgtaagcctttattattaatgctacattacagttggcctgaaaaattctctttaagactgaggaagttattgatctttactgtataaaaggaaatctgtgagtttttttatagttgtctacttggaaaccatatttattaataacatcaatgatgcttctgaaaggagtaacgtaaaagacttcctgtgtattcacgtttccatctcaactcatttccctttggcctaaagaacttcctttagcctttcttgtcttgcatttctgcttgtaacaaattctctcagctttagtttatctgaaaatatttcacttgtttttttaaaggattttttttttgctagatatataattcaggatttacaggtgtgcatttttttctttctgtattttaaaagatgtcattcattgtcttcagatctccgttgtttctgttgataaggcagacatcatgtgcattcttctcattatgtaatgtgtcttttctttggctgcttttcagatttttctctagctttcagctgttttattctggtgagcctaagtataattttctttgcatttaacctgcttagggttcactgagattcttggaatgtaggttgatgtttttgtcaaaattgggaaattttcagccattaattctttaagtttttttttctgccccaaactctcttttctccttctaggacttgaattaaacacataggatcactttattattttgcagattactgaatctgtcttcattttttaaatcttttttccctgtattcttgtaatcagaaatttttattaatgccttcaaatttagtgttctttgtcctatagactacaatctattgtgaagcccttgcaaatttgtttttatttccaatccttgaatttggttccttttatatattccatgttcctatgagattctccatctcttcactccttatatacatctttttctttaagtctttgacacatttatcataaccatttaaaatatttcctctgataagttcaacatctggggtgagtctgggtctgtttctattggttgccttttttacatatttataagtcatatgtttctgtttcttctcatgtttagtcattttaaattatatactgacggttgtagatgatacattatagggaatctggattaagttgtctcctgttagggtgctgagttttgttgtggcagagaactaaattactggcagatcctttcaatcccatcaagattggttttgttcattgttaggtctagttcatatttcttttaagccttagaacatgatccttacccctaaaacttggcctttgtggagtcttgactaaattcccaaggtgttcagtgaggtctgcactctgactaggctgggagtccacatcacgtggtacctgttcagccttgagccgtgcagcagccactttccaccagacctgtgcatgtgccctacagctcagggtacaactaaggacttcggatagtccacacgcaaacccggagaatcacctctgcttagctcccttgtctccagtactctgccttgcacattctaaccactttggcacccacaaattccactcgctccctgcctcagctcactaaatccctcacatactacttggcctcagcttcctgtgtcttggtccagaaagtgccctcaggcagaaagccaagtaaacatgggactcgtggatgtttccctcctctcaaggattatattcttgtgttgcctgttttcgagggtctaaaaacagttttctcctacatttagctaaattcacttttataattgtttatggtgggagggcgaaatccagtacgagttactctatcatggctggaaacagaagtctgggcttaggttatactgaagcaaatcctggcaggcattgatgccatccagccagcctacaaattgatagcagtttttcgagggtaaatttctactgaattttcatcgaggttggagttgaagccaagcaagcctaattgcccagctctggcaggagcccaccctcggggctgtctggccctcatggcaccggggatgtcaggaaatcttgaccctcagtgtcccatttaaagaggacaaaaatgtgtatttgtaatgattgtgagtcatcaaagaaagagtaaatcacactccttgcactctgttaattacaacagagatttacataataggctttagacagattttctgagaaacgattgataacagtttcaatatataaaaggaaaactatttgttaccaggaattcatctatttagaatagctcattttttagggatgatgaatattaataaaacatctgtgtcagaagtaaaagtatataaaatattttagtattcatcatcatatttaatcatcacaaccaaccagtgaagattgaaatattagtttcattgatcttgttttacagttgaggaaactgaagctccaaataattaattggttttcaaaatcacacagaaatggaaggacccaagactgaaacccaggcaatctaactccatattctgtgctttttctgctgttatcctgcctcccttggcatttgctgtattcttaatggctgttagtgacatcaccctccagcctgttcaccaagccagaaactccatctcacacctgacttcagtttttagatcatctggctgctgtataaagaatggattgggggtgcaggtggggtgaggggataatattagaagcagagagaacatgtaggaaactgttagactcttctgggcaaaatggagaaaatgaatggatttggtatatgttaaatattttgtagatagtcaacagaacttgctgatggattccatgagggaagatgaagaaaagagaggaatcaaagagaagtctatttcgtttcaagcagatgtatagattcctgtgcagatagtgggtaatctgcatgacacccatctttttgtattctagggcattctttccttggccactagagttatcgtctgtataaatgtgactatgtcacatcctcttactctcctgcttcacagccttcattccttatgtgtaggcacacatatagaccacctgggtttcactaacctctatcactaattactaatcctgagttccttatctgtatctaatgttattttaatagtgcttacctcatgaggcaacagtaaaggtaaatgagataatgaaggtaaagttcttggcacaaagcctgatataagtaaactcaataaaggataactcctgttattggtattaagactaaactttttagtttggcagagaagaccctgtaaatagaatcgtatcttaccaatatttgtatctccagcaccatagcacagtaagaattcactaactgaacgcatgaggggtgtgtgtgtgtgtgtgtgtgcgtgcgtgtgtgtttgcgtgtgtgcacacaggtgtgggatgacatgcccctttgcaggggtctaacaagttaatacatggagacttcccagatcaagagagactctaaggcttcaaaaaccaggcaggagaattatcactcggtcattaattttaaagataattttaaaggtttactcagtatgaattcttttttttaataaacaactaactttatcctgtaatcagagtctgcatatttgttgttctgtgaaccattttctaacaatctgcttttcacataatataagcacaaactcacatttaacaagaattccaaacagtacaccaatcagatgacattagaaaatcctgaaaatggatgttagctgaaaaaaaggaaagtataaaagtatatatacatagcatgattatgtattcattgttcaaaaaaatggtatagcatagtgttggagggcacagactctgaaggcagggtaccgcttcgcagtttacagccacgtggccaggcgcatggcctttctgcctcaacttccgtttctctaaggttgccgtaagaataaattaataaatatatataaaatgcctggaatagtgcctgacacaggataggggtttatgaaatattaactactatttaataataacccagttttatggaaaaaattccaaactcacacatgtgtgcacatttgcacacatatatagaaaaacaggaaatgtcagcagtaatcctgaatataggatgactggtcaaatacttgtttatagttttctgtgtttctgtgttatactcaagagcaaccataaacattgtttcttaaaaatcctcaggcccacaatgtttgtgatttctaggctgacgccagccctgtctgttcccaccagcccttcctctcccttcaggcatgacatctcacttcgctacagtgcacgtgtttacctgagccttgcacctgcagatttcttacataggtagaaagacataaaattagaatcaggaggaggaacacgagagtggaagttacttatattaagaattttctttgttcccctgaatctctttctgtgcatctgtgcgtcatgatttccttaagatcataagcatctgggcctctgcatatgttcatcagggggaaaaattatttaggtatgtattttttaggatttttgtaacttcccatttttgtctcagctgagctttttttccttataccaagtgtttttttcagtgtatttttacaacatgggccttcctttctgaagccatgtttttctcatgtagggagtttgcctggcgtgatcctgagttgcctgaggtcattcacatgcttcagcaccagttcccatctgttcaggcaaatgcagcggcctacctgcagcacctgtgctttggtgacaacaaagtgaagatggaggtacaggacatggtgcctgggatgactggggaaaataatgcctttgcatttaacagccacgtgcttctgtatttaagaaattacccagtgtaattcaagagtctttttaaagggatattttgataccagatactctttcacttaactatgcatttcagtatctctcaggaaaaactaggatacatatatttcttggagtgctttcagcattttcaaatcgtatgtctacttcattagcttatttataaaaccatgaagcaaaaatcaatttaacttgcatttaaaaaatattttaggccaggcacagtggctcatgcctataatctcagcactttgggagacagaggctggcagatcacctgaggtccggaattcaagaccagcctggccaacatggtgaaatcccttctctactaaaaacacaaaaattagctggacatggtggtgcatggcctgtaatccccgctactcagaaggctgaggcgggagaatcacttgaacctgggagaaggaggttgcagtgagccgagatcaagccactgcactacagcctaggagcgagactctgtctcaaaaaaaaaaaaaattattaggttaaaaattatagtattcattgaactagtgagccaatgtgttttatgggattctagtcagattggtgccaactataaataagttatagaggattataaccatcactaaggctgaacatacatgaatattttatttcagggtttttttggtatttatagaaacatagcaagttactggttattggctataattctatataacatatagattctttctttaacgtttcaagccttcttctgacccactgtgttatataaaactgaagtgtttttcatcattttaatgtgcataacagtataccagttccagacctaaaagtgaatgtagtacataaagcccagaaatactcaaataatgtactaatgaattgacaaatggaagaaaatttaaggagagtagcctagagaactcattctagaaactaaataacttaagtcaaaaattatttcctatattgcctcaagccctgcagatagctttgctatgtttgtgtatttgcacattgcactgctggagtgaaagcacaattcttgatgtgtgttctgaggcttggaggaggactgtgctgcctgccgatggacattaaaccacttaaatctcctatctttttttgaagccatgaacccaggaaaagtatcatctacaagagtgtccttagaattctgtttttttggtggggggtggggggcacagagtctcactctgttgcccaggctggagtgcagtggtgcaatcttggctcactgcaacctccacctcccaggttccagcgattcttgtgcctcagccttccaagtagttgggattacaggcgtgtgcctcaacacccagctaagttttctctatttttagtagagacggggtttcatcatgttggccaggctggtcttgaactcctgacctcaagtgatccgcccatcttggcctcccaatgtgctgagattacaggcatgagccaccgcacctggcctctccttagaatgtataaaagttgtcttatttggaataaaaagtaacctttgaaatggtctagagatatccacatcctgtgatctctccataacggacttctgtatgatcactgattaattgcatgttacttaggcctggtacctaatatttttcattctaggtgtgtaggttagggggaatcaagcatctggttgaccttctggaccacagagttttggaagttcagaagaatgcttgtggtgcccttcgaaacctcgtttttggcaagtctacagatgaaaataaaatagcaatgaagaatgttggtgggatacctgccttgttgcgactgttgagaaaatctattgatgcagaagtaagggagcttgttacaggtaggtatagaatgtgatctcgtcctagaggaaatgttgaaaacagtctggactgtgcccttgtatagtggcactatggaagagttggaggttccaggtaatagataatgagatatatatagtgctcacaactgtgaaggctgagaattatttagtctaatgagtcagaaaccgtttagaatgcagtcatctctattagtataagttattgtacttattaatttgtaaatatcagctaacagatgtctttttcatggaggactaaatatgacattttttacatgtatttcatagtaaatctagttgtattaaatagactatcctatattatgaaaataaaatatacttaatggattggcagtcttttacgttagctcagctggtgtctgagtgcctgtttgtattcccacgtactttactaggccccagggatagaaagatgaataaaactcagtgcctgcgcttaagtcaccctcagattggtgaggaacacaggtggttttgtgagcgtcagggaaatgtggcaagtctcactcaacagaggttgcattgggcacagaggatgggtaacgaagttccctgggtgacatgaaactgaagttggcctaagggatgaggaagcattggctggataggcagaggtctttctagttacaagctccgaaacagcatgggatatagttctggagctaccagcaagagggggctgctgtgttaaaacctcgtgagggccaagtgtggtagctcacacctgtaatcgcaacactttgggagaccgaggcaagagggtcacttgaggccaggagtccaagaccaacctgggcaacacagggagaccacatctctacaaaaaataaaaataagtagctggatgtggtggcacatgcctgtggttccaggtacttgggagtctgaagtagggggatcacttaagcccaggaggttgaggctgcacagtgagccatgatcacaccactgcactccagcctggatgacaagtgaggccctgtttcaaaaaaaaaaaaaaaagaaaagaaaacaaggccagagagagatagagtcttcatttagggaactgtttttttagacggagtcttgctctgtcacccaggctgggatgcaatggcatgatctgagctcactgcaacctctgcctcccgggttcaagcgattctctcgcctcagcctcctgagtaactgggattacacacacgcgccaccaaacccagctaatttttgtatttttagtagagatggagtctcaccatgttggccagactggtctccaacttctgacctcaggtgatccgcccgcctcagcctctcaaagtgctgagattacaggtgtgagccactgcaccccgcccatttagggaacttttataaggaacttaattgtgtcccacatgcagtagggacactggggtatggcatggccagtttaggcctttaaatgcgttcttccagcaggcagcagggtagaggattgatatgaagtgggagagcgtgggaggcctatgaacagaccaacagtctactgataacagcttgaactattttaatgatgaaaaggaagagtggggtggagcagtcagagaaatattttgtggtctgggcatgatggtcggaagtgcggagtgagagagagggagaagtgagtaatgcctggatgttgcagtgctagtggctggattcaaggatacttgagattgagctggaagaatggttctgcaggaggacacattgatgacagcattgcttgtaataataattcagggaaaatactaagagttcattgacaaaagaatggttacatcaatggcagtactctcacacagtgaaaccacatacagcagttaaaataagcacagtagaatacacataacagatacatgcagctttagaaatacttgcagaatgataactacagagtaatactatttgaataaagtttttaaatatgtagattgatgtggatatatgcacatgcaataaagttaaaatttctaattggaataataaaaatagattcaggataggggttacctctgtgaagaggaaggaggaaaatgggactgggggttgtattccacctctgtttctttagagaactctgaaatacataagacaaaatgttaatatttgacaaagctggcatacctgggtgtttgttttatattttctttgccttttttcatgcttgagatatttaatttaaaattttaaaacaacatttcttcaaaattaatttcattccccccaggtttccactgtgaaatcagagttgtagtttctgtaacacttgggaatgaataaactatcctgcatccaatatttaaggggaatcaactttctcataagatattaatgttcaaaatacaacattaatattcccttgtactctaaataaaataccaaaagtagaatatacgttacaaataatcataaatctggaatggaccatctgccttaatgtattttgactattaatgctttagcgcttctaaattagtactcccactttctaaaatgcttttgaggcatctcaccaaaaaacaaattataattatttttgtttacgtgtacatgtagatataaaatgaaaattagagcaagctaaacagaattaagaaaaaataaaaatgtagctatgttcatcctagaagtcaacacagtcactgtgattacgcccacaaatttaccctgagcctactgttagggaggcatagaggagacagaatcatttgcattacatgagtgctttcctgctttgtctgatgtttctcttcccatcactttgaacttcctgtgtcatgtccagttgtcttcccatagtaacaccgtgcagccaggagggctgcagtccatcgtgtgcgctactccctgagagagcagtggcgatccagggacaaatgacatggaaaacacagcttctcctcaaatttaactagccagattcatcatgactcgatccttacatccttaatgtgaagctttttcctgctcttctgtcctctcataggaggaatgagtcttttctgaatttctgtttgagttttttccttgggagagactattacagtgcctttcctgagctgagctcaaggaatttgtaagatttagtgttaaacaggaagaaaagtacatgattgtgtgctctttttttgtttacatttaaaaataagtcaaaattactttaagtagagcccgactttactaccaagggcttttatgtactaggttacctggagcacactctggaattgagtgctaatttagatgatttcctccttattttatagagaacataagatgttttaagacatggaccttggccttgaaaagaggatataagtgttttctaattcagaaagagctgttttcctaatagatcatatcaatcacttctaatgtaaaactaagaagtacctctgatatttgtcttgaaaatatctgccggtagcttttaggctataagaaacaattttttgccatacttatagagtaggagacattaagaattgctttataactatatactgttaccactaatcctttattttgacatgtggactgattatcaaatgttttcttcaaaacattgaaatgagagtggtcagtgggtaaacacttcatgcaattgccataagtaaagtaggttggaccagaagacttcagaaatgagttcccagttcaaaaagccaaatggcagctgtgtttgatttatacctaaacattgtctaactaacatgaaacaagtcacaatataaatctagcatagttgctttttttgtgtgtgtacatgtatttatagtctaagctttatagagacagcaaaattgctcacatttcccagtcctacaatttagtggtaccaatcttaactgatgttcagtaatattttaagggtgattgatccttgatacatattaaagcatgaaaacatcaaaaaatgcttgaactcttctttcttctttcattaaatcttcctcacatcaaatgctcaagccgtctttaattgtagcacagggttgggggagacctcagaactcattttgttcagtcatccatccagtgcatgaatctcctgtacagtttccatacaaagtagccgccatcacatgcatgaacccacagcacaggaagctcattacctggtggggttaagtctggacaacaaggttatccagaaagcagcaagaagttatctgatataacttgaaaaggcaaaaaatacagaccctcaggaggtcatttttgcataggaatggccctacaaaaagaccagttccaccctagatccagccaccagcactcctaaccaaggaagtaagcccccagtctgaactgtcgttaaagcacgtctgctctgaactcaggctgaaggtgctgtgtgaccgtgtcacccagcattccccatcaggtgcccatctcctataaagtcccctttgaaaacagaacattagccttagattttagtgttctgctagtatcattcacaaataccatggctagccttgcacggtgcttggcctttgtaggtacggtccacacattcctaagtgaaaattatagtcaacttaggatcatgagatgttaaaatacagtgaaccattgtgttccaaatattatataatttgaagaaactactatgcccttgaaactaggaattctttgattcttaatattaagtaattcaacccagttattaatccagtctttttttctagttccctttgtttcagtttggcagtttttactgtacttaagtggagaaattttagctgttttttataaagatgccttgcctttgctttaaacacaataactgcccagggcctatatttttggccacatctttattttcagagggaaaaaaggacttttcttcaaatgtattttcccaagacaatatggctgtcattgttaattaaaatggttctctagtatgtaacatgattcttgtgttttcctcattgtgttgaacattttccagttgaaacctaatgagcttttcttttagtaagtgctgatatatgtgagtgcttagggtaatttttcttttattccaaaagtattttttgctgttgttgtacttaaacttgaaagctggatgaagtatggttgttccccagtttggttataaaatgaatgtctgctaggccacaaagtatggaggacagatgggaacatcttgtcactaaaaaagatatgttgaactcatttgttcaaaataattaaatagtgtttctaagctaggaaacatgagtttcaagttattgagcctcctgaaaacatcattttttaaaactatagacattgaagatattgcacaaatctggaggcctgctttttaatgtacgtaccagatgtccccaactgtcacacttctattaccctcttaaataccaaaaagtagcctttgttcttcggtaataatagactttgttcatatgactgctacatgtacatttcttccaatttagtaagtgattattcatccatatagctaagtaaaatatttccactgtttattgtgaaatgtttggatgccagcaatggattccagacactgcagaacatgaaatgaagtgtattgttttcctgatcattagctccatatttttaattcgatgataaattaataagaaaataatagttgtaactaaggaagggtagatgggccaggctaaggtttaacaaagggcagaacagtctggcaagaattagtcttatatactataaaaagcaggagcttagtggacatgccttttggacgattacttgccgttacaggatgaaaacagtttacgaagcatgtccccttagcctaattaatatgccttcaaaacaggtcatttatgctctggtccagagaggagtcagtcctactgttatgggccactagggctgttagaagctatgtgggtcatttttagaaatctagcaacatctcctcccaattcccagcccaaatcagtaaggatccatgtcacttggtccactttataaaacatagctgggtgcagtggctcacacctgtaatccccacactttgggaggccaaggaaggcaaatcactcgaggtcaggagttcaagaccagccaggccaacatggtgaaaccccatctctactaaaaatacaaaaattagccaggtgtggtggcacatgcctgtaatccagctactagagagtctgaggcaggaaaatcgcttgagcctgaaaggcggatgttgcagcgagtcgacatcgcgccactgcactccagcctgggcgacagagactctgtctcaaaaaaataaatgaaacaatcacaacagaaacattcccttattcactgaacatttcaaaccctgaaaatgtgtaatgagaaatgacaaatttttaaaagtttaattactaagaagacaaaaaatgtctattatgaatagaccaattctcaattggtagagaactttgaactggaaagaaccctaaagaaatctcctgtctacccctgttattacagattagaaaccgaagtccaggaaggttgagcaggcaagtctccaggctgagttcctgatgtccaggctggaggtgtttcttccctgacccttcccctgcctaccctggccactgagaagggctgaacaggagctaaatctggagggtacaaatgttatttcccttgttctttaagattaccaccaaaaagggaaaagaaaaaaagccccacaataaactactctctgaattttacccaggaccatagagaaatatccctgaatttcaccactagcactataatatcaaactagtgatcaagtataatcataaagcttcagtttgcttaggaagtctatgaaacgtgattttaggtcttgcgtctatttcaagatttatagttttgagtatgaaaagattcaaccctctaagtggaatatgaccctgtattttgagtgtaggcttccgagtgccaagcacaaggaggcagtcaagtagggagtctcagaaggtcacttataagacttgggtattcaaacatcagtcagagtggaacttctcagcaaaagagaggccctgtaataacatgctccctcagttgactagacgtcctacaaatgcaagaaaggtgggaatatggagaccccaggccaggtcctgcaaatgctttgcagtttctgagtatgatgctctatagcttgcagctggaggcacctttgtctctaagcttctgccagcaccagacaactgggttgaagatctagtgcagttacagatgagcaagtgtgttcctggaacatgtaggtcagctgtggagtatatgacttcagtgacagtttcttgggcaaatctctatgatagtgtaactgtgacagtataaatgacctaattctgtgtcacactgaaataacctgcagaacaagggtggccagggccgctgcccccactgccgtttctgccccagaaggattctctaatttcctttcatgtgacctgttcccttttattagctctgcttcaacagaaggagccactctgtgtgtcccatatgggcaattctcagtcagcatttctgaattgtaagcttatttattttctgtagaaatgcctttccagggaacatagaactgtataactacattatgtcattaatcctcaaaacatatccaagaagtggtaaaattacctagaataaagaagaatacattaaaatgcaaatatgattctgtaaatggatctctaaaagttggtagatcttttcaaaggtgctgtgatccacctttatgcctgcaaaatcgcagagactcgggctaacccttatattctctaaaggcactaaagatctatcttgtcccaactggggacaaatttcagcagcaggaatggtcaccttcaactggaatatgcaggctggggcccctgtgtgcagcctctgtgaccagcccagttccttacttccacacagctccctcctaggaagcatcttgccctcagaccacctgagcacccacttcccactgcgctgaaagctgagatggtggtgttccgagcacagctggacctgagtgagctcccccgtgccccatgaggattatgcatctgctgtgcaggaaatcccagagaacacaggggtgagcaaggcaggcctgtccaccacctgcagtgctctgtgccaggcagcagggagtgcagcaactggcctctcatgctttggggcaggaaggagaaagcctcaagccacacctatagaccaggagcctcactgcatggaggggtcactgcacaggtttcaggaactctgctcagatagtggcatcttagaaactctgggaatggctatataccaccacaacttgttttcctcagcatttatccagagaaaggtatttttctataactgaggatagtagttttatccctgtctcgtaattgttttcccactatttcagtttcacttagatttcgtaatttgttgacagccttcagccctgttagaaagcttgggcaattgattagcccagcagacagttttatggcactgattctccccaccacccccttgacttcctcatttctgttaacagtgccatattttcacacgtattcaaactcctggcttacctgtgacaccaccctcagtttgcatctggctccaaattctcactacaggcacttcccttcccttttggcctcctccctcctccatcctgtcctgtgaaataggctctgcccctcctagcccattggcctcaccccctccctgggataacacctgtgcctgcagttcaggttttcccacctgcctgtccaaatcagtagcttctgtgacctcctgccagccagctccagcatgtgccgtcacctcttctgcttctttcccaggctatatatagttggcctgaagagctctgcaccccaaacctgcttctttctggcctctgtccttgacactgcaactcaaatgtggtctcccatcctcctgtcaaacacaagttcacacactttgaaaaacatccaaggagaagcggcatggtctcgagtgagtgtgagctttggagccaggttgacttgtttccttccagctctgtggctccagacacatcaccactgtcaaaccccagtgtccccggcaatgacacattacctgctgcttggtgtttttgtgatgatgtgtgttgagctcctggcacacaggatattcaagccatacctgttgctcttcctgccctttgtcacaactgcctggtggtgtaactgtttgtggtaaggcccccctgagaacagatggctcccctgtgtgtctccctcggagtctggcatgaagcaagcaagcatctctgccagcgctgttcaataggagaataatatgagctgcatattttctacattttctagcagccatgggaaatctattttagtaatgtattttatttggcctaatagtttcaaagtatttcaacttctaagaaatataaaaattattaatattttgtgttcacttcttcgtaccaagtcttcataatctgttttttactcaacagtgcatctcagtttggactagccatatttcaagtagccacatgtggctgatggccaccgtatggggcagcacaggtctatactgcatttgggtagaggtaacgtaaatgtcaaaggtatgaggtgtgtaactttaaggctggcgggaggccatattgtagcaggatgtaggtgccatagcatcttggcattactctcgtcccaagaaaaagccgcagaagtttataaaaacccattgggctaaggggagaacttcaagggcagctgcatagagaaagaaatgaagatgtgtgtttgctagatcctgagtgtttcagccagagactgtatagggaatgataatggaggcatgtgctaggagaagcaggcaagggccgtgatacaatctgcagccctgatattattatgtttgtgctattaatctaatatttctacccccatttttcaagaatgtttgcagggtggttccagtgagcccatagatgcagaatagccaggagctggggcaggaggtggggaggattacataaggagcagtgttccccagagcttcaacgggaatgcacagtcctgttagccactggtcatgacacttgctttgtactgggaatggagtgggggttgagtgtgcacaagaccttagcatccattatctccttgatggttcctcacaccctgagcctgggtagttttacctgcctccatcatgaacgtcttgtgaaagagcacgactaaaaccagagcactcagagcgaggttcactcaagaaggaaaatgcaggggcctgtccagtgatgatgtttgaagcacactggcacctttatggctgttgcttttttgcttttggcaatgtctacaaacacttgggctctttttaatataattaggaaacatggcataaattgaatgctgtctaaaaatgagtggtttaagattgtctttcatatcaaaaagaaaaacagttgtataggctgccatgcatatctgccaccagagaaatcgcattttccaaatgttttgttttttttaatatcctttaagaagtacatttttcaaatagttgctattattttaattaatcagtaaaatcagcttctaatttgactataaaattatcagttcgccattagaatagctataaagttagttttaaatgtgagctctttcaaaattgtgcagcataggatttatgtgaaatggtattttaattactttattcattctttgtgaggaaaatgaactttcatttctc

SEQ ID NO: 5760 - DNA, 505 bp, Homo sapiens
tcagcagacagcccttgttagatggcagaggtcgccagatgttcctgaggaactggcatcaggacttctgggacgtaaccacttcagtttccaatcactgacttccctgaacctggtatcttcagatctgggttgaagctgaaggctcagttggggaatcaggaaaacaagggaatcggagccagcccaagccaactgacaataactttcttttagtgactgcattagtttggggtaatgctgtaacaggcagcatttcaaaaacggatccaaatttgggttgaaaataactcacctgggtctccaatcagacctaacagagccagaaagaggcctgtacacggggactgggcagaagatctaatgccgtttaagactcctcccttgagaccagagaaaagaaactgcagacacagcctgaatgatacaaaagtgcatcattgatgaaaaaacaaagcctactgttccttcaaggtgtgggaataaacaagctctgctaaaacaa

SEQ ID NO: 5761 - DNA, 649 bp, Homo sapiens
gaaacttcaaagaacatgattgttataaatattacacatttctatctactttcttaaaatcctaaaagagaaattgctgggtcacagagtataaagaatttaaggttattcgtgaatcggcaaattgtcctctgacgattgcattaccttaccttcccactggcaaaaagaccgctgccagtttcccccactctcatccccattaaactttgtttgtttaaatcatagggcacttattataattcttactcaagaaaacatacccacttttggccgagtgcagtggctcacgcctgtaatcccagcactttgggaggctgaggtgggcagatcatgaggtcaggagatcgagaccatcctggctaacacagtgaaaccccatctctactaaaaatacaaaaaattagccgggcgtggtggtgagcacctgtagtcccagctactcaggaagctgaggcaggagaatggcttgaacccgggaggcagagcttgcagtgaaccgagatcttgccactgcactccagcctgggcaacagagcaagactcagtctcaaaaaaaaaagaaaaaagaaaacatacccacttttgcctactgcaatagccagaacattgagcagcactattgaaatgatattcataggtaaagcta

SEQ ID NO: 5762 - DNA, 345 bp, Homo sapiens
gggaagtggtcttgtttagtttcatattttataagaaaagaggcggggcacggtggctcatgcctataatcctagcactttgggagaccaagtcgggtggattgcttgagctcaggagtttgagaccagcttggccaacatgatgaaaccctgtctttactaaaaatacaaaaattagctgggcgtggtggtatatacctgcaatcccagctactggggaggctgaggcatgagagtaccttgaacctgggaggcagaggttgcaatgaaccgagatcatgccattgcactccagccttggcgacagaacaagactctgtctcaaaaaaaaaaaaaaaaaaagaa

SEQ ID NO: 5763 - DNA, 570 bp, Homo sapiens
tttaaactgtacccagatcaagaagccagacattacctgtaagcccttcttattctccagtgaccgctatcctaacagcataggttagttttgcctgttttatcctttacagaaacaaaatcatatagtgtctgtgtttttgggcctgacttcttcactcaacattgtttcagaggttcatctatattaagcatagcagtggttcatgcagtctcattgctgtctgggattccgctttgtgactataccatcacaatgtctgcgatccattctgttggtgggcatctgggtcatttccaatctgggctattgcaaatatactggtatgatattctagttcatatcctttggtaaacatacacactgattgaggttgtgtgtacatccagaaggggaattgctggtcagagggtagttgtactctcagctttaatagattctgccaaagagttttccaaaatgcttgtaaaaatttacactcccactagcggtgtatgaaaattctttaggtatgaggtctatgtaaagcaaaaataaagaagttaatatgcaaaagttatatgtaagtta

SEQ ID NO: 5764 - DNA, 373 bp, Homo sapiens
tttcttttcttttttttttttagagacaggatctcactctgtcacccaggctggagtacagggtcatgatcatagctcatggtagcctccaacttctgggctcaagccatcctcccacctcagcctcctcagtagctgggattacaggggcaagccactgtgtctggctaccagtttttgataaagctaaacttaccatatgacatagcactcttacttctaggtatttacctaagtgaaatagaggtttatattcacacaaaaagctgtatgtgaatatttatattgcctttattcacaataatcaatagctggggctacaggcatgcaccgccatgcctggctgatttttttttattttttatttttacag

SEQ ID NO: 5765 - DNA, 362 bp, Homo sapiens
ctcttacgggcgctgggctgctcacccagttttacatgggaagtggtagggccctgtctcccctggcccctgcccatgccccgggagaaatgggtatgtttgggtggtaccttcctgcatgggcagaggcaggtgattgtatcgccagccctggagctcagcgtgcacagcttgggcttccatttggaggaacctgatccttggacttgaacactctgctctttgtgttttgcacaacaggagagtcctgctcctcgcttagctcagcacagcgagtcccctggcttcagcttccctcctgagcacctgacggttgtcggtttactgtgactcactgccattctatctgcctgggcttatgt

SEQ ID NO: 5766 - DNA, 680 bp, Homo sapiens
tctttaagcaatgacactaatccaacaacaatcattggagaatgcctactattttccaggcattctcacaagaccaccagattcaatgtgagagatcccctgccctctagagttttacaggttaatggaaaggggtttttaccaagaagcgcaaatccaaattactcgtttcttatgttagcaacttcaccctcaggagtaagcagcagcagcagccaaggggcacacagagccacaggctaaacacggtccacagcttcctgaaatcaaagggcttcaaagatttggaagacacatttcttttgatttttaaagcaaccacacacctattctggaatagtgtacaaaaatcacataggccatcccgactcctaactgaatcccctcttccaccgtcagaggacgagggcactttttggcatgatggagagaagcgagggggcaggggtggccagagagacggctggagtggaggcgggggcaccagcgtggggtgaaggcagaggcaccacgggaatgtaaattgcaggacgcatcctgaggcagtgagtgttcggggcattcttgtgggtggtcacttgggccctagattaaaggcagaaacacagaaatgccttgggggacgttgtaaacttcaacagctctatctgttgtttcaggaatgagggagaaacattcac

SEQ ID NO: 5767 - DNA, 235 bp, Homo sapiens
gcctgtgtccaggcttggggaaccacatctcggggagaaagcaacagcagtcagggagaagtcagtccctagatggcatcaggtgacctgagagctatggagcacagcaagggtggcaaatgtacttggggaggacacctgcaaatgccagggtcatattgactttctcccagtattcctgccacaaacaaacaaacaattaagtaaagggaagtctaataataagaattagcct

SEQ ID NO: 5768 - DNA, 758 bp, Homo sapiens
gactggggacctgtgtgatggcataggtcacaggcccatgaagccagccctggtagaaggtaccctagggagggtgtgggctaacagattcaaagagcaatgggacatccccttgtgtttagattttcctcaattttagtgtcattcccttctgtgatcctcaaaacttctgtcaggcttttttttcctggcacctacttgttggttttaggtattctttggggagtaaagggtagagcctgtgtccaggcttggggaacacatctcggggagaaagcaacagcagtcagggagaagtcagtccctagatggcatcaggtgacctgagagctatggagcacagcaagggtggcaaatgtacttggggaggacacctgcaaatgccagggtcatattgactttctcccagtattcctgccacaaacaaacaaacaattaagtaaagggaagtctaataataagaattagcctctcaggccgggcgcggtggctcacacctataatcctagcactttgggaggcccaggcgggttgattgcctgagctcaggagtttgagaccagcctgggcaacatggcaaaagcccgtctctactaaaaatacaaaaaattagtcgagtgtggtggtgtgtgcctgtaatcccagccactcaggaggctgaagcaggagaatcgcttgaacctgggaggcagaggttgtagtgagccaagattgcgccattgcactccagcctgtgtgacagagcgagactttgactc

SEQ ID NO: 5769 - DNA, 522 bp, Homo sapiens
gcctgtgtccaggcttggggaaccacatctcggggagaaagcaacagcagtcagggagaagtcagtccctagatggcatcaggtgacctgagagctatggagcacagcaagggtggcaaatgtacttggggaggacacctgcaaatgccagggtcatattgactttctcccagtattcctgccacaaacaaacaaacaattaagtaaagggaagtctaataataagaattagcctctcaggccgggcgcggtggctcacacctataatcctagcactttgggaggcccaggcgggttgattgcctgagctcaggagtttgagacccgcctgggcaacatggcaaaagcccgtctctactaaaaatacaaaaaattagtcgagtgtggtggtgtgtgcctgtaatcccagccactcaggaggctgaagcaggagaatcgcttgaacctgggaggcagaggttgtagtgagccaagattgcgccattgcactccagcctgtgtgacagagcgagactttgactc

SEQ ID NO: 5770 - DNA, 759 bp, Homo sapiens
gactggggacctgtgtgatggcataggtcacaggcccatgaagccagccctggtagaaggtaccctagggagggtgtgggctaacagattcaaagagcaatgggacatccccttgtgtttagattttcctcaattttagtgtcattcccttctgtgatcctcaaaacttctgtcaggcttttttttcctggcacctacttgttggttttaggtattctttggggagtaaagggtagagcctgtgtccaggcttggggaaccacatctcggggagaaagcaacagcagtcagggagaagtcagtccctagatggcatcaggtgacctgagagctatggagcacagcaagggtggcaaatgtacttggggaggacacctgcaaatgccagggtcatattgactttctcccagtattcctgccacaaacaaacaaacaattaagtaaagggaagtctaataataagaattagcctctcaggccgggcgcggtggctcacacctataatcctagcactttgggaggcccaggcgggttgattgcctgagctcaggagtttgagacccgcctgggcaacatggcaaaagcccgtctctactaaaaatacaaaaaattagtcgagtgtggtggtgtgtgcctgtaatcccagccactcaggaggctgaagcaggagaatcgcttgaacctgggaggcagaggttgtagtgagccaagattgcgccattgcactccagcctgtgtgacagagcgagactttgactc

SEQ ID NO: 5771 - DNA, 307 bp, Homo sapiens
aaaatgtcggccgggcatggtggctcatgcctttaatgcaggcactttgggatgccaaggcgggtggtcacgaagtcaggagatcgagaccatcctggctaatacggtgaaacctcatctctactaaaaatacaaaaaattagctgggcgtggtggcacgcgcctgtagtcccagctacctgggaggctgaggcaggagaattgcttgaacctgggaggcagaggttgcagtgagtcaagattgcaccactgcactccagcctgggtgacagagcaagactccgtctcaaaaaaaaagaaaagaaaa

SEQ ID NO: 5772 - DNA, 308 bp, Homo sapiens
aaaatgtcggccgggcatggtggctcatgcctttaatgcaggcactttgggatgccaaggcgggtggtcacgaagtcaggagatcgagaccatcctggctaatacggtgaaacctcatctctactaaaaatacaaaaaattagctgggcgtggtggcacgcgcctgctagtcccagctacctgggaggctgaggcaggagaattgcttgaacctgggaggcagaggttgcagtgagtcaagattgcaccactgcactccagcctgggtgacagagcaagactccgtctcaaaaaaaaagaaaagaaaa

SEQ ID NO: 5773 - DNA, 307 bp, Homo sapiens; identical to SEQ ID NO: 5771

SEQ ID NO: 5774 - DNA, 353 bp, Homo sapiens
tagcagctgggcttgctttttcttttttaaatcataaacaagttctattagagtttggttatttagccaatagaaatgtgtatagttaaatatgtttggactttggggaaacagtgtttatcaatcttaagaaatactcttatcgggctgggcatggtggcttacgcctgtaatcccagcactttgggagtctgaggtgggtggatcacgaggtcaagagattgagaccatcctggccaacatggtgaaaccccatctctacaaaaaatataaaaattagccaggcgtggtggcaggcacctgtagtcccagctattcgtgaggctgaggcaggagaatcgcttgaacccagg

SEQ ID NO: 5775 - DNA, 565 bp, Homo sapiens
ggagcaatatatatgcttgggatgcaacagaaacacagagggagtttgcctaatcgctgaaaggactgaaagatgaaaatgacccagaaaggtttataagaagaggtggtagttaggcaaatactgttagttgtgtatttaatatttactcttgtccttattaacatgatggcaatttttattcagtgtggcaatatgctcagctgagagattatatttttcagcctaatgaacatatgactacgttttgactagtgagaggtaaatgggcattttgatgagttttccatgaaggctccttacagggagaaacagacagaactctttctttttcctttcctttcttcttccttcctacctggaatatgggtgtgatagctggagccccagcagccgtgttggatgataggtgagcttgagaataggatccaaggactaaggatggcaaagcaggaaaacataaggaatctgacttcctaatgatcatggtgcccataatacagttctagattgcctctcaactccttttacataaaactaaataaataaataaactcatatacct

SEQ ID NO: 5776 - DNA, 243 bp, Homo sapiens
tgctggccttgtcgaaaaagatgtgatgcttctcagaacctgttccatctgtatgccattgttcatgccttaagaaatgcaaagatgtacaataaatcatttttaaaatgtgtgctcataggtttatgtgaagaacagattttttgaatcatggcatgattcactttctcaatcaggacaattatgagactaacttaaatgggttttttaaaagtgaacaacacgtgctttactctgataagt

SEQ ID NO: 5777 - DNA, 13223 bp, Homo sapiens
agccgctcaacaccctgcagcacctctgtgaggaaatggaatacagcgagctcctggacaaggcttcggacactgatgatccatatgagcgcatggtaataaataactaacagagcagcgccctcaggatttgccaaccctagacctggctaagccagaattcattatgatatatttggcatttgcataatattcttactgcatagtaaaagaggaattgatctgtttgcataaatccggcaaggccaaaacctcccagataccaacacaggaagacacactttttgtgccttatccttggtctagagtgtttctaaagttaaggtgtaaaggtctcatactccttagaggttgaaggcacaccttgcctcactttatcagtttttcctgaatgtcaggatagcccatctgttcaggaacttaggtctgagaaaataacttctgtttatacttcaccctttatcccatatggctgtgggaaacatgccatgccctctgaaaagcacccgcaaccacaatcctcatgcacatgaggctaagatcatgcctgtggcagaaccaataagctgggtttcagaacctttgaactctgtgatactcatgacgttggatggaagggtgaaaaatgcttcacctcagtggcctgctggtttctgtgcgagtggttttacctaatcttacctatttttttccccatgagttgataaaaattctgtacagacaatagaaaatgcaactgtcatcaaatcaacacccatccacatgaggtgtgtaaaatctagagggatgaggaacaaacagacccagcagtcgtctctcctatattattcccttttcttcaatgttttaacaggttctcgttgccgcatttgcagtttcaggatactgctccacctatttcagagcaggaagtaagccattcaacccagtccttggggagacttatgaatgcattagagaagacaagggattccgctttttctcagaacaggtaagcgccactggactcagtgaggtttctatataggtaagaggacagttcggtgatgaaagcaccatttcgataacaatctgttgggatgggttatgataccagttgtgaattcgaagtatctgagacaggtcttaatcagtttagaaagtttattttgccaaggttaaggacacacccatgacacagcctcaggaggtcctgacaaaatgtgtccaaggtgttctggacacaggttgggtttatacattttagggagatatgcaccatcaatcaatatatgtaagatgtacattgattctgtccagaaaggtgggacaacttggaaatggagacttccaggtcataggtagataagaaaggttgcattcttttgggtctctgatcagcctttcactgaatacacaatttacatgtgagagggtggtagagagagagtcacttatgcctcagtctcactctgtgaatctgcatttttacatagacagtagggcagaggaagtaatcagatatgcatctctctcaggtgagcagaaggatgactttgagttctgtcaatcctttgtcccatacctgtgaagataagctatcaatgtacattgccaggttgaaattcaacagaactgttttagggtaaagatcttgaggcccacaaagaatttccttgtgggcaaattgtgagggagagaggtagcctttttaaaaaaaaaaaaaaatctttgtagctatcttttttaggaataaaatgggaggcaggtggtcctgagatttattttcttttcacacagttaagaaaactaacacaagaacagaaaaccaaacaccgcatgttctcactcataagtgggagttgaacaatgagaacacatgcacacagggaggagaacatcacacactggggcctgttggggggtggcgagcaagaggagggatagcattaggagaaatacctaatgtaggtgatgggttgattggtgcagcaaaccaccatggcacgtgtatacctgtgtaacaaacctgcacattctgcacatgtatcccagaacttaaagtataattaaagaaaggaaggaaggaagaaagaaaggaaggaaggaaggacgaattcacttcacttatgggcattatttcccctctaaattgtataagttctcagtgtttttaaagcatgaagtcttacagatttacttatacattttgagaataattcagtaagagaaatggatgaccatgtggaagtcttaacactgatactgccttttttttgtttttaattaccaggttagccatcatccacccatttctgcctgtcactgtgaatcaaagaattttgtgttttggcaaggtttgtatttcaattataatttaaaatcaaatgtatgagcctatgaaaaaatatctggcttccaaagggacactgtattcagtttagatttctacctttggaactcagcaaatgttagtaattggtgcagagctcattttgagaaatcaaaattcctggtttcaacatgaaacagtttcagctaggagatgagattgcttatcttggaaacaatgctgtatggaatagcagagctccatgcggactgtgccggtggagagccaccaccttatctcatgttccttattgtctgcatctgtaacatggaggttccatctgctgccttcttggttcttcggggtgtgcaaagacattttaattctgaaggaaggctctatgacacatcatcaatggtcataatctaaatagatatgcaaacattacagtaattcctggcctttaactcactggggctccagagtttggattgaagtctctactgagttaagtcagaatgttacaagcttgcctaatacaaaaaagtttctaaactcctttacaaagaaaagaatatttatgtaaatgtgaacattaagtgtaaatagttccttcgtgtttggaagggtgcttcattactcacagaatgacttctcatgagcattttcttaacctgaaaatacataaaaatgatagaacactgtagctgtactttattacaaaaagatgacagatcatttcttggtcatcaccaagaatcaggcatcttgtggagatggcacgaagttcccatagttcatcaaaatggaaccaggtggttatcacaaatgcacaaataaatctaagtttccatacgtaaaacataaagccatcgtgtgaggtaaagtgctgggccctggtctatatcttaacaaccagtataaaaacattcattaagttaatcccactctttcataaatcttattttataaattttattttatctgtatttggagattttttttaactgtaatcccaaattatatgtctttgatatggggggaaatgtatatataaattaattgtattgctatactccaattatttttagtgtacatcttatgcttgatatatttgttaactatttttaccacttagttaaaacttataacaacctttattgctgtctggacattaaagcacagtagagtctatgtttgtatgtaaaatgtgaatacacacacacagacacacacacacacacacacacacaccgcacacacactgttccaggcttctcccagctctgttagttgaaaacaaataaagagcatatgttatagagaaacatagatagtgggggttttttttagttttgtttgtttgtttgtttgtttattttttggttcacagttaatattttcaccttgggccatttgcaggcacttgtcatactaaatcagcaatatagaatcagttgtcattccaaagtgtttcataaagtgtaatacaaaagttagtttttatagaagaggtgattagatatggggtatgtatttcttgtcctctccctatgtcatttagatatcagatggaaaaacaagttctgggggaagtcgatggaaatcctgcctgttggaacactgaatgtcatgcttccaaagtaggtgactcacacctcccttttggcctcttgtctgcttttctaaatcataaatgggtattttaaactctagaagatggtaagggtttctttctctttatacccaaacttctgttacctttgccaaagttttgagaatagactcccacaaaaacaaatgagaacttaagcatatgtagcaaagcttcctgtttatttcttcacatcctccattcttcagtcaacaccaccaggtacctcccatggcccagtcatcatgctagtttgattgtatataaaaggttctcctgtttagccatttctttgctatacaattcagtttcacttttgagttcatcttagatccagggagtattttatcaaagaagagtgatgaaatccttttatggttgtgttctagaggatactgcctctaaatattttgaaattaattggaatttttactgaggccaaggacttgattgtttcttcggttttacctatttgaatgacagaatttccagatgaactggatatggaagaaggtgaagagagggaggtattcctaggaccacaaaataaactttgaatatttgaacatgtaggccaggcacggtggctcacgcctgtaattccagcactttgggaggctgaggcgggcggatcacaaggtcaggagattgagaccatcctggctaacaaggtgaaaccccatctctactaaaaatacaaaaaattagctgggtgtggtggcgggcgcctataatcccagctactcgggaggctgaggcaggagaattgtttgaacctgggaggcggagattgcagtgagccgagattgtgccactgcactccagcctgggtgacagagcaagactccatctcaaaaaagaaaaaaaaaaatgtataaggaagagagttttcctaggtatatatggtgcctacatcataccaattcataaactttgcagaaacttagaagcatcttttttatgttgatgtaacatttcatttgaaaatatatgtaacgtacaaacttaaatgtgatttgaagctatatcatttcatttcttagcagaaattctgtaaccttgttccccagaatttgtaatagatttgtgccatcttagtatgctcttcagtcttttcccgaagaattattcacatctgaggtcttaaacctggagtacaaaacagtgttcccagagtgatctttcttcagtgcacactctgtggtgcctccctcctacctggaatcctgcggtggcccattgcctgcagggtaaatctagactccttggtacgtccctgcaggccttcccggctctgcctcatcacacctttcctgccttgcgtcctgccacccgcactcacctggagcacagcattcacaggcctggatgccttgtgcccttctgacctttgtggctctgtggatgcttttccccagcccatagtgccctcttatctgccatctgtgcttacacgaaacccagcctcttctaaggtgtcttccttgacactcatcccacgttccaggtagattgaaggactaaaaactcttccttctgtgttccgatgatatgcatattttaagtatttgtttgcatatccatctaccctcccatacttctgtctccagaaaagcaggaaccaggccctattccactttgtaactttagcacctggcccatagaaagcacttaaatgttccttaagtgaattaaccacatcgtaaatacttaatgaccacagagagaatttcaagacacaaatgggaggagaatgagggaaaaggaagctttggccaaagaatattctcattagcagaaacagttatatgtgtttgtgaccttggttgtttttcatcagtgttacattcttcactaggtatggagattactatgtgtggaataaagtcaccacttgcatacacaacatcctcagtgggagaagatggatagaacattatggagaagtaaccatcagaaataccaaaagcagtgtttgcatttgcaaactcacatttgtcaaggtaaatactatcatacaacagtaaaggaaaatgagtataaaatgcttcttaaagaagaaatagaataatcaccttaaatagcagcaagtgaatctgtcctgtatcattggtccttacggacattttagataagaaagcagaacaaactgatagagtttctcaaggcatgcaagtttctgaacatatggaggtcaaaaaaggcatcatctaaaacagaaaaaaaacacatgtctttttaaagaattttcttttgaagtagccagtcagttgttcactaagtaaaattccagaaaacacttcttgactataaatcttctggtttatatttctgtttctcttcctgcttgatatgtgttcaagtgatctgaatttcgggaactcattataatgttgtcattttctgaagacacttgatgtagtcatgtagatgatcaccaccagtcagtacatgcttatccaaccctgccactgttataattcaaataagttcaacaggaaaaattagcctcattaacaagaaaatatgttgggatagaaacgcccaaaaagcaccattttccctcagtttctctggtctgaagtggaacattcagtatcactgccgtgtttgtttggatgtgctacagaattcaacatagtatagaaaccccacccagctaccatacctgttcaattcatgatcccattctaatatggtaaacaggtaacatattggagtcttaagactctaatattttcttttctcagttaaatccttttaagccatattggaaggttgtatttattttaattgagtgtctttattttagcccaaaatgttttcactaccttttttcttagagactcgtaaggtacctagaactgaagagccaagatcactatgtgctctggctgggtgatgatgtaaatatgtacatttggctttgtaggctatgagaagctgcagtgcagtcctgtctctaacacttgcagagcctgtataattaactaaaatatgtaaatcaagtctgtaagctataaaatagaatatgctctatttctttgccttgacaaatacactttttataacaaagcctgtgaggccaggttggacccttcagaactctgtgctgtaaccctggcaatgtaggacagccagtcctggcccacggccttccctactttcttcccacctctggctctgttttgactgcaaggggcctcatacacacatatacaggcaggccagcccacacatctaagctctgttcacacccccacaaacaaccacccttggccactcttcagacctaaaggtgcacacgctggtgggtggtctgcccttgggtgcatgaatccaaggaaaagggccttgccagctgtggaataaccttggagctacttggacaaggaattctagggtcctgtatacttggggcctgatctggaaggggaatcatggggtaggcaaactcccatagacttcttatcccttgggaaggagtatggctggaagggccacttgagggccctcctcataaaatttggccatttatagatactatgaaaattatttcacaaacaatttctgcagcatggccaattgaaatttattaaaatccatgagcaagaggaaaattcaaaacaagaggaaaaaaaattgctagcttagaaattaatattaggttcttgggatagaagctgagccttctctgtgatatactaccatgttatgcgtggaatagagaccatccctttcttgaaagttaagctaactcttagaaagccagccctccatataaaacgttttgagatttctgtatttctgaaaatggtttgaataagggacttcaaggctaagaaatttttctatatggaaaatacagggaatgatgttattaaagccatcaaatgtcacaattggggtttggtttttccaggtgaattattggaattctaacatgaatgaagtccagggggtggtgatagatcaggaggggaaggcggtgtaccggctgtttggaaagtggcatgaaggactctactgtggtgtggccccctctgcaaagtgcatttggagaccaggtgagagtggcctgagtgttctgccaacaggagggcactatggacaacagaagggaagagaacatcaggtcatcttatgcaactcacattatgtttcctttaagagtgagattaaaagcgtagatgcttatggcaattatagttacattcatacttaacatagaagttatacataagccccaatatttgatatttcataataaagaatgtaggccaaatctctgacaggcagtcagagattgggcttcatgaaaaattgctcaaagtgtaatgcctacatttgaaaagctaggtatatttattaaagactttagataattgaagtatacaaacttaaaaccttactcatgttatttattctctgctttaataaaacaaagactacaaacatttgtaatccacaaattcaataactcaccagaataagtaatcttttcacttgagcctcaagagacagcaatatgttgacatttaataaaagacatcaaaagagttctgataacacattagcttatgattgaatatcaagtataaatggaacaagtatccacatgacatttattgtcactggaattttgtcagttaatccctaactaaaattagttgttagtttcctaagagacatcaatgagtatttaaatttcccgctagtagagtggctagcttattcattccgcaactatttattgagtgctggctgtacatcaggctttattccaggagctcgggatacgtcaatgagcaagacatacaaagatcctgccttcaagtttagttaaaaagtggcaaaaaatattaatttaggtctgcatatttttcttttctaaaaggaagcaaacaagtgtttctggtgtactcttaatgttcatagttaattgccatagtatttagttaaccaattgaatattcaagagaaatattatggagtagtttagctaatgaagactactatatgtgcagttttgtttgaaagacaggattgtattaaatatatgaatctgtcaattctgatcatcaacacaaagtttcctacctaggaataccaccaatttaattcacttgaaaaaatctataatcttgtgtttatgactacaaatttggtgttagtgtaggtactaagtactagggtaagtcagcttcttccagttccataaaccttctgcctctcacagtggttcattggcctctttccaggttccatgccaacaaactatgagctgtactatggcttcacaaggtttgctattgagctcaatgagttagatccagtactaaaagatctccttccaccaacagacgcccggttccggccagatcaaaggtgaggatggcagtggtatttaatatgcagactatggctgggtgcagtagctcatgcctataatcccagcactttagaaggctgaggagggaagatcacttgaggtcaggaattcaagaccagcctggacaatatagtgagactctatatctctaaaaaaaaagaattaaaaattagctgggtgtggtggggcatgcctaaagtcccagctactagggaggctgacgtgggaggatcgctcgagcctaggatgttgaggccacagtgagctatgattgtaccattgtactccagccagggcaacagagagagaccctggcaaaaaaaaaaaaaaaaggcagactattatggcttggggctttagaggtcattgtgacttatttttactaccatcatgtatttttattcaatcctttctccattcccttattcactcagcaatatttgagttttctatgccaggaaaagcagtattcatagaatgatcataacagattatctcagcacatagttccccacagaagataagataacagagatattttttaacaaagtttctccctccccctaaaatttaccaaaggtctgtaaatttgtgaactctttcttaaatatataatcagtcctcacccagtgtttctgacctttttacttctataactctgtaacatggagtatcttttaaactgaagaataataggataagttacaggggaactcagaaatgctttgagtgcaagtctgcaatttgcccaatgtggttttgatcccacagagtatgagatatactcaaaatacagtacctttaataccttctgattcttagttttttattcttatgtagctctgaactcatgatgtccattcctatggaattcattttacttttcccaaaaattctatatgccatacaaattccactcaagatcaattttctgtttcccatgtatttgtggctttatctgccatctgccaaaatgctctcagttttgaatgttccactatttaattctcttctattttgccctctctctctagaacatgttgtcttgctatttgacattcaaatttattaataaacttcctgtacaatgtatagcatattatattcctgttctttgctctcattttgaaatgtaagcatttgtaagtcaccattcagtctgctttttccttctcaattctatttcagtgttccttttctgaatttcatttactattcatttcacattctgtggccttttgtaattttccccattaccttttcttttctcatcagttttgccctctccagtaaaacaggaaagctccttccctctcagcctgttctcaaaatagacggagaatagccagttaccatcctccattctatggccttttagcaaaagctttctgataatatagaaaaggaacatggctatgacttcacgctcttctcaccctggactctgcagttgtcctgaaaatctcaagttatagaaccctagacagcatagaaaagtcttcaaggccaaaccacccacctttcactgatattgctgattataataattcagttcatgtacatagaaaatatgtaaatcctgggaggcagaggttgcagtgagctgagatcacaccactgcactccagcctggcgacagagcaagactccgtccgttactgtgcggtattttatgttcatagcaattagaaaacaattttgtgcaaatgaggttttttttcccccagaaaagaggataatatgttaaaatatcaactgctttctgcttagatttttggaagaaggaaatttagaagctgcagcatcagagaagcaaagagtagaggaactccagagatctcggagacgatatatggaagaaaacaatcttgaacatataccaaaattttttaagtaagtcagttaactcccatagcaagttcatgttttgcaaatggttgccacaggccatgagaaactccagttaaatgaaaataaaatgggtaaatggattttggtatctttgcttttggcagtgaaaatattgaatcgattttgcacttatgaaaagttagtaactataaaaagaaattttttctacagctcttctcttttcatgggcagcagaaaagagtgagcatcctgcccagaaggctctttgtccttcagctgcactctttagaatggtggaaactggttcccactcccttagccagggactgaaccagaccccactgcccacaagatcatcctggcttttattaggatttcattttatttctatcacacaaagcttgtgtgtgtttagatttggtctctctgtggtatgatagtaggtgattattacaggattatttgcaggattatatatacatcacacagattaatctgaggtttccaaatgcatctgttgccctccagagccaggacaaaaagctcagggtaaccttatctcctttagacttgtcctgtcattactgccctggggtagaaatgcagccttgcccttcagatgtctaaaatgtgctccttggacatgggcccagtaggggctcttagagctactgatattgcatacttttagtgaaggagaaaggattcttgtgggtctgggacctgaagctcttagttacagtatttgtatatgctttattgggggctatttactttttacccctgccaggaggtaatttgttcctgccctgagttcctctccccctggccctacctacttccatttcacacatttaacaacaaaaatgacttcacttccagtcaaaaatagtcacatcatcagtagctagcagataagatactaactggcttacaaacactgcttatatgtccatgtctaatctataggagagggtcctatttaaggttaccttgatgtgattcatgactaatgttgatgtttatattttcacagaaaagttattgatgccaatcaaagagaagcctgggtttctaacgacacctactgggagcttcgaaaggaccctgggtttagcaaagtagacagccctgttctttggtagactgggaatgtagagctagccaacatatcacattctgaatgaataaataactatgcacaattatgtttcttatagctatgtgtggtttctgggtcaactgaaaacctaccatttgcttttctattcatctttataatggactttcagaagtgcattagacaaggcccctaaccactttgggatcctttctgttttgctgcaaccatattccttaaaaaaaaaaaaaaaaaaaaaaaaaaaatccacaccgtccttggaaagcagaataaaaggagcagaatataaaatccaaagtctgaccagtttgtaaagaaaaacaaatggtaactggtgcttaaagctgatcaagaaagttaacaacaacatagaaaccacacgattgttccactgtctggaagcaccatcccctatcgcaggactcctgggccacaagcagtcggtcagtgcagacttcaagtgtgtctgtttgatgtggtgtgattgtgctggccttgtcgaaaaagatgtgatgcttctcagaacctgttccatctgtatgccattgttcatgccttaagaaatgcaaagatgtacaataaatcatttttaaaatgtgtgctcataggtttatgtgaagaacagattttttgaatcatggcatgattcactttctcaatcaggacaattatgagactaacttaaatgggttttttaaaagtgaacaacacgtgctttactctgataagtcagttaccatatggtatgtctgaagggaaagaaggaaaagacgtgctaagtagatctctgtatttacgtggctcgttaatttcctgtcctgcgtccagataataaaccatccctcttccacct

SEQ ID NO: 5778 - DNA, 2098 bp, Homo sapiens
agatttttggaagaaggaaatttagaagctgcagcatcagagaagcaaagagtagaggaactccagagatctcggagacgatatatggaagaaaacaatcttgaacatataccaaaattttttaagtaagtcagttaactcccatagcaagttcatgttttgcaaatggttgccacaggccatgagaaactccagttaaatgaaaataaaatgggtaaatggattttggtatctttgcttttggcagtgaaaatattgaatcgattttgcacttatgaaaagttagtaactataaaaagaaattttttctacagctcttctcttttcatgggcagcagaaaagagtgagcatcctgcccagaaggctctttgtccttcagctgcactctttagaatggtggaaactggttcccactcccttagccagggactgaaccagaccccactgcccacaagatcatcctggcttttattaggatttcattttatttctatcacacaaagcttgtgtgtgtttagatttggtctctctgtggtatgatagtaggtgattattacaggattatttgcaggattatatatacatcacacagattaatctgaggtttccaaatgcatctgttgccctccagagccaggacaaaaagctcagggtaaccttatctcctttagacttgtcctgtcattactgccctggggtagaaatgcagccttgcccttcagatgtctaaaatgtgctccttggacatgggcccagtaggggctcttagagctactgatattgcatacttttagtgaaggagaaaggattcttgtgggtctgggacctgaagctcttagttacagtatttgtatatgctttattgggggctatttactttttacccctgccaggaggtaatttgttcctgccctgagttcctctccccctggccctacctacttccatttcacacatttaacaacaaaaatgacttcacttccagtcaaaaatagtcacatcatcagtagctagcagataagatactaactggcttacaaacactgcttatatgtccatgtctaatctataggagagggtcctatttaaggttaccttgatgtgattcatgactaatgttgatgtttatattttcacagaaaagttattgatgccaatcaaagagaagcctgggtttctaacgacacctactgggagcttcgaaaggaccctgggtttagcaaagtagacagccctgttctttggtagactgggaatgtagagctagccaacatatcacattctgaatgaataaataactatgcacaattatgtttcttatagctatgtgtggtttctgggtcaactgaaaacctaccatttgcttttctattcatctttataatggactttcagaagtgcattagacaaggcccctaaccactttgggatcctttctgttttgctgcaaccatattccttaaaaaaaaaaaaaaaaaaaaaaaaaaaatccacaccgtccttggaaagcagaataaaaggagcagaatataaaatccaaagtctgaccagtttgtaaagaaaaacaaatggtaactggtgcttaaagctgatcaagaaagttaacaacaacatagaaaccacacgattgttccactgtctggaagcaccatcccctatcgcaggactcctgggccacaagcagtcggtcagtgcagacttcaagtgtgtctgtttgatgtggtgtgattgtgctggccttgtcgaaaaagatgtgatgcttctcagaacctgttccatctgtatgccattgttcatgccttaagaaatgcaaagatgtacaataaatcatttttaaaatgtgtgctcataggtttatgtgaagaacagattttttgaatcatggcatgattcactttctcaatcaggacaattatgagactaacttaaatgggttttttaaaagtgaacaacacgtgctttactctgataagtcagttaccatatggtatgtctgaagggaaagaaggaaaagacgtgctaagtagatctctgtatttacgtggctcgttaatttcctgtcctgcgtccagataataaaccatccctcttccacct

SEQ ID NO: 5779 - DNA, 238 bp, Homo sapiens
tgccaaattgcaacacgaagacttaatgaacaggcattccccctcccacgccacccccacccctgctaattgttcttttggcagctgattgttcaatacattctattttgtatgatctcttgaggtaaatggttgaaaaaatctgttaggtaaatagttaagagaaaacgtttttcctctttctcaaaccaacagcttgagtccttcttattaaatgtatttaattttttaaaactta

SEQ ID NO: 5780 - DNA, 414 bp, Homo sapiens
ccttctcaattctatttcagtgttccttttctgaatttcatttactattcatttcacattctgtggccttttgtaattttccccattaccttttcttttctcatcagttttgccctctccagtaaaacaggaaagctccttccctctcagcctgttctcaaaatagacggagaatagccagttaccatcctccattctatggccttttagcaaaagctttctgataatatagaaaaggaacatggctatgacttcacgctcttctcaccctggactctgcagttgtcctgaaaatctcaagttatagaaccctagacagcatagaaaagtcttcaaggccaaaccacccacctttcactgatattgctgattataataattcagttcatgtacatagaaaatatgtaaatcctg

SEQ ID NO: 5781 - DNA, 914 bp, Homo sapiens
aaaaagcatatggaattcctgtgtgggcttagtagtactataaatgtaattgtttttgagtgaagcaccatgtaatccatgtctcaatcccatgcccgctccactgacactagtcgaattccactgagaacagaagcaagaataatagtagtttatttgcattgtttaaatgaattctatgcaaaatcatatttcaaattttcatcaagtgattccatatggtacatggctacatattaagcatttaccttgctattggcagagatatgaaacttaagctaaggaatgtatccatcccaaagcaggaaagcagaagtgtgttttgcatacttcaggatttgtttttcctccactaatatacagaggcttttgcagaaaacttgcatcagtattcctgtttctgcacgtaggtgactatataaatgcctgtatgttttttttaaaatatctcctcagagattttcctagggaattataaaattacatatattttattgttagttagatgtttattcttggattcttaccattagaatttaagtgttatttaaaactctgatacagttacagacactttacattttattatgaggtgttgattttagtggtatttctcctcagcaaagcattcctaataatggctaatacaccatcaaatgaaaaactgctgatgagagtgtaagagaaagcgctaacgtttccactagatggcgcaatattttatttatccaaaactcctcccttgcatctgagtttttatgttatgtgtacagtctgcattagcttagaatggaatttcattctcaggtaaattttcgaatccatcaccagatctaagcattctgcttcaacaataccctctctattcctctcattcccattttaaatccataggtggcttgccctgcggcagt

SEQ ID NO: 5782 - DNA, 914 bp, Homo sapiens; identical to SEQ ID NO: 5781

SEQ ID NO: 5783 - DNA, 573 bp, Homo sapiens
aaagtgttgtggctaaaagtaaatactctggagacagaatacacctaaccagctgggtgaccctggacaaattacataaaatcttcatgctgcagtttcctcatctgtaaaatgaagataaaaacagtaactttagaagattgctgtgaggattaaccaagataatgcctgtcccatggtaaatgttcaataaacgttagctattattattatttcatcaattactatgaaatttcatagaatttcaaatctatgcaatttcaaaatctgatataagtttaaatgcaggttaaaggaccaaacaatcgaaacatgtttaagagggaaattttgggtgcagttacacaattacagatggatatctttgtttatgttttagagtggtcaagttatagacactcaactattgcataatcctgtagcctagtttgctaaacggttttagttattgcttaatgtattttattatctttcaagtggagattcccaattcatcaaaattatgggctgctgccagatgattcttctgtaaatacaactgctctgttgtattaaaaaaaaatcttgacttta

SEQ ID NO: 5784 - DNA, 413 bp, Homo sapiens
caaaaaacaatttgtaatcactacagtgccaatcagggatagtgatgagtgaggtgactggtctagagaaactactactcagctaagttgcatagatggggaggagtaaggtggccaaatagttctgcatttaggtcctggccctgtaaccttgtgaatgtcagacaagctctctaagcctcaattttctcatctgccaaaaggaataaaaacagagtttgcctcgcaaagctgatgtatgaggcttgaacaagataacttagttaaagagtttatctcagtgtgcggcacggccaacattggtggatggtggctgtgagtgagctcctcaggagatccagagttcagcctctgctttctttagtcctgtgtgtgaaactatttttaagagcaccacactggcctctcttaat

SEQ ID NO: 5785 - DNA, 5184 bp, Homo sapiens
ctctccctgcttgggcgccgccgcgcgagcgcttcccttccccctgcaagcgcccggataatgtctgagaatgtccatttctgggacgcttagcagctattatgtcgactcgatcataagtcacgagagtgaggacgcgcctccagccaagtttccttctggccagtacgcgagctcgcggcagccgggccacgcggagcacctggagttcccctcgtgcagcttccagcccaaagcgccggtgttcggcgcctcctgggcgccgctgagcccgcacgcgtccgggagcctgccgtccgtctaccacccttacatccagccccagggcgtcccgccggccgagagcaggtacctccgcacctggctggagccggcgccgcgcggcgaagcggccccggggcagggccaggcggcggtgaaggcggagccgctgctgggcgcgcctggggagctgctcaaacagggcacgcccgagtacagtttggaaacttcggcgggcagggaggccgtgctgtctaatcaaagacccggctacggggacaataaaatttgcgaaggaagcgaggacaaagagaggccggatcaaagtaagttataaaaagtgaggaaatacccaggccgaaggccaggaggggggcggggaggggaaaggcaataaactgcggacaatgtgaagggaaactgcggcggtggccggagagcgggccgggaggaggaggggagaggaaggaaagacggagggaaggggaaagctgcgtgctctagaaggggagactgaggccgccagaggagcgctgcccccacttctccaagtcctgcggggaacaggggctcggggatcgacttgcagctctctcggccctctttccccctctctcccggaggccccagctgaaagcccggccagagaccggcgacggccgggagaggagctggcgggggccggggccagcggccagcgaggccgagagccggcgagggcaagggccggagcgcactgggctgcccggggccgtgcggctggcagagctccccgcgccacgcgcagaccgtaaaagtcggccaaggggaagggggagggagctcattaggattttatttgcgatgcaacagcttggcggaggattgttcctagcagatctcgcgctgtagccgcgcagagtccgcaaccggcgacaggaggggcgggggaagcccaggacgcggtgactgagccccctccccggatgcgccggcccctccccgggagccttccctccggtggcccctctcctcctcggcgtcctcgcaggggctaccgcttccttttctgcggtcccccgctgctctctgcggggctcccgagccccagcccgggctgtccgcctcttggggagtcggggaatcgcttccgaatatcggggcatctcgaagggaccccggggagaggaggggtggggggaagagagagttgcagagaggcggagaactttaccctttgtgggtagtttcccgtcacctcccactcctcaaaagcaccccggccagaacgccaagtctggctgattttcaggaggtgctactagatgagaagagagggttctcctattatttatttttaaggttgagaagggctcatcggtgagggaactcagcctcaaacaatgactcgcaggctggtggatcaggtcctcgtttcttactctttttgggaagtagggatgttttagtctctccttgccctgctagatttcccattgacggagtgtccccagggccctttagagcatccttgcctgctggagagtaaagagcagccccattccttgcagggtcctgtcacctccaacctgccaggtggaatcctaagagctggcatttagggaacacattcttccccaaccctccccgcacactcccaaacagatcccccaccctaaacccccaaattctgcctgaaaagcccattatggcaaggcagccatttggctaggatcaattattaacagttttttccctctttcatatttaatgcggctgcgggtcccatcccaggcaatcacattaaggaaatagcgctgcaaattggtaagacacggtacttagtgtaggatgaaccaaattttttatataaaaaaatccagtgtttttcacttggggagaaggaagctagtagctggtggctgttatttttaattggcttagctttatttggcaacttttttgagttccagagtagggggagagaaggtaagaagagaagcctgtatatatttttgtttcctctcttccactcggttaccctcttctcccctccagcccccacataggatcaattaaggctaggtgtgctgtgaagggcttccttttacctccacatcacccctggctccccaccttgggactggagcaattttattccctaatttccctgcacttgcgttaaccaaactgtgagctgagcaggagctgaaaaggagagagactattgcaaccataagttatctgtgagcccccagtgctcccctgtccataagctggagttgataaatggttgcaattgcattgcgtgtgaattggagtgtgctggctgtttgtggctctaagtgcagacccatattcgtggtgtgtggtggtggcagggggggagatttctacgcagacacacatgcctgctgccatgtggtctagagacacaagcttgtttgtgatcaaggcaggggatattgggactggactgaagggctgagaggtctcttggggtgaagtgacaccccaaatgcagtgactgaacagacatctcacttccccacccaactcctcctctcacctcctagagccaggacccttcaggtcagccacccacccctagtcagcctgggagtgctgctggtgggacttcaaccatgctgaactctgacctgagtcctaagcagtttggacccaagtagagaaaaattgagagggaacttgatgtaggcagagctttggaagtgctgaggaagcctgggcccacgtttggctccatcctttccacacagcctctcacctggaggtgtctatagcaatggctggcccatctgtgacacccttcctgggagcttgaagacccaggtggcctcttctccagtgcaagatggggagtggagaccaagggagtgccctcttgatctggggcccttcacccccttcctttctttgattctatcgctgcttctctttcagccaacccctccgccaactggctgcacgctcgctcttcccggaaaaagcgctgtccctacaccaaataccagacgctggagctagagaaggagtttctgttcaatatgtacctcaccagggaccgtaggcacgaagtggccagactcctcaatctgagtgagagacaagtcaaaatctggtttcagaaccggcggatgaaaatgaagaaaatgaataaggagcagggcaaagagtaaagattaaagattacccccagtcctccctagctcttccccatctcactcttagttatgtgacgactgcaaagccagtgctgtctgggatgtattcaagtgaatggggaagggagtctctcttccaagtcctttatctgcacctagaacctccctcctttcctttgcccttacctgtctctctcttctctctaggtgtcaggagaaagttttgttgatttagaagatagaaatagttggttcctaagaatgtgatgggccacaaggaaagagagaccccagtcaagctcctagtatgccctgtaatttttctgggaagtcctagcccctcacttccagcttgcctgtttcttctctacacccacccaaaagtcacccagggacactccaactctacacagctcagcagacatccacacacagtaatggggtgagctcacaaccaccattcagtcaagtgaggtgacactccagttgcagaccatcgcacaccaaatttggcaaaacagccctcagactgtcaggcaagcccgggttctacccctaatgcaaatacccaccagggagatgtctagaggcagactcctgagtgaggagttgcagcccaaaggctgcagcattgccataccattcccatggagttgccaactattctcaggccaagggccatggggaagatggagcaaacctagcccccaagccggtgggctagaaagtacaagaaaaggcagcacgtggttttatgaaggtatcttaggtggagctactccccacctcccaccaacatatacattttgttgcaggaaatgtttaattccgcatgatgtttccctctccttccaacaaaagaaggtcaaactgtgggtcgtagagccttgacaatgttgtcctcctgttcatctgtgcaccacttgacagactgtagcttctcttgctctcgaccggccctgcattcttccgcaccctccctagctctgaaatcaactctcttcggtcgtatccaccttgcacccgcaagtcaagccgccccttgtagaaaaatccctccaccttccgttccccgctaggtcaaccccactgtagacaggaaagccaggccaggagagtccgaatgagaatttattgtgaatcgattcccaagctcccttccgggacaagtggtctgggacagggaggagcaacggccccagcgcgcaacgctctgcgcgttcctccgaatcccgtcggcttctcgacccacgcagagaagccccgggcttggcggctctagccccagcgccaaaggagacccgccccagggccgggcttggcctcctgcttcatgggcctggatgcagatctgcgtggctggtgcgtgcgcgcgcttctgggaaacagtcccgcgtgcaaaggaaaggggcaaaatggcacctaagcatcagatggaagcttactctctgcttccgttcctccccctgctcccctacttctcagtccccttcaatttgtagactcttgctcctgcttctcctgatcctgcaaggggacattccagtagaagttttttgctttgtcggtggctgtcgtgaaattgtgcttgtgtttcgtgatttctttgggggtgattgtctcgcttgttttcagttgtcgattatatgggagggttctgggtgggagtggggagggcgaggggcctagagctctaattgtttgttttggaagaaaaaaagaaaaagaacaaaaaatatatatcactctagaaaataaa

SEQ ID NO: 5786 - DNA, 513 bp, Homo sapiens
taccctcctccaacgaaaggacgaactgatccaagagacggcgggaggcaggagaaagcggagctccgcatcaggcaggcccggacaggcaccctccaaagagggtttcattagggatgcaaaatgaatctggctttacagctggtgtagaccaggctcctgccccatcctgggctacccaggcccagccggtgctgacagcaaagacagaaggtcggtttctgcctaaagcaaacgctcagcgaggctggaacagaggggagtgctgcgtggtaggggcgagggcgcttggaggggcctctgcctgcagcgtctgggtccccagcccagggctgcttctttaaagacaaacaaaggcgaagatgcggaggctcggaagccggagatggggaaatcagttgtcataaaagagagattcagagagggacaccgccagagtgcgaggcagagagaagccgggagaggaattcaatgccttgtgcgcagcaataaaataatatgaccgctataaaa

SEQ ID NO: 5787 - DNA, 270 bp, Homo sapiens
tggacactcagtcgttttattcacctctctcctcctccctcagctactgaggggcccagggaagctcgcagtcatgtaaatctctacaaagagtgcaaggagagccccctccaaagcggacaacgtcctaaaatccccaacttttcccctcatcattttacttcatctcctgtggattgctgctgctgttgttgtttaataaacatcttttgtcaaggggaaagagaagaggaaatgagggcctgcggggtggaggtgtgtgtgggggga

SEQ ID NO: 5788 - DNA, 823 bp, Homo sapiens
ggaagattccatgtaataaagtctgaagtgtgcttaacacagtactgggaacttaagcagcactcacacttcatcctaaatacgacgaaagtcttttcaaaaaaataaaaattaatgcaatatgacttacttggaaatgtatcaaaaaataaagaccgatgaatggatcgaggcgtagtgtgacagagtaaaattttaatgataaaaagttaatggtaaaatgttcactgtaaaactttcaacttttcttcttgaaaacgtgcataatccgacgtgggaaaaaaaataacgcattgcagtcagttctggggaaacggaaagctaagttttaattttgctattgcttttgcttttttaacagaaaaggtacaaaaaagaaaaaatgggagagatgttgccgaactccgtcccgcctgtgggctgtgggccgttagcaaagctgctagcatgaaatcgtcgagcaccgcttgcgaaacgccaaatcctcgagagcgaggccggaggctgccaaacccgcgctggggaaagggccgcctccgggcgccccatcccgctgcggacggaggtgaggttggagcgagcgctggcggaagagaggctcagcgcagggggcgcagagccggcgctggccaatatgcgccgcatgtgatacctttgagggcgcggcgggggagggtagcgtcaaatttcaaaaaaaaaaaaaaaccaaacccacacagccccggcgggcgggcgcgcgcgatgggcgccctttggctgcgggagcgagtggaggatgctgggaaggaggtaaaatggccaccggcggcggcgcggaggaaga

SEQ ID NO: 5789 - DNA, 823 bp, Homo sapiens; identical to SEQ ID NO: 5788

SEQ ID NO: 5790 - DNA, 277 bp, Homo sapiens
accggccgggcgcggtggctcacgcctgtaaccccagcactttgggaggccgaggcgggcgatcacgaggtcaggagatcgagaccatcctggctaacacggtgaaatcccgtctctactaaaaatacaaaaaattagccaggcgtggtggcgggcgcctgtagtcccagctactcaggaggccgaggcaggagaatggcgtgaacccgggaggcggagcctgcagtgagccgagattgagccactgcactccagcctgggcgacagaccaagagtc

SEQ ID NO: 5791 - DNA, 277 bp, Homo sapiens; identical to SEQ ID NO: 5790

SEQ ID NO: 5792 - DNA, 2350 bp, Homo sapiens
cggccgccatggcgaccccggccaggcccggcgaggccgaggacgcggccgagcggcccctccaggatgagccggcggcggcggcggcaggcccgggcaagggtcgcttcctcgtccgcatctgtttccagggagacgagggcgcctgcccgacccgggacttcgtggtaggagcgcttatcctgcgctccatcggcatggacccgagcgacatctacgcggtcatccagatcccgggcagccgcgaattcgacgtgagcttccgctcagcggagaagctggccctgttcctacgcgtctacgaggagaagcgggagcaggaggactgctgggagaactttgtggtgctggggcggagcaagtccagcttgaagacgctcttcatcctcttccggaacgagacggtggacgtggaggacattgtgacttggctcaagcgccactgcgacgtgctggccgtgccggtgaaagtgaccgacaggtttgggatctggaccggggagtacaaatgcgagatcgagctgcgccagggggagggcggggtcaggcacttgccaggggccttcttcctgggggccgagaggggctacagctggtacaaggggcagcccaagacatgctttaaatgtggttcccggacccacatgagcggcagctgcacgcaggacaggtgcttcaggtgcggggaggaggggcacctgagcccttactgccggaagggcatcgtgtgcaacctctgtggcaagcgaggacacgcctttgcccagtgtcccaaagcagtgcacaattccgtggcagctcagctaaccggcgtggccgggcactaaacacccgcctgcctgccagggtgaacacacagccagcttatccctcttaagtgccaaaacttttttttaaaccattttttatcgtttttgaaggagatctttttaaaacctacaagagacatctctctatgccttcttaaaccgagtttactccatttcagcctgttctgaattggtgactctgtcaccaataacgactgcggagaactgtagcgtgcagatgtgttgcccctcccttttaaaattttattttcgtttttctattgggtatttgttttgtttcttgtactttttctctctctccttgcccccctcccgccctccccgccccataccttttcttcccctggattttcaccctttgggctgccttgctcatctttatgccccagcactaggtacggggcccaacacgtggtaggcactccatcagtgtttgctgaattgaaaacattgttgactgtggcttctatcagagtgtctaccttttgcagctcttcccctccctcatttaatttgctgcttttaatctacgtggtctgagaatttgtgaaaccagtgttgttagaagtgtatataatctgaatcaataagctctgaatggtggccaagggcctctcttatggcacaaagatgcatggacttcatgacagctcttttggtggctcagaagccattttttatagaatcatggaatctagaatattcctgctggaaagaacctgagagttggtttggaccaattccctggttttccagcagatgaaacaggcccaaagaggttaaatgactgggtgaaaatcacatagctgtctggtgccagagccagcctatagtagagtcccctgaccccaagcccggtgctcattccactacctctcacacttcacaacaatttcctcaacacttgagggcccagaaagtctgatctctccagaatgatcagcccagaggaatgctgagaaatcacctggaggagggagcagaaagagaaggtttttaaggaggggcttctgaatacttgggagatacggaacggaccaaggaccacactccagggtgcattcgttgctccctggggcaccacttctggattacagtgtgccaggtcctttggaggccctaccccttccccattcattgccaccagtgagaaatgggggtgcccctgtgtaaagaaacctaccaaaggtttacatttgcaccttagcctcaatagctacgaaccctagagaagcagctagctggagctcatgtgcaactcctgattctcaggagaaagatggattttaacccaaaattatgagtgagctgttaactctaaaatgtacttgggagataggccaagcgagaggtcatgggccaactaagtgttatccagtagaaaagacagtacactgcttttcttttagtgtttgcttttcctttgctatatgttttgctatttccttgtggcttagaatgtaaaattgattgttaaaagttttgttctgaataaatatttatcttttgtattgctaaaa

SEQ ID NO: 5793 - DNA, 2350 bp, Homo sapiens; identical to SEQ ID NO: 5792

SEQ ID NO: 5794 - DNA, 1719 bp, Homo sapiens
gctttgccagagaattcttagcaattcaactgtagtctaagcaataactcagggctaaattcagggaactgttagcccaatcagatatcactaaaaatgtacttcaccatctattttggagtttataattttggcatttgctaaaagtaggaaaaacagtaacatattactgtgcccagattctaataaatatagctcaattgaaaccaaaactgttacattaaacaaattacactctggcactatgctaaatcaccacagatgttttaggtgtttgatttccaagcaggatggtatatcatttgtttggttcaatatatgaggcaccatttgtagtcttttaggaaataaattagcttttatcacagatttaggaaacttgtctaaaaaaactgtgatcatcagttacagagggaaggaaacatattgaacacaaggcatcatagtagctggaggccttaaaaattatgcacgaccaaaaagaatgatttggtgagagatgtgtagctgattgacaattttagtgtgaattcatattcatttaacccagcagcaatctacataagctatgctttttcccgcctgtatttatgtttcttagcttataaagtcccaatatattatatcttttgttgctttggcagttttaatttagagctctgcgttcacagagatgccacctatagcaaaaactatctttaagaattggaaaataaaatgaatgttttagataaaatattgcaagccattatgtgtagagttaatgtatggaaatttgcatttgtttttctgaatcatggtgtacattaatcactcattgaattctatttctaagcaaataagagaatcaaacatttctaaaaggaacatatgtcttgctattaataacaaggagacaggaaaaatagtaaggtaatataagcaaaaaaagaaatgtaatgaatttagctatcctaaattggaatttttacagattgcatgcatacttagaattttaaatttttaaaagatttacaattgagtatggtacccacagagagtgagtaccaagggaaggaagacctaatacaagtgatgttgcctgataaatcacatcttgccaaaaaaaatatattttagtaaatacagttctttaggaagaaaaatgttgccctttcacactcacagtgtaaatacattcataatattccttcaatcatctaaattaccgccaggtcatgaaaggacgcgatcaatgatgacctattgcactcacaggcaacattgactcaaattttggcaatattgctatattatctagataattcttgtgatgtttttatgtcactatcaacattaaaaatattttgttaaacaactatgaaactttcaaaagtttgcatataactgtatgggcactctcatttcactgcatacatacaatactttgtatacacatacttctcgtgtggatattttataattttatttaatctaacatttaacttttaggtttttgtggtactcatctgaaaggttggcatttgttttctttttatgttatatatgtattttagatgaatcaataatgtgtattcctagaaattttttctaggcataaatagatcattttatgttggcatttaagagatatcatttttgttttattgttctgtgtaaaccatattcattgtacactgtgtgtatatttttgtttaaataaatgatttttatttttta

SEQ ID NO: 5795 - DNA, 457 bp, Homo sapiens
aaagttgataattaaagtaccagaaattttgtaagctagttgttaaacattaccattattaaatatgaaattataaaacacagtggaatacattaaaaaccaatgtaataatcaaaacataccacttcccaattattttactaccttatactatttattagtactcttgagtctatttaggtctattacatctttacagtgaaaacaggatacaatattgtgctactgtgggtctcttcctgactgcagattcagtaacatggtgttcgtagcttgaaactgtccacagtgggagtatttacaccatagaaactggctggcaaatgctacaaactagcaattttaattcctggaaaggcaattgttgagcatttaccagcacacaatgaatgccatattcttttttttttattaggaaataaattattggaggcagtataaaattatttaaaaagta

SEQ ID NO: 5796 - DNA, 95 bp, Homo sapiens
aataccctctgcaccacctgcttcaatcagctggtcctttgtgaagaacgtagagagaatgcggcataaccaccaataaaggagtcttgatttaa

SEQ ID NO: 5797 - DNA, 816 bp, Homo sapiens
ttttattttattttattttattttattttattttatttttgagacggagtctcgctgtcgcccaggctggagtgcagtggcgcaatctcggctcactgcaggctccgccccctggggttcacgccattctcctgcctcagcctcccgagtagctgggactacaggcgcccgccacctcgcctggctaattttttgtatttttagtagagacggggtttcaccgtgttagccaggatggtctcgatctcctgacctcgtgatccgcccgcctcggcctcccaaagtgctgggattacaggcgtgagccaccgcgcccggcccccaggcaattttaataataaatcttaatagatggggtaagagctgccttcatcccatacagagaatacaatggtgctagactaagtagagattttatttcagcttaaagattctgtttgatgtctgaaattacatgtttaggcggcatggggaacaggactgttctttagcatcagtttcacaattactttaatctactaggtttcattcaccttataattctgaaatttcatcagcagtgggaacagaaaaggatattcacatgccagccccaaattggctgtgattgaaactaatgatacaattacagcaatgagtgtttgcaacggttgatgatcaggtactggtgtgggatgaaatagcagataagtggtgcttgtgggtgatgtgagtctccattgatctgttgaattaggtgcctcttcctctggcatcactgacaattcttggtggggcccgaagatgggggtgggttacactctgggtcaatttctt

SEQ ID NO: 5798 - DNA, 810 bp, Homo sapiens
ttttattttattttttattttttattttttttttgagacggagtctcgctgtcgcccaggctggagtgcagtggcgcaatctcggctcactgcaggctccgccccctggggttcacgccattctcctgcctcagcctcccgagtagctgggactacaggcgcccgccacctcgcccggctaattttttgtatttttagtagagacggggtttcaccgtgttagccaggatggtctcgatctcctgacctcgtgatccgcccgcctcggcctcccaaagtgctgggattacaggcgtgagccaccgcgcccggcccccaggcaattttaataataaatcttaatagatggggtaagagctgccttcatcccatacagagaatacaatggtgctagactaagtagagattttatttcagcttaaagattctgtttgatgtctgaaattacatgtttaggcggcatggggaacaggactgttctttagcatcagtttcacaattactttaatctactaggtttcattcaccttataattctgaaatttcatcagcagtgggaacagaaaaggatattcacatgccagccccaaattggctgtgattgaaactaatgatacaattacagcaatgagtgtttgcaacggttgatgatcaggtactggtgtgggatgaaatagcagataagtggtgcttgtgggtgatgtgagtctccattgatctgttgaattaggtgcctcttcctctggcatcactgacaattcttggtggggcccgaagatgggggtgggttacactctgggtcaatttctt

SEQ ID NO: 5799 - DNA, 816 bp, Homo sapiens
ttttattttattttattttttatttttttattttttttttgagacggagtctcgctgttgcccaggttggagtgcagtggcgcgatctcggctcactgcaggctccgccccctggggttcacgccattctcctgcctcagcctcccgagtagctgggactacaggcgcccgccacctcgcccggctaattttttgtatttttagtagagacggggtttcaccgtgttagccaggatggtctcgatctcctgacctcgtgatccgcccgcctcggcctcccaaagtgctgggattacaggcgtgagccaccgcgcccggcccccaggcaattttaataataaatcttaatagatggggtaagagctgccttcatcccatacagagaatacaatggtgctagactaagtagagattttatttcagcttaaagattctgtttgatgtctgaaattacatgtttaggcggcatggggaacaggactgttctttagcatcagtttcacaattactttaatctactaggtttcattcaccttataattctgaaatttcatcagcagtgggaacagaaaaggatattcacatgccagccccaaattggctgtgattgaaactaatgatacaattacagcaatgagtgtttgcaacggttgatgatcaggtactggtgtgggatgaaatagcagataagtggtgcttgtgggtgatgtgagtctccattgatctgttgaattaggtgcctcttcctctggcatcactgacaattcttggtggggcccgaagttgggggtgggttacactctgggtcaatttctt

SEQ ID NO: 5800 - DNA, 25231 bp, Homo sapiens
gaagtatcatgtaaaagaccagaaaaccatattggacaaaaagaagctcatagcattctggttggaacgttatgctaagagggaaaatgggaaacctgtaacagtgatgtttgacctgtcagaaactggaataaatagcattgtaagcattttttcattcattccaaatcagtgtttatcatggcttcctccctttctcctgtccttgctgccaaccacatattgctgtaaaattgaggtaactaacttatattagggatttattttttcaccttgcagtgtgagtgtagtcaaacatggaatagggtttgcagagaattaaatttgtttctgtatttggcgttgaaactgtcgatttcctagaaatgttccttgtctgagacacaggatggagaggtagcatgtcgaggctggcaaggtatgaatcgatgtgataactgtgaactttgatatcaaagctaatatcctatagcacctgccccggtgtgtgccacatagtaatatattcaggaaatatcaagtaaggtaatataccatctcgaatttgttatattcataccatgttttacagttgcaagatgttcacatgagttttgcacatataacactttgtgattttattgagtgtttttgtttgcttgtttggatttgttttctatctgtttgatttggttagctttggaaaccagttttcttcaggtgattttgccaagcttgaaaaataagtaaaacctacctgtctttaatttgggtccttgtgaccttagtgatacctacaaacccttcagcagcaattgagatcacttggcacatttattctaactactgtctcttatatttaatctgtggctaattctgatagcagtaatgtcgtattcacaaacgtgctcagggcagtgttgaaatctttttggaattccatttggcaaattatgttaagaaccttaaagtgtttgtatttatattctttgcctggtaaccaacttctggaaatctattctaaagaaataatcctgagtacagaaaaagcatcatacatcaaaatattttcccagtgtcatttaaagtaatgaaaaattagaaaaaaatataaatgttcaacatgatgaaatggcaaattatggtatatctagttagttgatggagtatacatatagctatgtaaaatggtgtttttaaggaatttatagtaatattggagagaacacttttttctgagatgaaaaaagctgtatgattatacatactataatatgtatgtattctataccatggtgatacatagcccaacaaaggaaactgtagacataacacaaaaccagctagagagaactgctaacaagagctttcttgcagtggtaggaccacaaatttttttcatgtttctatttctctttttatttttcaaggatccgatgccctggagttttccaacctagtttccatgtcagtggttttaaattagagaaagtaaattattttatatccaaaatcaaaatcaatttgcctagataaataaatattccataaaaataaatcctgattcttttgtcctttggatatgatagtttcctaattattaacccagaatcatgaagaataaatgttaatatttttgttgccaagtataaggacagagaattgacttgaactgttttattttttcaagctacttatatctcaccatctttaatttgtaaataaggtgtatttgcactactaagtatttaagtcattattgttttaaaatacttgaatcttactgaataatttattttcataaatgaccctttcatgagtcacaaagaatttaagtgagcttataaacatgtcacaaagaatttaggtgagcttataaatttcaaggcaaaaaataagaaaatcatttgttagagttgggacaccagtttggctctaagctttcagctgcctgcctgaaagaaatgcaatcatttaaaattattcagcggccatccttcacaaccagtgtcttagaagtatatccattcctaatacttgaactagaaagtctttcatgggtcctcaaaaggacgttttacaagataataacagcctcctcgaaaacatccttatagaatgctgagcaatagggttgatggagctatttcttgtagtccccattaatagaatacaccagtgacatcttatcatatccacttgaattagcagtaactcacgattttacgaagaaggatattcaattaaataaatgatagaaacaagaatgttattccaagactatttagacaaagtctctgggggccataaattctagactaggtaaccacatttttatataactggttcttttcagctattttctttgactgttacttaactgccaattatgaaaactccatgcacagtggctataatgattagttacaaaggtattattatatatatatatacacacaaaggtattttatatatatatattatatacatacacacacacacacacacacacacacacacacacacacacaaaggtattattatatatatacccataacaaatacttaagatagttaaggatgcttacttttagtttactgcaattaaagatgctgcaactaacattccagggatgaatttatagacacttatctctaggaaaacccacctttccagtaattgtgatggatttcagtttgcttggttgtatctttcatcccacagtctttataagatggccaatcagaattagtgaatcagtatgtggccatggagtgaaatgactcatggaaataaccttaatgacctaatttcctgttgctgtgctcaaagcagtagaaccaaccagatagctatgtttgtagtctcccagaaatcagaatcagtgaacaacactggaatataaactaaaaaactaattctaggtctctaaataaaatttaaaaagccagaaatggagtagatacagcaggccaatgtgattagattaagtattgtgtttaaaaaaggttgataaaatatattttattgacactattatgtggtgtaaaaattaggattaaaaagcaaatatatgagaatttacatacatgtgtattattatcccaagtagtctgattataaactgtatacttgtttcaataattctttagttattcaacagatttttagaatttctctatggagattgcttttagatccattttatgccctgttgccttagtagcctgaagtgtgtaactagtttgaggtaatgtgaataattttaaaacatcactaagcatctggtttcttcaagtcagttttagggctgattattataaatagcttaatgacctaaaaccttaatccttgagaatatagatatttacatatgagcttactttttaaagaatttaataattgtctcacttgtatttaataatttatcacctttagaaatgtgcaattttaagttctctaatgtggacagtcttaaagatttaatctttattttaggacatggactttgtacgctttatcatcaactgctttaaggtttattaccctaaatacctctgtaagtaacttactcctttataaaaaatataacatattgaaactgtagacaatgtctgagaattgtggagccttatgttattatagactttcatacctgaaactttgttttctgatgaagaattttaaatgtgttcatagacattattgtaacacatacagaggaaagtttttcataagtattcattgtccttcacagttaattttaagagtttaagttctaaactatatatatggcatcctataacacacacacccactcacacacataggtacataaaagcatacatttatttcaaaattatctcatttttactaatatttcaatttagaaattcatttcaaatagtatttattatatgaaacttcttgcatacaagaacagataagcagtattgatagagtacactgtataataagcaatattgatatataaagtacactgttaccaactgctacttaaaaattgtcattaagaaaatacttgactagaaggtactacatttgaatctggcatttggagtttgtttgttttttattgtgactattccattaattacctgaatgaagaactcctaaaccttatatagtccattttttacttgttgaatttgtatgatgggttcaccctagggaagccgagatgccaactcacataaacagtcaagtatatttaaccccaatggtttaaaagtgaaaagacagcagagaggcaacagggatgtcagaaaatgggaatttacagatctgcctgagcgtactcctagaaaacagcaaattgggtcttttgggactcgtgactcaggtgactttagcataaaatccctaaattatcttaatttggcatgttaattttattgttaatgtgaagtgaggaatagacaaaaagcataatggatatcaagagtcagtgccacccctagctgtatactctcatcttttcagagagagtattcatgaatatttttaggtaaaaagaatgatcaatagtgtccagtttggggaacctgtactatcttctgttccttatggatttttcctgtatctggcatgtaccctgattccttaaggcctccagagcagtgccagtcattggtcagtagggaatcactaccccatagttttagtttgttgctcttatggacaaaatgaaaaaatatccacttgatcattgaaatatctaaaggagtttgtgaagagccacttatcagtagtataaatattattattactttgtaaaatacatctgagattcttttgagagaactattaaaaagttaatagatctatataaagatgagttgtaatactattcatcttaactagagattttatatatatatatatacacacacacatatatatatattctacctacataatatagttttgcagacattgaatttcgtggaatcttaattgattatgcttcaaaatctgtcatgaagaataactattatatcttaaaatcttgagtccacattattttaagcatatcccagacgaagactgaggtattaagcaccagggtgcctctttacagatgcctttttccttatatgtactttacttgtcctacattaatgcaacaactctaagaggttctctgctcagagaagagtgaaattacattttgattcctctggaatagaggaatgaattgaatctcaaaaatcttctttgcagtttctggttctttctcacagttgtctcagttgttaatagggctgtttagtatcttcaactcagtgtgtaaataatacttatgcatactttggaattattagcttcctggagctcatgatataaagtagaaataatttttgtttctgaaaacgtagtgatgtattaaaaggggagggggcaactgtgagactggtttaacaatagaatctctagaaaattgtaattgaaaccataaattagacctggaaatgattttaaagttcagtggcttcagcactactttgacatgccacatccaaaaactccatttatccacttaactgttttcttttgtacctccctgcaaacaacaaaagcagtgagtgacaaaagaataggctgtttaccagaggacagtgacagtgcactattgatttcccacaagtcttcctcctgggctggcacctcaccattgtgacatgctagttcagttccagcaccacatggaatactattcatgatactatacacttcactgaattagagctcagacaacaagctcagtttttacttaaatttagatgaccagttttttctaggctggtatgagtgatattattatagaggtactgattcacattcaatgaattttttttcatctttcagcaaaaatagtgatctttgatatgccttggttaatgaatggtgagtatatttatactttcttaaaacaaaatgtctaatttcctttactttgccgatttagccatatttctacaattgtttaaaataatgtttatattgtcctttgcatgctctcttaagagactggagctagaacactcaaaggctattcctaagcaaacagggctaaaattttatacccaggatctgggggcacccattagtcttctttaaaaacagccttgccaggcatggtgttgcacggctatagtcctagctactcaggaggctgaggcaggaggatcacttgaacccatgagtttgaggccagcctgggcaacataatgatacccatctcttaaaaaaaaaaaaaaattaacaacagcctcaaatattcaaccattaaggtaatactctagtcagaagcctcaatttgtcatgcacagataaggtatgtcacagaacacaggccttgtctaggtttctcatgggcttcaggtgttgagaaagaaggtggaatcagtctgaaactcaccccaaatcactgtagtgacatgacccttttgacagtcatgatatattttttggtaaaatttttttgaaaaagccattgattgataaactgtcttgaccaactttaaaattactgtaaattgaatgttattttcagaatgtacattctcatttgtgtttgcaaaagtcagttgttacatagaaagcaatagagaaaatcaacaaatccaaaatttggttctttggaaaatgcaacacaattgacaaacctttagctaataaagaagaaaaggaaagactcaaagtattaaaatctgtaatgaaagaagggacattactattgaccttaaagaaataaaaaggactatagggagatactgtgaatgattatatgcaaagaaattagataacctacatgaagtgaacaaattcttagaaagacacaaactactgaaactaattcaagaagaatcagaatagaaatataaaaaaggaagttgaattagtaatcaaaaaaaacttcccacgaagaaaagcccaggcccagatggcttcactggtaaattatgtgaaatatttaaagaagaatcaacatgaatccttcacaaattcttccaagaaatagaagaagagggaatactttccaacttattttatgaggcaagtataaccataataccaaacatcacaggaaaagaaaactacagactggtattccttatgaaaatagatgcaacagccctcaacgaagtactagcaaattgaatccagcagcatataaaaaggattatacaccatgaccaagtgggctcaacatatgaaaatcaactaatgtaatctaccatattaatataatgaaggggaaaattatgtgatcatctcaagagacacagaaaaagcatttgacaaaatctagtaccttctcatgataaaagtactcaacaaactagcaacgtaaggtgcaaagagttgaaacaactaccaagttagaccacagtagtccacacaagaccacccccatttctgacacaaactgcaagttcaggaggtgctcaaaattgcccttaggtttgataagtctagtgaaggactctgagaactcactgaaaactattatactcacaattatggtttattacagggaaagaatttagattaaggtcaaccacagaaagtaaggtgtagggcagagtccaaggaagtaccaaatgttgagcatattacttcactggcatcaatgtgtggcaatgtgcatggagttagtcaacctgggaagctcacccaagcctcagtgttcagagtttttattggaactccattatgtaagcatgattgattgcccatgtggttgatcttagtcttcagtctcccccaaggtctactgatactgtgtaacccaaacgcctaccctgaatcacactgttggtctttcttctatggccagttcctaccctaagtcatattgtcccattgtcacttaaggcccccagacaaacaaagacaatcctatcaggcatgaagattacctctcagaagctgagggcaaagtgcagatctctctttgggtaaggctaatccttcacagaaaagaacttcctccacctgtttataaagggcatatatgaaaaacctgaatctatgaaaacccacagctaacatcttacttagcagggaaagaatggatgcttcccccctaagatcagtaacaagacaacactgtctctcttaccacttctattaataaaagaagttcaagacaaggacacggaaaattacaaaaccccattttagtaaattcaagccttacataaatgaaaagacatgttgttcatggattggaagacttaatacagtctttcttcagtatccatgggggactggttccagaacccctcccccaccaccaccacagactccaaaatccttggatgctcaagtccctcatataaaatcgtatagtatttgcatgtaactgacacacgtcttcctgtatacctttttttttgtttgttttttgagatgagtctcattctgtcacctaggctggagtacattatcacaatctcagctcactgcatcctctgcctcccaggttcaaacgattctcctgcctcagcctcccaagtagctgggactataggcacctaccaccacacctggctaatttttatatttttagtagacacaaggtttcaccacatttgccaggctggtctagtcttgaacctcaagtgctctgcctgccccgccctcccaaagtgctaggattacaggcataagtcatcatacctggcccctcctatatactttaaatcatctttagattatttataatacctaacacagtgtgagtgctatatagttgttctactctattgtttcttatttatatttttgtcgtattggttttatttattttttaatattttcaattgtggttggtgaatcaaaaatccatggatgtgaaacctgtggatatggagggccgactgtattgttaagaggtcaacacttcccaaattgatctactgattcagtgcagtccctatcaaaagcccagctgccttttttgcagaaatggatatgtttgtcccaaaattcatatgaaaatgcaagaaaccaagagtagtcaaatcttgaaatagaaacacagagttggaggacttaacacttcctgatttcaaaatttactacaaagctacagcaatcaagacattgggcatgtatgggcataaggataaacgtatagatcagtgaaatcgaattgagggtccagatataaaccctaatgtttattatggtcagttgatttttttttacaatggtgccaagactattcagtagagaaataaggctttttaaataaaaggtgctaggacaactgggtatccacattcaaaggaatgaagttggaccccaccttacatcatatataaaaattaattcaaaatgaatcagaaacctaaatgtaagagctaaatctcttagaagaaacacaggattaaatccttgtgcttggattgggcaatggtttcttagatatgacaacaaaagcacaagcaacaaaataaacagataacattggactgcattaaaattgaaaacttgtgccttcaaggacactaccaagtaggtgaaaagacaattctcagaatggaagaaatcatttacaaaccatacattttataagggacttattctagaatatataaagaactcttacaatgcaatgttaaaaagacaagtggctgggcatggtgactcacgcctgtaatcctagcactttgggaggccgaggtgggcagatcacctgaggtcagaagttggagaccaacctggctaacatggtaaaaccccatcttgactaaaaatagaaaattagccaagcatggtggcacacgcctgtaatcccagctacttgggaagctgaggcaggagaatcgcttgaacccaggaggcagaggttgcagtgagccaagattgcgccattgctctccaacctgggcaacaagagtgaaactctgtctcaaaaaaaaacaagtaacccaattaaacgagtgaaatatttgaatagatgtttttctaaagaagataaacaaatgggcaataagcacataaagagatgctgagcatcagtagtcattagagaaatgcaagtcaaaaccaagtgaggtgtgatttcacacctactagggtggctagaataaaaaagacataataacaggtattggcaaggatatggagacattggaagcctcatacactgctggtgagaatgttaagatggtctggccacatcagaaaacagttcggtagctaaacatagaattaccatatgacccaaaattccactccttagtatatgcccaagagaagtgacaacgtatgtctacagaaaaacttgtacacaaatgttcatggcagcattattcataataacaaaaagtggaaacagcctaaatattcatcagttgctgaatggaaaagcaaatattgcatatctataaaatggacaattattcagtcataaaagggaattaagtactgatacatgctacattatgaatgaaacttgaaaatgtgccaagtgaacaaagccagtagaaaaagccatgttgtatggtttcatttatataaaatgtccaaaataagcaaatccatgaagacagaaaatagattagtagttgctaaggacttggagaaggaggcctaaagagagattgctatatgaaggttctttttggtgtgatgaaaatgttctagattagattgtggtggtggtgatggtggttgcacaattctgtgaatatactaacaaccattgacttgtataaaggggggattttatggcatgtaaattatatctcaataaagttatgaaaaatcagatttatcagattaaagtagcatagtttcaaacatgtcaactcacattttaaattgaaattaatgaaaatttaaatgttatgtaaaaaacttatagttagctaaaataaaaagatacttctccgaaccatttaatgtttatcatactgttcttagtttctgtttttttaattgacagttttgcaaatttaatgcagtatttctcttttaatttcttaaaaatgtacttagattgtcacagtgaaaatgaggtttaaaaattaagcataaataagaaatgacatgacagaacaagattgtaattaccaaacagctgtgtttgataacagaacagggcagttcgtgccactgcactccagcctgggtgacagagtgagactctgtctcaaaaaaaatttaaaaaccagtttatttttgagatttcgtaagtttcccacaattatataaactgcaaggcctgggagagaggcagagaagtgtagggttagaaaggaaggctggatccagctcacactcataataagaagggctatttctttctttcttttctgactcgctgtttgagaaggtttttcagatagagagtttatcagaaccataaggtaaatgactctttccatactattgtgcagttatttcctgaatcatattgctgtttgattcagtgtctggaaatctaaatagttgggatcattgatggatttgttcagaggccaaaaccctgataagtttattaatgaacatcagggtaatttaatcttcctgaatcttcatggaacatttgaaacccataagggagagccacaatgtaaacgcctacagaaattagagaatgttaattaagtacatcacgtaaagataaatattaacagattatagcccaaactgatttcagaagacctgggttagcatttatggtaaattaattgagactaggaatgatgagaattttaatgaagtgactggtttttcttcagctgctttcaaaattgtgaaaacctggcttggtccagaagcagtgagcttgttgaagtttacaagcaaaaatgaagtccaggactatgtcagtgtagaatacctgcctccccacatgggtggaactgtaagtatttgaaacttgtttataaaacaatactggataatggcacattaggctgtatactttcctcaagggaaaaagaaaagtagtaccataatatgcaaagaaatatcacagatacccccaaaatagcaagtagtgttacacacatttttaaagttttaaagttaattttttattttttaataggtaatatatttatgtggttctaaactgaagagtattcagaagaataatgagaaataagtcttcagtaaaaatatcacctcctacttctgtttccaaccaccatattccctccccagctgaatttcttgtattaatttgcagggatatgtattacccatataaacaagtatagtatataatttttcctccctctcatctcttctaaagtcagtgtatttatgtgctagtgtgcatcctgcttttctcttcacagtacgtcttattccaaatcaatatgtagcaggctctcatactcatttatggctgcatagtattctactatctagacataagttagtgaatttcctcttgatgtgtctttagtgtgcttccaattgtttgctgttcaacagtctttttagttaaaaagatactattaagcatatactatccagatttttttgagctgatttttactacttataaaaaaactgtacaacttatggacttggtacgctttgggttaacttcataatgtttcacttatttgatttttttgcaatctattttttatactgcctgcctggcaaaattgtattcaatcagaactagcaagaggaatagtttcgatatgtccttctgtttattgtctttgattagaaaagacctgaacaaatatttttaatttgaagtctgcttctttcttattctaaggctttatatttcacattttcacctagaaaaaccaaatatacttcatttcaggtgctatgcttgatttaaaatgtgattttatttatttttaataatttgctcataaaattgttatatcttaaataattataattaatataattcataacattttaaataatgttaattttatgtatagaaacggttattttatttcccctctctgtccttagtgatatgtttcttcagaattacagtcaaaattatagtaggactactattttttaacattaatttttaagtattttttttcaaaaaataatacatatacatgattttttaataaagtaaatacaataccagagattgaaaagtataacagtaccatgaaaactacatctgccttcccaggtccatgcccactgccactccctaaaggcagtcaccatcaagttttctatccctctggagttatctattacagttttttacacaatggtcacataccatatatattgtccatttgtacttttttcacatcttttattttgcaggttacaccatattgattcacagaggtctatctcatttttaaaccaaaatattccactgtatggacgggtataacataattgatttaatcactcttcttttaaagggctgcactgatagttgtattctaattttttgccattactagttttgctgcagtgaatatccttgtaataattcttaatatatgtgtgcagcgagaatgcatacagaataaactcctagaaaaaaatctgtgagtatagtttttaatttagatagctgttgccaaatttcctctaaagagattgtgcccatttaccaataatgtgtgagaattcttgaaccacctccttgccagcatcgcatattctcatttttgtagtcattgccagtctcaggtaaaaaatatttcactgtcattttaatttgcatttctttaattataggtgatgttgaaaactttcttatgattcaaaagacaattttcattctttttcagtgtattctgtatccctcttctgtattgttacagaacttatatagttctttaaaaatacacacacacacacacacacacacacacaaacaacatatacatttaaagcttttatccatctgaaattctttttggtgtagagagcgagctaaagatctaaggtgattctgtatagatggctagccaattgtcccacaccacttattgctctttttctttctggtttgaaatgcttcctttattttaaatttcatgatctaattaagtctgttttcttggccaaagtaatgaattgtaaatctactaagagagttatttctctacccaccatttagtaggctcatgtgaaattattttcttgtaggatcctttcaagtatagctatccaccactagtagatgatgacttccagaccccactgtgtgagaatgggcctattaccagtgaggatgaaacttcaagtaaagaagacatagaaagtgatggcaaagaaacattggaaacaatttctaatgaagaacaaacacctcttcttaaaaaggtaactttataaataaaatgaaactgaatcacaagatgtggtctatccccaattctgacactagccagctgtgtgattttgggtaattcacttaacctgctacccttccacatttttgtgtgtaaaaagaaagaggaaggatgggattagctgaccagaagcaccactttagtgtatttaagtctgattccaggccagggcctgtgtcttatacctgtaatcctagcactttctgaggctgaggtggaaggatcgcttgagcaccggagtttgagaccatcccgagcaacatagggaggccctgtctctacaaaaaataaaaaattagccagatgtgatggtgcacacctgtcatcccagctactctggaggctgagttgggaagatcgcttgagcccaggaggtcgaggctgtactgagccatgattgtgccactgcactctgacctgggtgacagagtgagactttgtctcaaaataaaataaaggctgattccatgcttttgtataaagactagcaaaacacatctagaagtaattgttttatctaaaatttttttatttgtctaaaagtaattaatttaaaactttgatttagttcctttctctaatttttaaaagagcacttagtagttgtcactttttacaagtaatcaggaacttgatagatggataaatacaatgttataatttagaaaaatttaaagactcttaagggaaggaccatattgtattttctagagtaacctatgttatgtataatagtaggcactaaaatagatgttaatggtcatgttaatatatgctaaatagttatcctttttttttgtctttagattaacccaaccgaatctacttccaaagcagaagaaaatgaaaaagttgattcaaaagtgaaagctttcaagaaaccattgagtgtatttaaaggccccttactacacatcaggtaatcgtcaaagattttattagctataattttataacatatcttgatcaccttgagggagccacaaaattaagaaaacttctatttggtttttgaaactgtagaaatataaaaccaagagttatctgaagacttaccttggtttccagacgtagtgcatatgtttagctaccttgctttcttctattatgttgagtgtctttaaagggttctcatcacacatcagataataaaactaaatatttatatattaataaatctgaatggcatgtattttcctcacattactgatactattagacttgcccaagtttgggaatgccagaaatgacactaaagtaaggatttgttgattttactttccagaagccaaagatgaactggaaaaataggtttgtgactaaagccaaacttcaggacatctctatttttctgctaggttatttgattcaaaagattccaggttgtttctttcagcattgtataaagacctttttctcactgatgatgtttttggttggtaaatatattttgccttacgttacattgctacaccaactttatgatctcatgtagcattttctgtccctttacttgaaacctttctgtatagctatgttttatgtatatctcttatgaacaatatagccagacttttaaaaaatctaatctgacattctctaattgatagtattagcttgtttacatatattttgattactgttatatttggatttatctccgccatctatatgtatgaaagacagcaagcaagagagacatagatgcgcatgcattttctgtttttcatggtttttctttcccattttccccctttggagtttatcttttttgtttgtttacttgttcccatttttctccctacttatttggaagttacacattctgttttcactgtaaacctgttacatcataggtccttgcctgtaattgtagaggtatgacaggaaaagcaggctagggagaaagccagacagcttttcacctgcacattgggctctgctcctcccttcctccgcccccggtgaagtcccagagctgctcctacacagacacaaggacctaaccaacctctgtcttcctggagctgctcacagttgttgtgctggttactaagaacaatgagatccataaccttgtggttttctatgacttacttaagattaggctctagaagaaagccagcaaccatgcaaatttaccaccttatccaaaactaggcaaagcccttctgggagagctcattcttaaaaacatgtgttagttagattaaaaaacactcccaaggtacagacattcctgatataaaattaacctatttaaagatgtatctcaaaatcaacggcttgctgaaaattcactttagttaaattattcacctttttatataaaacaaaaacactattcttcccattgttttgagccacctgatacaatttggctaatgtaactaaactacacaaactgcttgaatcttttaaatttttttttaggtcataggcattacaatggaaagtaatagtaaaatttaaatattgaagctcattgattttactatttgattagttcttcctacagctcccatcccaaacttacttttatgtttacttttctccttccctattacttagaaaagctgctatatagtaagaaattattctgttaaatacattcctaatcatctttctttttaagttatgctcttttctgttggtgtatagaaatatgcctcattctaattatttgtaattaggtaaagttgaagcagcaatatcttctttgctttattatctataaccttccaaatagtttaaataagcgcaccttaagatagtgctgattataggattaatcagagccttcataactctctcttctgttcttcctggtttgcttttgatcttggggaaaaccgtaggactttttaaatagtgtgcattgaatcagtaagattaaaatacaaaattgtattaggtaattgttttgtaagtcttttttggtgaaatgtctttatacaaatgagcataagatattaactaaatatttttcttcaagctaaatgattagattgtcatttattctgattattacaaatgtcttatgtttttgtcactccctagcccagcagaagaactgtactttggaagtacagaatccggagagaagaaaaccttaatagtgttgacaaatgtaactaaaaatatagtggcatttaaggtaaatatcttaaagatacaataaattatgtttgagaatttgacatgggaagtgattttagacatattctaattgaaagattgaaaattttgaacttgtacagtgtttttatttatgacaatttttaggcatgttgtactaccttctggttctaaccaagtcgcatagctttatcaaaaaattttccctgaggtctgtatctgaatcttttacgtgcagtaataggttaatgtctaagttaatacaagggtttaatgtttgttgtaaataacaacccaagaaaaattactctttactatgtgaataatttaatttataataacagtgaaacataaaactataaaattgatagtgcattttccccaagtgtggtatattctggagtgtagtttatatcggatattaacctgatactgagcattaagtgtaacaagactaagtccgtcactaccccgtattgtaggttttcctgccttaaatcttctatttaatttagatgtaactaccaggatgttcctgatgtgctttgattatctactgttttttaatttctgaacaccatggtattaataacatgcaatctaatgtgcattctgtttttgtgaatttatgtcattaaattcaggcaattaacaggataaatatttaacagatggattgttttatttaagagggagtctgaatgacaatttgacttatatatgagtatgtttttagataggttgagatgcttttttcctgttagtggggaaaaaataccttctatgcataatcgtcaatgttactttgtaaactctttgttcattgattattcactgctaattttttttttagggagatatacctaatgctaaatgacgagttaatgggtgcagcacaccaacatggcacatgtatacatatgtaacaaacctgcacgttgtgcacatgtaccctaaaacttaaagtataataaaaataaaaaaaataaaaataaaaataaaaataaatttttttaaagtcattcttaagccatttccccccaaaaaagcataaaggttgttatgtgactactgtgtttataaataggtgagaacaacagctccagaaaaatacagagtcaagccaagcaatagcagctgtgacccgggtgcatcagtggatatagttgtgtctccccatgggggtgagttgtcacttagtagccacagcaggtgttgggtgtggtgggggtaaggggacctggaccttggctctgagtcagcagagatgtcaggctagaatctagaaattagcagagtatcacgagtcacctcacctcgctgtagacatcttttttcccacatgtgaaatggggtggtcaaagaggtctctaaagccctttccagcattaaaatgtattgtttctaacaagtaaaattgtttaaactgacaccaattgaaattgaatttcaaaagagaaatttcctcacttttagaactttttcctttttaaagacatttccattttcttctttttccttaatgttgagttccagaataatgctttaaaccacatgcatatccaaccgctttgaaggttcctgtttatatgctgaattacccttttggaatgcaggtttaacagtctctgcccaagaccgttttctgataatggctgcagaaatggaacagtcatctggcacaggcccagcagaattaactcagttttggaaagaagttcccagaaacaaagtgatggaacataggtaagcttttccctcacattcttctcaaatgtagtgggaagaatcagaaagagaaaagtgcctccatggaccaggtggcctccctttcttcttgcatctgctgggtgccctgcaaggctctggggatgcccagatgaaagagacctggtgttgctcaaggaggtcactgatagcagaaactcatttgcaggccagtgcaagagtctggatctgtccagatcacaaacacagattgtctcagcagttctccctgtaggagtgcttaccttacatactagaatgttttttgcagcattgtttgtaatagtgaaaaactggaaagaaagaatctaaatcgtaaccagtaaagcaatagtgagatacatttgagtatatccacactaaagtgtgctgcaaccactcataaaggtacagcaagtctatttgttctgacatggaaagacatctgtgatatattttagaaaacaaatctagtgagaaaaattggttatggacattattctatttaagagggggaaaaacttgcatatatagatatatacatgtatgtgcatgtatatagatatatcaggttgtgacaaatttcttgaaaagatatgtagaaaaggagaatagaaggggctgtattgtagttttgctttttttaaattggaattatggtttattggagtgttcacatttttccccccaggggacatttgtcaatgtctggagacacttttggttgtcacaactgggggatggggtacagtgggcatctaatgggggcagcatagggatgctgctaaaccactagcagtacacaggacagccccatcccccaaaaatgatctggccccaaatgcccatagtgtcgaggtggagaaatcctgctttatagggtagttaaggatggccactccgatgacattagagtaggccctgaaggaaatgagagagcaagccacatagataactggacagagacctttccagacagaacaacaaatgcaaaaggagtgtgcttggcctttgggaggaacaacaaggaagtcactgtctcttgactccagtaagggaggagcatggtgagagatggggacagagatagtaggatatcagatcatccctatggtgaggacttctgagcgagaggaaaaactattagttggcactaagcagagccatgaggtgatccgggcttatttttttaaaggattcttctgggtactgtgtagaaactagacggtgggcagtgataccaagttcacactaaagtggaatttgctgtatgccagcactgttctagatgctttagacatattgattcattcagtcatgaagacagccctgtgagggagaaaggcatttttcctactttatagagaagctgggaaacctgataatggctatggttgaatgaaaccttcagggctgggcgcagtggctcacacctgtaatcccaacactttgcgaggctgaggtgggaggactgcttgagcccaggagtccaagaccacccttggcaacatagggaaactttctttctacaaaaaatcaaaagcttagctgatagatcatgaaaatagattatgaacagtgaaattcctgagaaggctgaaagtgcggggaaccaaagcaggggagattagccttagtccggaggagggagaagcagatggaagtcagcagcctgccttgtttttacgtgtaatatttaaattttcaaattgtattacaggagggcctactttctgtttttatcaagagtttttcttttgttcaaagacactggttatgggaatattttgaaagggtaagaaacgctggtataaaaggtgttgcagattaatttgaagttcttacgaaacagtccctcaaaatgaagggttatttttggttttgttatgttcgagttgctttgttttctttgttttttgctttaccaattactgatggcttgcttttctataactgtgagaggagatcactgttctcctgcagaaagtgggagggaggcttgatggtggggtactgaagctcaaggaaagtacctttctcctatctagaaagggtgatttccttcaaatcataagatatttggatgaattctactgaataccatataaacactttcatttgaattttaccgaatggtatctgcaatatgttgtgttccttatacatgcattaattaacgaagctggaagatacatatacacagagcaactgtcttaggtgaacctggggaagaggaatgaggacttttacctctgttacatagacttctgtgtataactgttttcattttatattttacttttataagaaaattaactttttaagaagttatgttttctttggattttaataggttaagatgccatactgttgaaagcagtaaaccaaacactcttacgttaaaagacaatgctttcaatatgtcagataaaaccagtgaagatatatgtctacaagtaagtatactttcttcctacccaaacaaagttgttaatgctgatcaacattagaaatccctttttttctcacggacataaagaaaaacatttggcatagacacgatagaaatactgtcttctttgtgaagagatgccaaatcagaaatggtaagcaggccaagtgtggtgctgcctgtaatcccggcactttgggaggccgaggcaggaggatcacttgagcccaggagtttgaggccagtctgggcaatatagcgagaccctgtctgtacaaaaaaattaaaaatgagccagttgtggtggcacacatctatagtcccagctgaggcaggaggattgcttgaccctgggaggtcaaggctgcagtgaaccatgatcatgccactgcactccagcctgggcaacagaacaagaccatttctcaataaaaaaagaaaagaaatggtgtaagcagtgagttatttttggagatctactaaccatttgaaagctctggccatttttagcaaagcacaaggtactttggggagtatcaaataattcagtcttgcagaaaaaagtaccaattagtgcatttaaatttgaaagagacagaggggctctctgagtagctgaaggctgcttaagggtttctgtacctctaggaactgactgctctgctcctgtctcaactagaaattcagacctctcaaaatgagaataagcatagacatatctgtccaccaaacaaatctaatgccctgttgcacttccacctccttccaccagccttacagagtagtgggccccatcctttcagtgtttggatttctagtattcctgtttgtcatgcccatgattaatggctgttttattgatataaatctttcatcccctcttccctcttcagctcagtcgtttactagaaagcaataggaagcttgaagaccaagttcagcgttgtatctggttccagcagctgctgctttccttaacaatgctcttgcttgcttttgtcacctctttcttctatttattgtacagttaaagaagtggtgccgggtaggaaccacggttccttcgtccattagttggaaaaagtaacagacctaaaactctaccaagctactaaaaacattgcacatctgtgcttcctaaaaggaaatatgcagcacgtggaggggaacacatacatgtcttgaaaataaactgctagaataaagaaatgctggagaaattgattataagagactatagctatttagtaaagtaagtaaaggcatatccattgtgtaaattaatagtttaaatataatttattttttccttttgatctgaatacttttaaagcttaagttttatcgtgtaaatacattagctaaactgaaaagtataagtaacatgctttgttgcagccaaaaaatgtaatctgcttttttatgacagaattattatagctgagctgacttactagcttttctatactatgtatatagaagaacatgtatattgagaaagaaaacatacttatatagaggaatttatgtaaccatgactttgtaattttgagaattcctcccagtgatggtcagtattcttttggaatgtaaaccgatttaatgccaaaccaccttaacctttgtttctcagtgttccttaacagcctgccttttattaatctcaggcttttttatgaacactctcatttcagtagaatttggaaaactaagcgtggttggaatttctttgaattctgttagtaatgcccaaaagaaaagtctcaagcagtccccctatccagtcatttttatggagtttcatgttgtccactatagctggacactgaaccttttgcctaatttattataaaggcctgaccctctattgtcccatcttcacccccattccagagcagaggagtctctgtggaccatgaattgcactgtctccctcctcatttctaaatgaaaggtattagatataaatttttttgaaaggttagttgtttgagatgctaagcaggataataaatttagattttaaaatgttccctgtaaaagtcagcccatgacaaggaaatttacaaaatactagagtatctagaagggtgaaaacaaaaaaaaataaaaagaaacacagacgcccaggtgtcagctctccgtttaaagaatgaaaaatgtaactcatgatgatctgtgaaaccttcaaactaggaccaattgacttacttgatattctgcctttgatatggtagtacccacccggtattcctaaaatcctaaaaagatacaccttgcagtagcagaggcaatgacatgagtttgttttctcattaatatgaccagtttgggtctatgttggttcacatgtacatctactttatatgaaagaaaaaacagttgtctgcctgtaaaatgttgagtttcgattgagccatgtttggagattttattactattctgaagggtagtgttgttggttttcatcttcaagaagttgattccaaaactgagttatgaagaatgatataacagttccttcaaaattggcctaggaaataaaaccttaaaaggacactggtgtgctactttgtcttaatttgggcttttctgtttcagtttgccacctccagctgtgaaatggactgcagtccaccctaagtactgtgcacagtatctccctgtgtgtgtgcacagtggcttccccttacatggtagatttttggccttaatataatctaatcccaaagtagttgtgtatgttttctgttccttggcaaataaatgaagaaataattagccaagattgaaaatgtattgtcctaacggtgtccctttaatgtttcatatgaaaaattatgttgacccactaaaatatccttgctcaatgtctggtcagttgaatttaataacatatcttgttaatgtttgtgtgtctattaaatgtgactaagcaggattactgaaaattcactataaaatcaaaggcatctaaacgtttgtacttgtcttgattaatcatatatttacacttgatttttttctgtcttcatttgtttttatttaatcataattgcatgatttttttggtactctaatcagtaattttatttttaatcatgtcattacctattcatgaccaaattaccaaggaaccaacatttagatttagatatttgttttcacttaggaatggaaattaatagattttccatgaaagcattagtgaaatatcattaccttgatctgcaagtagcctaaaaatgcgattgctggtaaacctggcctcaaatttcatactaccataactgtttttatatattgccactaattttgactggatttaatagcactttattgtacaactacaaaaaaaaatatattcctagaattgttgccagtgtaatttctctaatgttctggtgcttttcatatattttcagtatttttattactatattggtattttctttgtataaattgattgattaaaagaacatgttttctattttaatatgttttagaaaaataattacatttatgaaataaatatcatcaggaaaaaaa

SEQ ID NO: 5801 - DNA, 11304 bp, Homo sapiens
  SITE (10680): n equals a,t,g, or c
ggaacatggcggagcgcggcaggaagcggccgtgcggcccggtaagtgcgggcggcgggaccccgtgcagggcagcatggtggaggcgtgagaaccagtggcgtgggggccttcgccggggccgggccgcgcctcctgctgcctgcttcccgctgatcccaggccggaagcccccgaaggtgccgcgtgagcctcagcaggatgggaacagcgcccgtgtcctctccggaactccctgcggctccctggcccccgctggattacggaggcgggaccctgctcgcctccggatgctgaatccggagccctttcgtggcttctggagcccttttctgacttccagggcgactgtgggcagtgctgtaccctgagcctcagttttctcttctgttttgtgggaactcattcgacagtttcttgagtgctttctgtgtgccaggctgggtcccaggcgctggggatacagcgggtccctgccctcctgccgctttctggggcagcagttcgcagaagttccttggcttccttgccgccccgtgtggaggggctggctatggtgcagcaaacggaccccctccaggtgtgaccatcagcctcacactcataatcctcctaccactccttctccagggtgaacacggccaaaggattgagtggcgaaaatggaagcaacagagtaagtaagggtgggtaagagtatcttcccataggccactccaccagtgctcagtcaaaccctggagaaagacaccaactttgttccctctgggtcctgcagcacacaaagtggggaggcaggggccgggagccctggggaggctcccttgctgccctctggctgctcacccagcagctctccagagtccaggctgacccaatgagtgggaactgtctccttggccaattaggatgttcttttatccagagaaagaggagaaaaaaaaatggaaggatctcaagctgatgaaaaaactggagcggcagcgggcacaggaggaacaggcaaagcgcctggaagaggaggaggcagcggcagagaaggaggaccgcggtgagctggggtcttggggagggccacaggttgtggcccacggtagttgtcctgcaggcagagcagagatgtattatgtgaaagggcctttacagaccagtaggtccaaacatcttgtcctgatggagaaactgaggcccagagaagggagggagccagcaaactgagttctgacctcctgcttaggtaaatttcaagcctatggaaggcaagcctcatctctcttttttttttttttttgagatggagtcttgctctgttgcccaggctggagtgcaacggcgccatctttgctcattgcaacctccactgcccaagttcaagcaattttcctccctcggccccccgagtagttgggattacagaagtgtgccaccacacctggctaattttcgtatttttagtagagacgtggttgcaccatgttggggaggccggtctcgaactcctgacctcaggtgatctgcccacttcagcctcccaaagtgctgggattacaggcatgagccaccgtgcccggcccaagcctcatatctcttaacttagacctctagaacttcatgatcttcctgattttttgacttttttattgagcattttctgtgtgctttaatttcatttttcaattattttgatttcataataaaaatgaaagaaaactacaaagaagacaggaacaatcccagcaaacattgtagcaaaagcttgtccaaacaattatagctacttatccatgtgtagcaaagtacagatacaatgttacaacagtgaaaccatgttatctatgtgcttcttgggcttttttgtttgtttttgagacacagtctcgctctgttgcccaggctggagtgcagtggctcgatctccgctcactgcaatctccacttcccagttcaatcgattctcctgccccagcctccggagtagctgggattacaggcatgcgccaccatgcccagctaatttttgtatttttagtaaagacggggtttcgccatgttggccaggctggtcttgaactcctgacctcactcaggtgatccgcccgccttggcctcccaaagtgctgggattacaggcatgagccaccttttgtgtgaccttgggccatgtatttgacttcccggggctgaaggcccctggtctgtaaatggggataatggcagtatcctcactaaggatcaggttaatggctatcgggttaatgtgcacacactaaagacttattagatatcagctttcattttatccccatttgatagctggagaactgaggcagtaagtgggagagccaggatgtgaacttaggccattgctactaaccgctccacagcctcgcccagtggtttgccctgctcagaggagccatggagactgctgggagactgaggcccagagaggggagctggatctattttgctcatctcaaaattcctcccacttgggaaattctcaaaccatgggcgctagggacagaagaagggagagaaaggttgggggcccttgcctctcacactggctgggaacatccctcccctgctcagggcggccctacacactgagcgtagccctgccgggctccatcctggacaatgctcagtcgccggagcttcgcacctacttggccggtcagattgccagagcctgtgccatcttctgtgtggatgagatcgtggtgtttgatgaggagggccaggatgccaagtaaggggccatcccacatggtgccatggttcagggagagggaggggctgccgggatgggccgaggcttcaccatgcccccgtccacatgcctggctcttccctcgtgccctgcctgaaatattccctgtgtaatccttagtgggtagagttgccaggtgggggtgatgactacagaggtgggattgggagccagaaggcctaaacctgtatctcagctgtcaccccggctggagtgcatgcagtggcatggtcatggctcactgcagcctctacttactgcactcagatgatcctcccaccttagcctcctgagtagctgggattatacgcgtgcacttgtagacaggagctcttgaaggggccacagctggatcctgagcccccatctctctctctccaggactgtggagggggaattcacaggagttgggaagaaggggcaggcgtgcgtacagctggcccggatcctgcagtacctggagtgtccacagtaagggggtcactcccctaagcatgagggaggggtgtgtcaaagtggagaccaggtaggaggcggcttcccctgggaacatcctgaggtcagcattctttcctaggtacctgaggaaggcgttcttccccaagcaccaggatctacagtttgcaggtaacgctgtgtgggcccgcccccccatttcccctggatcatgccacagacactgagaccacccagtcctaccctgcgctgtccaggtgggaaagcaggcctgggagagcaagacctgtgtctgatgccaagacgcaggtctgtggcagagccggtactccgctccagggtccccactgcaccctgtgtgccctagcacttcccagactcttcccggctctgcctccacagggctcctgaaccccctggacagcccccaccacatgcgtcaggatgaggaatccgagttccgagagggcatcgtggtggatcggcccacccggccaggccacggctcctttgtcaactgtggcatgaaaaaggtaggaacagaaagatgggctaggacacacctccaggacacaccctggcaatggagggcaagcagatggatgttgcggagagccctggacctgcccgaaatccctcactgatgcaaatttgggccagagaattgtgcaaaatggggctcaatagataaagccaggaatgaatttactgttgcttaaaaagcaaatcaacagaagacagtcctcatgctccaaacaaaaccctgcagaaacaagttgaaagtcactctggagctgctcccatgtggcacagagccaagctgggatgagggcattaatttgccgcctctttatcctcaagcctcctcaaatcagaggcagaaacctttacatgtatggagtcccttcctgtcagaaagcacaacccaagcgcagtggctcacgcctgtaaccccagcactttgggaggctgaggcaggcgggtcatttgaggtcaggagtttgagaccaacctggccaatatggtgaaaccctgtctctaataaaagtacaaaaatgatccaggtgtggtggcacgcatctataatcccagctactcgggaggctaaggcaggagattcacttgaacccaggagacagaggttgcagtgagctgagatcgtgccactgcactccagcctgggtgagagagccagactccatcttaaaaaagaaaaaaaagaaaaaaaaagttgcagagctaccaaaatgtagaaaactgagtttcatctacttctatcctgtgccatgagcgccccaaaggtgcatgtttggccagtgacctgtgttttgcacaaatgatctcttgtgagcaggttcagccggtgccaggggtggagggtggcaggttgacctggaccccttggtcccttgccagccccggggctcccctggtggcatctggaagagccgtggcccctgctgatcttgagaggaatggcacccatttcttctggcttctccccaggaggtgaagattgacaagaacctggagcccgggcttcgggtgactgtgcgactgaaccagcagcagcacccaggtatctggaaggttctccaacccctgggttggcctgatgagctccagggttcagccacctgcttccattccctcaccccatctttacagactctgttacccctccagactgcaagacctaccatggcaaagtggtatcatcgcaggaccctcgcaccaaagctggtctctactggggctacaccgtccgactggcttcctgcctcagtaaggacagaccttacttctctgaatatccatccatccctctgggaggtggccgggagccttgcctgacccaaatatcagaccagggtttttgtcctgtcaacttgctgtgtgtccttgggcaagtcctttcccttctctgggccttgttctccctggatgcactgcctggaatgctgttaaggactactgagcaaaagtatcattattgatcaataatgtttctgtagggttgggaatggaggcaaaagggccagagaagtcagaggcccacttcatgttcttggtgcctcttcctatccagtctctgccctgttccccagccaagcacaggcttggtgtctgccctgctcagtccttgactttccaggaacagctctacccacccctgctcggtacacacacacccctgcctcagtgcacacacaggcagagctctacccacccacccctaccttagtacacacacgcacacacacacacacacacaccacacagctcttcccacccacccccgcctcagtacacacacacataatacccggagctatggcttgtggggagcaggacctgcactgagctggccccacccccaggtgctgtgtttgctgaggcccccttccaagatgggtatgacctgaccatcgggacgtcagagcgcggctcagatgtggcctctgcccagcttcccaacttcaggtgtgtacctcctggggctgcggccagggcaggaggaatgtggccaggaacctgcctggtgggtgaagctgcacagatgggcccctgctgtctggggtggggagggactgaggtctgggcgctgtgctgggtggggcctcggtggccgctcaggtgaccccctcttacatgggccaggcatgctcttgtggtgttcgggggcctccagggtctggaagctggagcggatgctgaccccaacctggaggtggctgaacccagtgtcctctttgacctgtacgtcaatacctgtcctggccagggtagccgtaccatccgcacggaggtgagcccgcctgcctccccgactgccagccgctggggccttgggatctgtccgaggggcgggtgctactcttgccctgtcacccacccttgcccgtggctgccttgtctggaggtggtcctctcatcccccttggcctcttgccacagcgacgagacatgagtgtagctgggagtcaaccatgggtgctagtgcccgtcctgtgctcccagactggctgacccagggggccctgcccacccctgctccgggcctctggttccttagccgtgcgctcagtgatctcccagggccctggttctgccacttccttgtgtgtgaccacggtgggcacagcagctctccccttggggtctcacttgcatctgtcccacgggggaagccacgtgcagctggagccttcgtcctggcctcatggaacctgtgtacccacttttggggtcaggcataggacgctgtgctacgggaactctgctgggaaggctggtactcccatcagtctcgccgggccgacagccctgtctacccatccctaaggccttgcccaagccgagcactctgagcctgacagccataccccccagcaggaaccctggctgccacccttccaacccctgcacgaggggtgaaaacttcttgcccctcttcttgccctcccctggccctgggaggtgggcgttgttaccttcgcccccattttacagaagaggagcctgaggagcaggctgtgtggtcctccaggtggcaagtgtgcagtgtgaacctgggcctgtcattaacctcaccaggccctactaaggacaggggacaccagtgggccgggtctcgggcagccaggcactgaagacaggctgggagcgggggcacccgctagccccccaggccccagcccactgccacgcttctcttccaggaagccatcctcatctccctggccgccctgcagcctggcctcacccaggcgggtgcccggcacacctgaaagttctaaggggccgaggacatcagtgaagcagcagtgaaaccaggggctctgcaggtcacttgggacggacgccaccagacttgtctccaaaaatcaccacctttaatactccccggcctgcacacacccacagtctcactgggctccaccctcacttactgcccgccgtgatggccttgaggctgcctgcccgcgccaggatgtttggcacaaagagcagccccgaagcccgctcaatgctctcgatgggcaccaggaagcgctccagtgggatggcctcatccacaggtgcgttgggcatcacgtaggtgcggagctcaatttgcccacctgctgcctccaggatcagcaccttgaagaagtgtgtgggcactgccacgtggttcttgccgatgacctggtactttacgtaggatttcccatcagcctctgtcctgtgggcagacccaggcacacgtgggcagggggcctggatgaacccaaagccacctcttccaggcagccttccctgatctgtcctctaacttctgtcaacctgcaggaccacgccctcactgtgagacttctgtagcctgcctggctcctccttgaggctggaactctctccagggtggttaactctttccctctgttttccttatgcccaacactgggtcaggcagagtgggcgacaataaacgctgctaggagaatcgagccttctgaatattcacattcgtctgaggggagacttaacgactgtccatctctccccacagaggtgagcaacaagtgggcaaggaccatgacaggtgacatcccagcaccagcacaggtgccaggacaccggacgggggctccccctcagcagagtctcctcccttccaccaggccctaggaggcacctgctaatgaaatttgatcagtgccccaaccaccgccttggccagcctatgccgagcccttaccatggaccaggccctggggaagcatgtgacatcaaccaagaggtcacaggttttgcagagggggacacaggtcatttgcccacagcaccaaggaactaggtgatgaggcctggactccatcccgagcctgtggattccagagtgagctgctcagcctggacctgttgcctctcagccccagccctctgcaggccagaaaaaccacggagcacacccagaggtgctcagttgcttccacctgagaggcagggctgcacaggagcaagagtggaggccctgggtcaggcagatctagattcaaactcccgagaagggtggagggaagtgctccaagcagagcagagactgaaggcgggagagcctggtgcaccgcggacctgcagggggaaggcgtgagagctcggtgcactggggacctgcatggggaaggcgggagagctcggtgcactggggacctgcatggggaaggcgtgagagctcggtgcactggggacctgcatggggaaggcgggagagctcggtgcacctcggacctgcagagggaaggtgggagagcttggtgcaccgcagacctgcagggggaaggcgggagagcttggtgcactgcagacctgcggggggaaggtgggagagcttggtgcactgcagacctgcggggggttccatattggcagaacaagattgggtgggcatgccaagaggtgacagcagggagaagcgggggcagattcagggcctgctgctgcccatgggcagaggagagatggtcaggggtacccgacaggtctttggctgtggaggtggaatgaggggactcgaggcagggaagctgacaggcttgccaagaaaccagatgagtagggaactggtattgacccagagcctggggcaagcctggccctgtgagtggcagtaggggcctcgggtgagtgggaggttctgccgcccccctggtttccaccttacctgggcaggaagagtggccctgtgcagacatagacgttttggtagctgcgggtcaagctgcggctatatttctccaggttgttccaggcattctggttgaggtggggcacctggtaggagagatagggcttagcaggactgtggctgggacccttcctcctctatcagagggccgccccaggtcctgaggggatggacaggctcagagatatccagtgagacaagcggggggaaactgaggctcaaggaatgaaagtcactccctgaaacccagggctgatagagtggtagccaccaccatctgtccctcccacagcccaggagtcaaagtcttttctcagctcccaagagtcgaatgaaggaagagcctgtctccacctttcagagaggactgaggcctgtccccagccccacccagggtctcctgggaagaccagccgttccaactaccaacccgttccttttcccagtctgagccacaggaagagcctagcggggaatgtcatgaatcgacctccatcctgagctctccaggcctgggacaatggaaagtggatagggggctgtcttcccagaaggaagctgggtcagaggttggtgccccatgggctccacccagagccccatggcagtctccatccattggtgccaggacctgctgggaacaggctgagagggtggttggcccagtgcacagtgcctggcactaacaacctgatcgtgggccaggtgtctgcctcgaaactgcctgaaggcaggcagggtaggacaatgtctggaggctcacggttttatagactaggggtccccaacccctgggctacagaccggtaccagaaccgggccacacagcaggaggtgagcagcaggcgagcaagggaagcttcatctgtatttacagccacccccccattgatcccacagcagcctgagctccgcctcctgtcagatcagtggcggctggagattgtcataggagctggaaccctatggtgaactgcgcatgtgaggaggttgcgcgcttcttttgaaaacctaatgcctgatctgtcgttgttgcccatcacctccagataggactgtctagttgcaggaaaacaagctcagggctcccacggatcctacattactgtgagttgtatatttcactatatgttacaatgtaataataatagaaataaaatgtacataaatgtaacgcacttgaattatcctgaaacccgccctcacccaccaagccgtggaaaaactgtcttccacgaaaccgcaccctggtgcccaataggttgggcgctgcggttctacaacagacagccttcttctgctgtgtgacactgtgcccgtcactttgcctctgtgagcctcagcgcctcatcactaccgcaggaggaaggtgaataacggtattatccccatttttttgacgaggaaagcgacgctcagggaggtgcccatggttcgcaattgaagctcaagccctggtcggcctgcagaccctgtgcctggagcccagtgctcctccctcccgccacgggatgtcactgcgatgcctgaccgggggcgcgttgggcagctgccccgttctgcagaagaacaaaccgaggccccgcgaggccaggcgccggcccctcattccgcgaccggcccggggcgcgggcgctacctggggcgcgacgttgctcaggtagaacgtgtcgtccatggccttctggctccagcggtggttggcggcggcggccangtgaccgcggtcgaagccactgccgcggtagtcggcgttggtggcacggtggtacgcgtgcaccgagtcgtcctcgcggaagtcgcactcgcgccggtcgccgtcgccgcggagacgctcgggtcgcagctgctccaccacccagagcgcgccgcgggtgcgcgggtcgtagcacagcacgtacgactcgcggctcttgagctgcgccagccccggcagcccgtacttggccagctcgcccgggccgcggggtcccccgggcacagggggcaactcggctgccgccgccacgggcagcacgggcagccggcccagcagtcccggcgccgcccgcgcgtcctcccgccgccgccgccagccctcgacgaccgcacccagccccgcgcccaacgccagggtcaggccggcccgcagcgcccgcatggccggggagcgacctagcggcgggcgacccgcgaggctcttaaaggagccgcgtcgcgggatccaacgagggcacagggctgctggggccgcggacgatagcgtgacctcccttccactcacaaacactgccaagggcttgggcctcggaacccagaagggagcagcagagcccaaccgggtgtccccggcgtcctttct

SEQ ID NO: 5802 - DNA, 282 bp, Homo sapiens
gtggctcacacctgtaatcccggcactttgggaggccgaggcgggtggatcacgaggtcaggagatcgagaccatcctggctaacacggtgaaaccctgtctctactaaaaatataaaaaattagccgggtgcagtggcgggcacctgtagtcccagctactcgggaagctgaggcaggagaatggcatgaacccaggaggcggagcttgcagtgagcggagatcacgccactgcactctagcctgggcgacagagcagagcgagactgtctcaaaaaaaaa

SEQ ID NO: 5803 - DNA, 3774 bp, Homo sapiens
agctgctcttacactgtatacctgtgtctgagtactcagttcatccaccagtcagggtctgtgggacagactaggcaggtggtgccccgtgtgaggagcagcgcagtggatcatgatggaaccctcgaaaatgaacgtgaagtgactgcgcagtaagtaatcggtgcccgctggggatttccaagtttgaggggattttccagctagggtttcatcatgggacaacagttatcccctcaacagcaacagtgtattgaaacaattgcctaaagctagcagagcctcagtctcagagatccaattaaaggacctgatgcaaactgttgttttccataacccatggtttccagaagaaggtacactagacctagagctctgggaacaagtgggaagaaatcttaaacgacgtgcgcaagggcagtaggtcccagtaacatcttaatgttatggtcctaatagggttgctttggccctgctcttcatagaagagcccaaaaagataagggaagaggaaccactacccactttaatgcctcagcctccctcagccttgccgtcactggctaaagataccaaagaggagacggaggttttcctccccctccccccaatgaactgggaagaagacaagcgatatactacagttatgggaccctgccttaggcaagcagcattggaaggggaactcttggcctgcccagtgatgcaagatcaacaaggcaattgggtgcatgagcccattacattgaacacttctaaggaaataagaaaaagcattagagaaaatggggccactagcccattcacaagaggattaattgaggcaatagcagataactaccatatgactccatgggactggtcagtgctagctaaaacaactttaggaggcgagtcaataccccctctggagggcagaatatgatgaattgtgtgaacaacaggctaaccagaatcaattgcctggacaaaacatcggctgctatgctccaggggaggggtccctatgttaatgtacaacaacaattaaattttgtcccccaagcctatgcacaagtgtccttatgcatcttcagggcttaggaccaaattcccgaaggcagagttcaacagggatcttttgtaaatgttcaacaagggccacaggagccatttattgaatttatccatcagttaacccaggcaattaagagcacacatggaacatcgaccattccacgggtatctcgtataaccctcaaggacaagccatagtggaacgtgcccattccacgcttaaaaatatgctttaaaaaaagggggaatatgaataaggaccctacaacactactagcacaagtcttattcacccttaatttcttaaatttagataataaatttcaatcagccatagaaaagcactttgctaaaacctcccaagatacaaagccttcagtgttatggaaagatgtaaatagtaatctatggtgcagtccacatgatttgctaacatggggaagaggatatgcttgtgttcacatcccctcaggtcctcttgggattccagtgcaatgcatcaaaccataccatggcatggctgggacccaatgcagtactggaaatgaagaatgtgagcctgtaggacccgcagccccggacaatgcagcttcctcggacaacacaggtcccggatggggaatgtgaaatagacaactgggggatgctaaataagacaactcaggaggctaagtgaatcacagacaccattcactccagataatctgttccttgctatgctgtctgttgtacattgcaactcttgtaaggatgcaaagctggaacacaagctgtaaccgctgcacctgtcaaacctgtcgctgcacacatctgtacgcttcaatcaactaaacctgatgcaaaaaacagaaaagggagagatgtaggggatcactcagagtggtgggaaaaactatagggaaaggacacaaaccttctgaaaggttggaagggtctgcagagcccctggggagaatagctggaagcagctgttctataaccctgagacagagggcaaggagtagatacaagggagtgtggggggaattgatcttaaacaatcttgttatgttgaccaggaactgacctttgatcatccctgcatgtgaagttccctgaaaggggaacaataaatgttaattaccttcaggttgtgttggctccaggttttcagcattgcacctgccctgaataaaagcaagcagctccagcttcccagggctgcgctctggccacttgcaccaggcagtcctctggctgctcttacattgcatacctatgtctgagtactcatttcatctgtcagccggggtctgcaggacagacctggcacattgtagccctagcaccccatgaatcgaagggattgcacttttccagaaaccaagaactgattggatgggggctgatcaaagtggtattagaaccttactccctgcctcttaaataatgctctacccctcctagcccctaactccttggtcctggcctttaataacatgtgagaaactgaagaaggtccccaaaaagtaatgcgaaggacacagaggtcagaaggggacagaagaagaaaggggaggctgaggggaggccagaagccccgtgacagatgtggagcaagacattgacctgttgatcccaccgcctcagaggccagcaggaagaaatgagccgcactgaggaaagtccacacagaaagtggttcccaagggaaggtgagggattccatctgggggaacagaaattagaatcagcaaccaaacatgagtccaggttctgggctcagaccctcgtggactgctattgaggcacaaatgacaaatctaaactgctatggaatggcatgaatgtggcgatttgaagtgttctgaaatctaggaaagggaagtgggcaagccccatggcagggcactcagaatctccaggaggctcttctcagagaacaaacaccccacatgaaaacctatttgagaattacccacctaaaatgatgctgaagtgtaactgcctgagaatgttaacaaaaaatgatttaaactgaaaaggtttttcatttttaggtgaagaaacagattcagagaggtaaaatgaattgtctaagatcatagttagtggcagaactggaactgaaacctagggatatatatttgtgaaaagttttttaaaacagcgtggctgagaaccaaccaatcgcatcagactctcctgtgtgccttggtaaaatgcagattcctagactccacagagctagggaatcagagtccttggggatgagccttggaaatgtattcttttttctttccttaccaagttcccaagagctagaaaaggaaatgtattcttaataagctcacaaggtgaggtgactcatatgtacattaagcttcagagccagcagtttagataggtttgctgatggtagacagatggagtccaagacctctgaagtgcctcccagtcaaggaagctgggaatctatgatgtaggtacagcatagggtagctgcagccccctcccctctctttgtatagaggtcatctcaggaacttccaggaagagtcaaataaagagctgtcacacaccctagagctggaatctgcaccctccacaccaacccctttgcacagcctgtctgctctgcatgatcctgcagctggttactgcagcctggaagagctgagacagagaagacagacgtggggagggagaataacaataataaacagaccttagacaaga

SEQ ID NO: 5804 - DNA, 3773 bp, Homo sapiens
agctgctcttacactgtatacctgtgtctgagtactcagttcatccaccagtcagggtctgtgggacagactaggcaggtggtgccccgtgtgaggagcagcgcagtggatcatgatggaaccctcgaaaatgaacgtgaagtgactgcgcagtaagtaatcggtgcccgctggggatttccaagtttgaggggattttccagctagggtttcatcatgggacaacagttatcccctcaacagcaacagtgtattgaaacaattgcctaaagctagcagagcctcagtctcagagatccaattaaaggacctgatgcaaactgttgttttccataacccatggtttccagaagaaggtacactagacctagagctctgggaacaagtgggaagaaatcttaaacgacgtgcgcaagggcagtaggtcccagtaacatcttaatgttatggtcctaatagggttgctttggccctgctcttcatagaagagcccaaaaagataagggaagaggaaccactacccactttaatgcctcagcctccctcagccttgccgtcactggctaaagataccaaagaggagacggaggttttcctccccctccccccaatgaactgggaagaagacaagcgatatactacagttatgggaccctgccttaggcaagcagcattggaaggggaactcttggcctgcccagtgatgcaagatcaacaaggcaattgggtgcatgagcccattacattgaacacttctaaggaaataagaaaaagcattagagaaaatggggccactagcccattcacaagaggattaattgaggcaatagcagataactaccatatgactccatgggactggtcagtgctagctaaaacaactttaggaggcgagtcaataccccctctggagggcagaatatgatgaattgtgtgaacaacaggctaaccagaatcaattgcctggacaaaacatcggctgctatgctccaggggaggggtccctatgttaatgtacaacaacaattaaattttgtcccccaagcctatgcacaagtgtccttatgcatcttcagggcttaggaccaaattcccgaaggcagagttcaacagggatcttttgtaaatgttcaacaagggccacaggagccatttattgaatttatccatcagttaacccaggcaattaagagcacacatggaacatcgaccattccacgggtatctcgtataaccctcaaggacaagccatagtggaacgtgcccattccacgcttaaaaatatgctttaaaaaaagggggaatatgaataaggaccctacaacactactagcacaagtcttattcacccttaatttcttaaatttagataataaatttcaatcagccatagaaaagcactttgctaaaacctcccaagatacaaagccttcagtgttatggaaagatgtaaatagtaatctatggtgcagtccacatgatttgctaacatggggaagaggatatgcttgtgttcacatcccctcaggtcctctttggattccagtgcaatgcatcaaaccataccatggcatggctgggacccaatgcagtactggaaatgaagaatgtgagcctgtaggacccgcagccccggacaatgcagcttcctcggacaacacaggtcccggatggggaatgtgaaatagacaactgggggatgctgaataagacaactcaggaggctaagtgaatcacagacaccattcactccagataatctgttccttgctatgctgtctgttgtacattgcaactcttgtaaggatgcaaagctggaacacaagctgtaaccgctgcacctgtcaaacctgtcgctgcacacatctgtacgcttcaatcaactaaacctgatgcaaaaaacagaaaagggagagatgtaggggatcactcagagtggtgggaaaaactatagggaaaggacacaaaccttctgaaaggttggaagggtctgcagagcccctggggagaatagctggaagcagctgttctataaccctgagacagagggcaaggagtaggtacaagggagtgtgggggaattgatcttaaacaatcttgttatgttgaccaggaactgacctttgatcatccctgcatgtgaagttccctgaaaggggaacaataaatgttaattaccttcaggttgtgttggctccaggttttcagcattgcacctgccctgaataaaagcaagcagctccagcttcccagggctgcgctctggccacttgcaccaggcagtcctctggctgctcttacattgcatacctatgtctgagtactcatttcatctgtcggccggggtctgcaggacagacctggcacattgtagccctagcaccccatgaatcgaagggattgcacttttccagaaaccaagaactgattggatgggggctgatcaaagtggtattagaaccttactccctgcctcttaaataatgctctaccactcctagcccctaactccttggtcctggcctttaataacatgtgagaaactgaagaaggtccccaaaaagtaatgcgaaggacacagaggtcagaaggggacagaagaagaaaggggaggctgaggggaggccagaagccccgtgacagatgtggagcaagacattgacctgttgatcccaccgcctcagaggccagcaggaagaaatgagccgcactgaggaaagtccacacagaaagtggttcccaagggaaggtgagggattccatctgggggaacagaaattagaatcagcaaccaaacatgagtccaggttctgggctcagaccctcgtggactgctattgaggcacaaatgacaaatctaaactgctatggaatggcatgaatgtggcgatttgaagtgttctgaaatctaggaaagggaagtgggcaagccccatggcagggcactcagaatctccaggaggctcttctcagagaacaaacaccccacatgaaaacctatttgagaattacccacctaaaatgatgctgaagtgtaactgcctgagaatgttaacaaaaaatgatttaaactgaaaaggtttttcatttttaggtgaagaaacagattcagagaggtaaaatgaattgtctaagatcatagttagtggcagaactggaactgaaacctagggatatatatttgtgaaaagttttttaaaacagcgtggctgagaaccaaccaatcgcatcagactctcctgtgtgccttggtaaaatgcagattcctagactccacagagctagggaatcagagtccttggggatgagccttggaaatgtattcttttttctttccttaccaagttcccaagagctagaaaaggaaatgtattcttaataagctcacaaggtgaggtgactcatatgtacattaagcttcagagccagcagtttagataggtttgctgatggtagacagatggagtccaagacctctgaagtgcctcccagtcaaggaagctgggaatctatgatgtaggtacagcatagggtagctgcagccccctcccctctctttgtatagaggtcatctcaggaacttccaggaagagtcaaataaagagctgtcacacaccctagagctggaatctgcaccctccacaccaacccctttgcacagcctgtctgctctgcatgatcctgcagctggttactgcagcctggaagagctgagacagagaagacagacgtggggagggagaataacaataataaacagaccttagacaaga

SEQ ID NO: 5805 - DNA, 219 bp, Homo sapiens
tttcgctcttgttgcccaggctggagttcaatggcatgatctcggctcaccacaacctccgcctcccggattcaagcgattctcctgcctcagcctcccgagtggctgggattacaggcatgcgccaccatgcctggctaattttgtatttttagtagagaaggggtttctccatgttggtcagcctggtctcgatctcctgacctcaggtgatccacc

SEQ ID NO: 5806 - DNA, 219 bp, Homo sapiens; identical to SEQ ID NO: 5805

SEQ ID NO: 5807 - DNA, 319 bp, Homo sapiens
aatctttttaccatgaaatttcttccagaattttccccctttgacacaaattccatgcatgtttcaaccttcgagactcagccaaatgtcatttctgtaaaatcttccctgagtcttccaagcagtaatttgccttctcctagagtttacctgccattttgtgcacatttgagttacagtagcatgttattttacaattgtgactctcctgggagtctgggagccatataaagtggtcaatagtgtttgctgactgagagttgaatgacattttctctctgtcttggtattactgtagatttcgatcattctttggtta

SEQ ID NO: 5808 - DNA, 319 bp, Homo sapiens; identical to SEQ ID NO: 5807

SEQ ID NO: 5809 - DNA, 319 bp, Homo sapiens; identical to SEQ ID NO: 5807

SEQ ID NO: 5810 - DNA, 235 bp, Homo sapiens
ccttgttctaagtttttaaactgaatgaatggaatattatttctctccctaagcaaaattccacaaaacaattatttcttatgtttatgtagccttaaattgttttgtactgtaaacctcagcataaaaactttcttcatttctaatttcattcaacaaatattgattgaatacctggtattagcacaagaaaaatgtgctaataagccttatgagaatttggagctgaagaaag

SEQ ID NO: 5811 - DNA, 235 bp, Homo sapiens; identical to SEQ ID NO: 5810

SEQ ID NO: 5812 - DNA, 235 bp, Homo sapiens; identical to SEQ ID NO: 5810

SEQ ID NO: 5813 - DNA, 19011 bp, Homo sapiens
ctcaaacatttttttaacagtagctcacagtgagaaatacattttacatttcgaatacatacataactaaacatttcacaatatttaccaaagccatatgcatggtaatttctatttatttattttttaatgctgggcctgaccagcattttaaaaccaaaatgatataatgacccactaatggctcatgacctgcagtttggagtggtctgaagcatctgattcatttaatcatttcagtaacttcgaaaaatgtcttgaggtggtgagattcttcacacgctctgcacagttctgaaaagaaattaggagcacattgaaatgttacagacattgctgatttgccactttggagctgtgagtgccggctcattaatgccaactctccgcgtacgcatgctgctctgcagaagttagcagcgtcctttttaaggctgcgtcattctttcaaagcagcatttgtaaacccagcacatctgctgacaaatgtctattttctacaaagttgactaaagtaatattttaaactaccctgttttttccacagggtgtgctgatctgcaaaccctggacacaatgcagccaattgagaggaaaagacagggctatattcatgagctgattcagaccgaagagcggtacatggctgaccttcagctcgtcgtcgaggtgaggaggctgctgctggctagctctcggggtatctgctgtctctcatgagagatggtgggcatcagactcagggctgcctccacgcagagtcaaagcaaggcatcacttttgatgtgtgaattcacaaatagtgacggaagctctcacatcctccaaatgctgtctctgcctgccggataatgcttgagattgaaagtctctaatgagctctttcccccagatgaggtcactcagagtgaagcgggagaacaagagggcattcgcatggcttcgttggatgtggcaggagccccatcaaggaaggatggggatagagtggatgggaagggcctatggcagaccgtagcttccttggatatttgcctaatatctgttttaacatctgacattttcataaactggtatctctggaggaactgtgaaacagtgaaagtgttcacctcatggttgtatcagtttggaaaacccaatgggagcatattgtaaaatagttcccaaatatcatatagctactgtttgtttataccagtgacctctactctgatgacagctatccttattcgagtagcactttaaaatgatttgtgcttgagtgaacaaaagaagactttccatttctactatacctttgtttccatgcctttcagttcccagtgtacaggccctcaggtgagaagaccagttacattaacaaaccacctgaaaagaacaggcgtcccctacccccacacacccaacaggtgcagcgtatacctggccatgcctttcatagctgaatggagcagaggctgcgtccttctgcgtctgttccccagcaagccctgccctggattcactctccaccttaaacgcaggcctaatacctgggatatccagacatggaatacttgttcccctcccatgcaaactatatggcacttctcggttggtgatatctatcttcactgcacgcctgtgggctcactgagaacagggaccgtgcagccttcatcctgtgttcccaaaacttagcctggcccttggtcggcctttccataagtagtcagtgaattgggtgtgtttatgtctgcacctctctggccaggatagatggcctagaagaaaagcccatcattttgattaatcccctacaaggatcagccctgctgctggtcagattccagtcctaaggcactgtaagtaggtgtggaggtctccctaacactaggacagaggtgagcaggcaccgggtgcttgccccatactctgaggagtgaagcatcaggtctgggtccaggattctgggtgaaaagcaccattcacaggtgaggccttcttatgaccatcctcatgaaggttcccagaggcctgaccagcttattcccatctgcttacctcaccaagcccggcacaaagcagctacatggatggctagaggggcatgaatgaatcagcaaataaacaaacagatggacagccagactcttccctgtccctccatagcagcctccgagcaggccggccgtctttccagggctgctctcacaggagtggcctagtgtcttcagtctgatttggaactgtaaaactctctttagagagtgcccagcacttgtacttgaattctgtgaatccaagttcaactcaactcagtaaacatgaattacaaaccacgatgtgcaaagggctatgccagagaacagagatgaaagaaagttcttgtcctccaggaattcagagtcctgttggatggagagaggtacagtggggccagtaaggctgaaacctggggttagtgaccaccccagccaggaagaactttcccagttatgttttggacaaggacaagtttgctactccaggaggaggaaacagaagtgggatggcatgtatggagggagtcaggggcctacaggccatccagggtgactggagtgtgaagtagctgagggccaggctggtgaggttggcagggggcaggtctcataggccctggaacctccaggaggagtctgtgtcttatcacacggacagtggagagctttgagtgattctaatagcagcatgtcatgggcattttggaaagatgacatatgagaagagtgtctcaggtaacttctctatttccttaaggtgtttaaagtcattccctaggaatctcagttatgcagttgaaacttagatttagaatcaaaaagagctgaattttagtcctaggcctttcatattctgtctttgtgatcttgagcaagtctccctctaagcctttatttcttcataggtcaattggtaataataatacctgactcagcttcacctccatcacccgtgaagctacttgagaaccctgcaaacacacacgcgtgtgtgtacacacacacaagcatctgcatatttgtacatatcagtgctttgtaaatccttaagtgctatgtaatacagatgtagagtattactatttctccctcagcagccaacttctaaaacccacatctgcttagagttatcttaggggtggcataagttgttactctggttctcctgttgaatgtctcacaaattgttgtctagaactctacgatgctccacctaacaatggcctgcttcctcaatcctgcaagcttgtacagtgcctaggtgttcatgcccatggctttatttaaccttcataacatccctaagagagaaatctgaaaatctcctcttaaccagattactagattcagtccttggaactagccttgataagagctgcactagcaaaaagaaagaacattatgcagtataaaatgtgtcataagtatgcttatttggatgattagcttcagtttatgatgacattatttgatctgattagtttcagtttatgaagacattgtttgatttagaccacacgtaggctgtgtatccacacttaagctaactagtttttctatgttttgactttaggtttttcagaaacgcatggcagagtcaggctttctcactgaaggggagatggccctgatttttgttaactggaaggagctcatcatgtccaacacaaagctgctgaagtgagtcctgagcatcacctgtcattgccgctgaccccaaagcccccagactgagactcacacaaaaccctctgcaagggcttcttagcaaaggaacttcaactgctttctgcttcctcaggcttgttattttattatcattttatgaaatatcctgtgactgtaaaatacataagtattgaagaaagtaaagaaatataacaaaatattttgataaagaaaaaattaaatcattaaacaacatatcaatctatgattccaagatataagatgtccttgaccctggcagggcagaagagtcagaggagagctgcagctcacggcgcagataaaactgcctagtttggtggcctcctaaatctctatccccatgtgaagttctactgttggggtgattttccatccttcgtggctgtgaggacaggccccccaagggaggatgagcagtcccagcttccctcagggatagtgcctctctgcctccacacctggcccctgcagctcctgctcccttttttctcttacagactgaaaatttccttcttggttcaaccaagaacaagttagaatctttcaaaagaaactttgccaagaagctaaggtgaaaccaaaacaattctaaaggccttgaaacacccaagtgtatttttttttttttgagatggagtctcactgtgtcgcccaggctggagtgcagtggcacagtctcagctcactgcaacctccgcctcctgggttcacaccattctcctgcctcagcctcccgagtagctgggacaacaggcacccaccaccacacctggctaatttttttttttttttgagatggagtctcgctctctcacccaggctagagtacagtggcgcgatctcggctcgctgccagctccgcctcccgggttcacgccattctcctgcctcagcctcccgagtagctgggatacaggcgcccaccactgcgcccggctaattttttgtatttttagtagagatggtgtttcactgtgtcagccaggatggtctcaatctcctgacctcgtgatccacccacctcagcctctcaaagtgctgggattacaggcgtgagccaccatgcccagctacccaggtgtgtattttttaaatttatttttatttttattatttttagaggcaaggtctcactctgtcacccaagctgcagtgcagtggtgtgatcgtagctcactgcacccaacttgaactcctggattcaagcaatcctcctacctcagcctccggagtagctggaactacaggcgtgcaccaccatgcccagctaatttttcatttttgtagagacagggtctcactatgttgcccaagctggtctcgaactcctgggctcaagcaatcctcttgcctcggcctcccgaaatgctgggattagaggcatgagccaccgtgcccagcccacccaactgcagggactttatttactttttttttctttgctgacatcacaccccggttggcttgaccagcagagcttttggcccaagctatctcctcttcctcttgagttctccttcccagtgccagaggttcttaggtagctcactggttatcattaccattggtctgccatgggattcatcctttaattacctaagtcattcacttagaaacacaaaatgagagtgtgttcttggcagggctttgcgggtgcggaagaagaccgggggcgagaagatgccggtgcagatgattggggacatcctggccgctgagctgtcccacatgcaggcttacatcaggttctgcagctgccagcttaatggagcagctctgttacagcagaagacagatgaagacacagatttcaaagaatttttaaaggtaattccattctgggccttgcgggtcaggctccttctgaggctggaggcaacagcacacagtagcccaacagggaatcccagcaatggagaagggcatccccatcagtttccaaaggaaacaccaaaacggcagagaattttccgattgttttgtgttgcctttatgtagacctgattttttcctggcactgggaccatcattttttccccatctgatagcagagtgtttttttttaagcatacttacttatcagctactttatactcccaagaaacaaccagaatgtcactttcttaattttgtaaattgccttcatttaatacctgccttattccagaaagagtataaaatagcttactctttttttttttttttttttaaacagaatcttgctctgttgcccaggctggaatgcagtggtatgatcttggctcactgcaacctctgcctcccaagttcaagagattctcctacctcagcctccaaagtagctgggattacaggcatgtgccaccacgcctggctaatttttgtatttttagtagagacggggtttcaccatgttggccaggttgatttcgaactcctgacctcaggtgatcggcccaccttggcctcccaaagtgcttggattacaggtgtaagccaccgtgcccggccctaaaatagcttactcaaatatataaaatgcaacaagataaaatttaaaataactagatgaataaacttggacaaaaggaaatgagagtaggaaacaaagacgataccaggaattaggataatatataaaatgcatatctgtgatcctgtaaatataccagaagtgtgcacagatgtcatcaaagcttccagaaactgatgagcagaagaagaaaggatcagttccgtgatgccacgtcacaagttaaacatgagaagtaaagctacagctgtactcagagagagaacactgtgtataatgtaatgagtcaacaacatccttcgtacaggttattataatagaaagtcatattttgagaagttatttgcattgatgttgttcagtagtagaaactattattatacctgttaaaatggtgaggaaattgaaagtaaaatctgttttcttgctttttttcatatttcctgttgggtttttttgttcatgaaatactgcatattgggatatattaaacagccatatcagtacttaaggagagtatataatttaaatattttcattatcagaaaagagtagaaagtaagaataaaatataaagatgtttaggcagagaatagaaattagaaaaggaaaatggaggaagtaataaaggtaaaaagcacaaattatatcaatatatccaagaactgttatattgaagagagataataaaatgtaactgatgaatctaatagagaaagaggaaaaaacacaagtaacagaatggatgtaaggagatctcttaaattaaagtgcatgtaattccaaaagacatgctaacaaatgtgaaaacatgaacaaaatttgtaattttctattaaaacttgaaaactggctcaataagaatagaaaatcttttaaaaatagaaaatcttactattacgatactatacaccaggagaaaattgagaaacttaccccaaaaaggagctgggttcacttgatggatttaacagggaattctctccaactctaaaggaacagattattctatattatacaaactgttacagatcataggaaaaagtaaaaaggtcacctaattcattctataaagcaaaagtagccatgattccaaggcctgtttaagttaaaacccactatcatttacaaatacagctgttaaactcttaattaaagtaacaattcataaaattaagcattacatgaaaagaagagcctatcataaccaaataggattatctcaggaggctatagcatactatgcttagaacaagacaggcttcagaatctcggccccgtcactgtctaattgtgtgaccagaggcaagttatttaacatgtgggtgccttcagtcccctcatctataaaaggagattatcacacagtacttttaaaggactttaactcagagaccaacacattactattagcattcaataaatgattatcgtatttttccttacgatgatctcagggatgcaaaaatgattcaatataaggcagtgaggacagagcccttcgatttgtgataagggtaggaggcagggagttgcctcgaaatgaactggaagaaacatggaaaccaagaccatagaattaaacattcatcagaataatgagataaactgagaattgttagtatatgtgcatgttttaaaataatgatgtaaataggatttcaaagtcatcacaattgtaacagtagtcaaaataaataaaaatactgcctcatgaaaggcctgctataggttaccttaaaaagcaaaatctagcaataagctgtgttctaaaatgttactttttaaaaagactcagaaaatatggaaataagaagcacgaagatgcttgtgacagcaacctatatagatacggccaaaacaaaaggggggcaatttaaatatccagtagtggggaaatgatgaggtggattacagtgagtgtacttttcagtcattaaaagctgccatcctagagcagcagctgctgtcttcaggcagtgtaccagagctaggggtagaggcaagtaggatgtgggccctgggcctggcgttcacaaatcgggtgtggaatagagacactgcaacacgatgcctctccctgtatcacctggtgcacatgtggtgtatgctaaaggtggccagggagggtcatggaaaggagggaaggtgtcccaggggagagcctggacaaggggaagcagggcctgagtcttgagggtcaagtgtgaatcagctccgagaagagagggcaggggacagtcccagcacaggtcatgggaaagagctgaggagcatccgctgggcttggcacatgagctgagatattcctactgtgaacctaataggtatcattttagatcctgagttatttaaaagaaagtcgaagccccctcactttactacagtgcgacatatcagtgtagcaaaattacacttgtatgttgtgaatatacacaaattttaaaataaaaataaaaaatagaacactcacctaaaaaaaattctaaaacagtaagacagggagaaacataaataaataaaagaaatgtgaaatctaaaaggcgatcaaagaccagtgcttcctgtgatcggagctgtgatttcctcacgagcctcactgttgttttgcagaagctggcatctgacccgcggtgtaaaggaatgcccctctccagcttcctgctgaaacccatgcagaggatcacccgctacccactgctcatcagaagtgtgagtgtgcaggccgggcagtggggtctgagttaggagcaggatgcgctgaggtccacagaggccagatcctcagggagccctgagcatgccacctcaccctgcacacagtgtgacaccgcacaagtgatcccactgtcccggggaccagatgcctgtgtgtgtgtgtgcacagaaacacgctgaatccttgaagtgggcaaatcagagaggaatccagtatcacttgggtaacctgtcacccacctttcaagaaactccccagcatctcaaagtcataagtatacttgtccaggcagggaaaggcccctctaggtctccagttgtggagcccatcttgaacccagagaaagaccagagtaaccttagactccagtctttcctctgagatctgcctccatccaccctgaacacctttcctagatgtcccaggaggctccacttggcacatcataaatagagttcatttgtgtccctcgctgtattcggcttcaacattccttctaaaattccttccagctttctttttgataagcaatagggccctcttgagcccataagccttctaaggaaaaggcagactttacaaaagattatcccacgattaaccattgattacagtaacttacaaagaaaagcagcaggaatatgataagcttgttacttctattgatgattccttgacttttggtctgttagctgtgtgacctcaacatagacctcatgtgatagacgcctgcactaaactgaaccataatgcaggttcacagccccttcattgaaatacttggggccagatgtgtttcagaattcggaatgtagctcaaataccatataatatatgactcctcaactgagccttagggtagcacttacaaccagacacactaatattcctacagtggaacataagaacaatcactgtaagagtaagtaaatatatctcttctgtttaggtcagattttgccaccaaatgggtactgaataaaaactttaggctctcaggctgttctgcattttagaattgtaaatgaaggactgtgcactcatctgactagagtgagagagtccagacggggcatctggtgatggctcctaatttctggagggaccacacacgtttgtattctggcctctgcgcgttcacagttgcagcatgcgtcgtttgaaatcgcttcagaatgaacagaatgcatttcttccacatgctgacaatgtgattttattgtatttttcctgtggcatgggagtcattgctttcatcagatttttttcaaaaggatcagtgaccccaaaattgttatgaaccattgctattcagcaagttcacacttaccacagctgcagccagtttatacaggagggcgcacccttacatggcttaaatttcggaaggagtcgggaggctcccgcctattaccgggagccagtcggagagcaaccagagacccacacagttcagagcacttgatccgtttagcactgtcaccttgtcacagcagcgttacctgtccctgtgtccccaagaacttgtgggagtacgagtttctcaagggcggaaagtgtcgtcttgttcaccgccgcgtttccagggcatggaagcagtccataacatggggttggaggagcggtcctgcgaaggtccaggtgggcaggtgagagacgcagctcccccatgtgacactgcccactcttttccagattctggagaacaccccggagagccatgcagaccattcctccctaaagctggccctcgagcgggcagaggagctgtgctctcaagtgaatgagggagttcgggagaaggaaaactcggaccgactggagtggatccaggcgcacgtgcagtgtgaaggcctcgcggaggtcaggcctgtgtggttaagccgtgcgcctccagggaggctctgggtggggaaccagctccgagccttccctcacgtggacagtctgcaccttaggcagcctgcgtggactcaccaccctgcccctgcaaaggcatttttttttcttttttttttttttttttttgagacggagtctcactctgttgcccaggctggagtgcagtggcgagatcatctcggctcactgcaagctctgcctcccgggttggagcgattctctggcctccatctcccaagtagctgggactacaggcatctgctacgatgcccagctaattttcgtatttttagtagagctggggtttcaccatgttggccaggctggtcttgaactcctggcgtcaagtgatcctcccgcctctgtctcccaacagtgctgggattgcaggcatgaagggcattccttcttggattgtcatcttcctttctcctaaggagagaacactgggattttttgttttgagttctttgaattcagctggtagaatcagtgttctgtggctagaagtaatgattttcactgggccagtttggactctgaagagtaatgtatttaaggatctttcatgcaaagtgaatgattctagccacattcccacctagaaaactccaccacagtatcctcaggcccagggcactggcctctcaggggcactggatggtttgtgccgggatttaaaaagtgaaattttctttctctttaagcaacttattttcaactctctcaccaactgcctggggccccggaagctcttacacagtgggaaattatacaagaccaagagcaacaaggaactgcacggattcctcttcaatgacttcctgcttcttacctacatggtcaagcagtttgctgtttcctctggctctgagaaacttttcagctcgaagtccaatgctcaattcaaaatgtataaaacggtgagtatcacgcgtctgggggtagcatcaggggcctaatgaggtgttgcctctatcttaaggccttcctggcagaccctgagctggccttacgggaccctcctcacctggttccagatcgctcgtgcttcctttgctgcttcccacgggaagggccccatgcagctgggcactccccacctgccacaggccatcagccagattccagctgagattctggcttcctcctggccagcgtgacacctgggctcaccactgtgtgcattcagcattgggtctctgtaagccgagccccagcacagcaccagcgttgctagcagagagccttttgcaccagccgtcatgggcgcttggagctcctgtccccacccagtcccaacacctgacccacctcgataatgacttttccagaaatggaggcttcattgttcttacaaatggaggtttcatttgttctgtgtagaagaccttagacgctagacccctttctccttctcaacaaggctcttcagaacaaacagaactctctctggacataggcgggtggagtgttctagcccatctcacagcctgtgttttggccctaattctttcagcccattttcctgaatgaagtcttggtgaaactgcccacagacccttccagcgatgagcctgtcttccacatttcccacattgatcgggtctacaccctccgaacagacaacattaatgagaggtcagtcctgaccatgtgtggcctgccttgaactctgggagaaggcctggacgtctccctctgccataaacccatctccagccgtgcttaagccccactaattctgtatcctgaacctctcttaacacatcccctctgctccagtcccatggtaggccttggtcactgcagctgcctcctaacatgcttcccggcttctagtctctccccacaccactcagcagccttcccaaatggcagatcagcacctgaggccctgctacagtccctgcaggggctgcccgcaggcgacagcccactgtgctttgctggtttccgaggcctccttgggccacaggcctcagccctcgtccctccacctgcagactttcgcccctcaggcgcccttgtgtgggtgccatccccgctgttcccagcttccttcaggctgcagctccaacagtgcctccgcggcgccaacccggggggtgctgctgctcctctgtgtgcgctagaacccctcgtgacaggtatcatccgtggggccaatgcatcatctgtctccaggtcccagcgccttgcgagtgcctggcattttgtggtcagccaagaagggtcactaccagctctcatactccattagcataagcatctttcagttgactaatatcaggtctttgataggaaacttgtgaaagttgaggttagcaaaagactgaagaacatgtgcagagctctggggctccacgctgacctgtgagggtgggatgcggccaacggctgcccctgcttctcccgtaggaccgcctgggtgcagaagatcaaggcggcgtctgagcagtacatcgacaccgagaagaagaagcgtgagaaagcttaccaaggtatcagggtgcccggagggtgggacgcagcccccaggggccctaggaatgccggccactgctcctgcagtcaggctgatgatatagggacgggtctgaaagaccagacctgctgcgggatcagaccagagagccctcccctcttgaagctactactgcaaacctccctggggctcctgcccacacagacacgggctggcagtgccagctccgggacctccctctctgcaccacctctatcccccccactccactgcaccttctccactcctttctctccatgactcacctcacctctgcttgggctgtggtgctccattacatgccacacctgtggtctgtctcccttcagctcctgagcagccactgctcctcctcaccctcctctagggcctgccatccaccctctccctttgcagccagggggcctagaccctaagtctgccctctccccatccttctgcccctgcctcctcccccttctcacttcaccagacttcagtccacgtcctgtccccaccagtgacaccagtggcctagttagtggctcagctcactttccctgccccagctccctgcactgatggcagtcactgaggcgctgccttccctctggaccccatggccgccttcccagttcttcttccacccttgcccaggcctctccccgacctctgtagcgctctccctcggggaccccaccgacccccagcttcagggtcaggctagccacactctcccaagcccgcgcctctgaacagcaccctccagagaaccacctgccccgctgctcccacatcacacatcggcttttcccaagggaccaccagcctccttccagcagcagctcctcctgggaccctctgtggacagtagtgtggtccctggccacccaggcccctccctggcacctcacacctggtcagctgcactgcagtcctcctccctcgccactttcccatcgccctttcctgtccccgtatcacaggcccccgatctcccacccaggctgcagcacaaggctctctttcctctctgccacccatcctcttcatttctggagtattcttttttccagagctgctcttatacctcttcctgctgaagtatcttccctattgcctcccaaattaacgacacatttcttaccccacactcagggcccatccccactactacctgccacccagccccatccctagctctttcctgtgcccggcccatccagctgcctagttgagcagcccattgttgccctgcctggccttcccatgtgagctccccctccagctcaagtgctctgccctcaccttaaattcttcccatccttcaaggcccacgtcaaacacagcctcctccatgacaccctcttgccctaaccagtgtgacttctacctggaccccccgctgtcctgaggctgcgatcatcctccgggcgctcatcctctgttgcctctgcttgcgccctctcagtccctgcttttctcacttaatggccataagctccctcaaggcaactccctcccacatcggggccagcatgtgacttatgccagtggggctccagatttgttgcaccggtgatgtcctctgtgttcatggcacagatcactcacctgctcagtggagccgcaatggtctttgtaaagcaccccccaccccaccctgccccaccgtggccttcagaccagagctcccacattcttctccagcctccacatgaatgccaggccccaacctccctgctgcatctccagctgtgccaggccagcctgtggcctccaccccacagggggcctgtgctctgagccagctgcatctccaccttcctccccgccggccccctgcatctccaccttccttcccgccgggcccccccatgcagcctgccctcctgcctgggcctcccaccagcttcctggctgctatagttgcagctctttatgtgtttttttattcaggtttcccccattttgttatatactcctaaaaggtatgtttaaaacagcttttgctaatttagtgttattttaatggtactttaaaagcttgctgttgaaaaatcaatgattgatcatttcataacgcatatgatctcttaattggccaaagatgtcaatccggtttttctgcctgagttttgcttcccatcagcatctgcatatgttgctgtgcatcgtccgtgcgttcagtccttcccacatttgtcaattactttgtgccaggctctgtgctaggcttaactgagcctggactttggtatctgatgtttaaatgttgaccctgccatttagcagctctgagtggatcacactccagtcctttctaagcctcagtgtttctcatcagtaaaatggggagctacattatcaggtaattatgcagtttaaataatataatttacataagtctagcacatgcctaacacaaagtaagtatccagtaaatgttagctgctattaagtgctgcacaaataccatgtattattttattaatattactatttgctaggcaattgaggggttaatataaggatgatcgaaacagtccatgctctaccctggctcctgtctggcagaggagacagacattacacacgatttcagacccagcaggctgtgggctgctcataagcgagggatactggatgcagaggagggaagggatctgggaggtagatgtgggatcagacctgcatcttgaaggatgagtaggatgctgacgggcagagaaagcaggcagggcagaaagagcaagcaggggcttcctagcaggcaacacagcctggggaaaggcacagggcagccagatgctgggctgttgggcccagggcagtggcagatggggacagggagccggtagtgttatggttggtttgaaagacagggtctgcatccttggagaagagattaatgagacttgtcttcctcttttgtagcccgctcccaaaagacttcaggcattgggcgcctgatggtgcatgtcattgaagctacagaattaaaagcctgcaaaccaaatggtaaatactgccttgattcattcagcagacataactgccctgccccagtttttgctgatgactttttgagacagagtctcagtgtataacctaggctggagtgcagtggcacgatcttggctcactgcaacctctgcctctggggtacaagtgattctcaaggcttagcctcctgagtagctgggattacaggtgtgcaccaccacgcctggcaaattcttgtatttttagtagacacagggtttcaccatgttggccaggctggtctcgaactcctgacctcaagtgatctgcccgcctcggcctcccaaagtgctgggattacagcactttgtcactgacaaagtgccactgcgcccagccactgatgactcttctgaacactgaataaaggaatgctttctaacagtgtgtccagtgccactaaaatgcgcatattggaccaatattcttatcactgttttcccagtaagtgccagtgcccgccttcccgagtgtgtctgcgccgaggaagcatgcagcaggttgcagtgacactcacccaggattgttccgtgcggagtggtcctggcggtggagctctcggccactccccagttaatgctgctgtcagcactgggaacttggagaccctgttactagaccacagggatatggtgccccaggcagcggctcctgctgccatggtctcgagtgacccattattggaatcctgcttctgctcagggagggcactgtcagtcgcttcgttttacctgcatgcaccacatgtgtctgtggtttgtttttgttcaggaaagagcaacccatactgtgaaatcagcatgggctcccagagctacaccaccaggaccatccaggacacactcaatcccaagtggaattttaactgccagttctttattaaggatctctaccaagacgtgctgtgtctcaccctgtttgacagagaccagttttcaccagatggtaagtgtcgctcagccaggggatctaaaggctttcccagtttcctagatcctggagtccagatctaggggcttcagctgtgtgcagaccccatgccacttcagggaagtgacacaggcctgtgtcatctcgctttggcagcaggtgggtggccttcctcaggggaggaggtggcctgagatgtgtttcaggtctttgacccatcactccctacacacacgacgtgaacaccactcctggagcattctcagaatggagatttgaattccatgtggcagcttctcacacacaaacctgccatcattccccacacacccactcacgacattcaacagccatgagccaaaagaagttccttgtttcagatttgaaggttttatgaatccacttcttccggatgtagctctttaatgattttataaagaagaaagacttctgactctcctgtgtttattcaccagatttcctgggtcgtactgaaattccagtggcaaaaattcgaacagaacaggaaagcaaaggccctatgacccgccgactgctgctgcatgaggtccccaccggggaggtctgggtccgttttgacctgcagctttttgagcaaaaaactctcctgtaggggttctaaaggacagcaccagcgggacagcccacaaggctggggctggagaatgagagactgcgctctcttggggctgagggagcaccatgcagcttcacccctcacaaagccatgcacgctgggggctctgttttcctgcacactaaatagctagcaatctatgcaaacacctttcccataaagaaaccaaaccccatagtacagtgccttgtcctagtgttcacatgttcagctctgtttgtttagatgccaaggtttccattttcagggctataaaaagtattacttggaaatgaggcatcagaccaccagatgttaccgctcggttgaatgtgtccaccgtggagtggtttggtgacgctgtaaccattccacgccagtgacctctgctgggtcacagccactcaggaggggaagggtcaggatgagaggctgcagcctcgacacttggcgcggcctgatactgaaatagcgtctactcgtgcactgaataaaaacagaaacttgatcattttattcctgattagattttatcactctctgctaagacaatatagtctggagtataagtgggaaagcttgatttaaatactgtgaactctaataatgtggaaaatatttttcaactttaattttctgaagtataaattatttatgtaaattcattgtttttgcatatttcttaggacatgcatctttaagctttatcattgcccatatgtacagaaagagaataaagacatatgtttatggatggaacttcgtcaaagtctgactgatttactttctatatgaaagctgctttttttctttttaattttctcagccagatgaaaggctcttaaaaggtaccttcacaagttgcctataatgaaaccaagtttccttcctggtacgtgggaaaaccaaggacagagtgaggatgaggtcaggagacccagggcctcatcttgactctgccactaatttgctctgtgactttggtgaatctacctcgtgtttctggggctgggtttctttaat

SEQ ID NO: 5814 - DNA, 19011 bp, Homo sapiens; identical to SEQ ID NO: 5813

SEQ ID NO: 5815 - DNA, 164 bp, Homo sapiens
ccccccccctttttttttttttttttttttttttgagacagtgtctcactctgtcgcctaggctggagtgcagtggtttgatctcagctcactgcaacctctgcctcctgggttcaagcaattctcctgcctcagcctcctgagtagctgggactacaggcgcc

SEQ ID NO: 5816 - DNA, 164 bp, Homo sapiens; identical to SEQ ID NO: 5815

SEQ ID NO: 5817 - DNA, 276 bp, Homo sapiens
ttttttttttttttttttggagatgaagtcttgctcttttgcccaggctggagtgcagtggtgcgatctcggctcactgcaacctccacctcctgggttcacaccattctgctgcctcagcctcctgagtagctgggactacaggcgcccaccaccacgcctggctaattttttgtaattttagtagagacggggtttcaccgtgttagccaggatggtctcgatctcctgacctcgtgatacacccaccttggcctcccaaagtgctgggattac

SEQ ID NO: 5818 - DNA, 276 bp, Homo sapiens; identical to SEQ ID NO: 5817

SEQ ID NO: 5819 - DNA, 1081 bp, Homo sapiens
aatttattgggtctatctttgaccacgtgataccacttacctgattctatgtactgattaatgtatctaacagttttatagtgaaagtactttttaaaaaagtatttgaatggtcatttctatttttccccctttgctgtacaagttaatttttactcatcttttgctgtacaaattaactttcatcaatacaaataagaggctagttttaagtcaatttatttgtcatgagcccaggaacaattaaattctataaagtaatgtattaaaatagtacactttaaaaattattttccttctttttttctctttaaattttaagaccatcataataaattatcattacaaagtcaaacatactatatactactatcagtcaatggggaaaaaataagtcatatgttttatggtaaaatgctgtaatagattggattgtcaaatttgcttgaaaaaaatcacagcagtttttagtttttcttatttgtagattacacgttactcagaaaataagtatcaaagtgctaaaagtaataggtgtaattgctgttatttgtcaaaatcagtttacatttttgtgggaaatacagaatcacaaatatttctttctggcattatgtcctgagttaaattctagaaaatttagcaccttttatactcatatagctgtgacaataactttaaatatgtgaacattaggaaattcaaagcttatatattcttagaagctaattttgaccacgtgcgcaaattatttttcttttttagtagaatggtgcattttttgcctttgtatttgaaatttagctaaattacaatagctatcagaactacaattgaccttagtaatttcaaaaccatagttataagggttttaagttgatttttaaaaatcttaagatatgatagggatttcaaaactatgtgtgtgtatctctgatagggaggggttggggcacagactaataagtgtgccaaaaatctgtgaatccaaatgtgtaacaagtgttgtctgaataaatgtccacaaatccatgctattattggttaacaaaaaataaattcactttgaaatgttgctgaa

SEQ ID NO: 5820 - DNA, 2013 bp, Homo sapiens
catttttggcattacaaatgaatttcattttcttgaggatgttgtatgtaatgaaataattatttttctcagctgataggaaaatgtctctggtaagatgttagctggtagaaggaagttttatgtggaaagggtttacaacagttggatttaatacatttgaaatgttttacatttaattttacatctaatacaaaaggtaggagagcagacctataccagccttgactaaaacaaataaataccagtgggctataaagagaacattttaaatacaggcgaagtctttcactctataattggtacatatctttatactagaaaatttcttgaatgaatatgattgccttggcaaatataatcagttatgacttttttccccatagattttgtgggttttattattttttttctctgatgaaactctgagacattgccaaatgttgcagaaaatagaagtcagagtgccaaaataattctctggagctctcaggactttgggtgaccttgaaggaattcaatcctctcatacatagaaaccttgaagataatgaaggaaattcaccttatcacaggggaattaaaaccacatcttttctagcagataaatgcttccaagaatactagaaccccaaattttggctatttcagggggaagtatcatgtatttcacttgaaatgtgtagtagtttaatatatgtctataaagaaaggagcagtagcagctgttttaatgatcatccattaaaaattaactgaagaatggtaggacacagattccagcaccatattgctaggaacttagtaaagtacttagtttttttccaccttgattattactttcagattttaatataaaagagaggaattcattgttctgacaaatggtatctttggagcctttaagagtaaaaccttttaatttggtattgaatttattgggtctatctttgaccacgtgataccacttacctgattctatgtactgattaatgtatctaacagttttatagtgaaagtactttttaaaaaagtatttgaatggtcatttctatttttccccctttgctgtacaagttaatttttactcatcttttgctgtacaaattaactttcatcaatacaaataagaggctagttttaagtcaatttatttgtcatgagcccaggaacaattaaattctataaagtaatgtattaaaatagtacactttaaaaattattttccttctttttttctctttaaattttaagaccatcataataaattatcattacaaagtcaaacatactatatactactatcagtcaatggggaaaaaataagtcatatgttttatggtaaaatgctgtaatagattggattgtcaaatttgcttgaaaaaaatcacagcagtttttagtttttcttatttgtagattacacgttactcagaaaataagtatcaaagtgctaaaagtaataggtgtaattgctgttatttgtcaaaatcagtttacatttttgtgggaaatacagaatcacaaatatttctttctggcattatgtcctgagttaaattctagaaaatttagcaccttttatactcatatagctgtgacaataactttaaatatgtgaacattaggaaattcaaagcttatatattcttagaagctaattttgaccacgtgcgcaaattatttttcttttttagtagaatggtgcattttttgcctttgtatttgaaatttagctaaattacaatagctatcagaactacaattgaccttagtaatttcaaaaccatagttataagggttttaagttgatttttaaaaatcttaagatatgatagggatttcaaaactatgtgtgtgtatctctgatagggaggggttggggcacagactaataagtgtgccaaaaatctgtgaatccaaatgtgtaacaagtgttgtctgaataaatgtccacaaatccatgctattattggttaacaaaaaataaattcactttgaaatgttgctgaa

SEQ ID NO: 5821 - DNA, 3971 bp, Homo sapiens
agccaaattctaagctggttcttcccacaacacttctgacagcacaagaaaatgatgttaatttaccagtagccgctgaagatttttcccaggtaccaaattaatagcacttgtattttacttaaaatgagaattgaaacactgttgccttagcgtggtaccccgtcaagagccaagcctctggagtcagatagcttcaaatcatgcctcctttatttcctaactcaagtctgaatataaatctagttcacccaagctgtgccctagaacacattacttagcctcttttaagccttaattccctatctttaaattaaagaataaaataatggccaggtgcaatggctcacacctgtaatcccagcactctgggaggttgagacagtggatcgcttgagtccaggagtttcagaccagcctgggcaatgtggcaaaatgccatctctacaaaaaatacaaaaattagctcggctcctgtagttccagctacttgagaggctgatgtgggcagcagattgcttgtgcccgggaggcagaagttgcagtgagcccagattacaccactgcactccagctggtgacagagtgagactcttgtctcaaaaaaaatgaataagtaaataaaacataaaaataatatatataaaagtaaggtagcgatttcatttacatctctgtatctgcatgcaatacctagctcagtaatttacatatagtaggtgcttgataagtgtttattacattgaaatttgtaaaaagtgtttcataagaaatgtattgcataagaaatttaatgctgaggtaagccaatggcccatgcaatcttgtgtactgaaaaaataggttaattactcaccaagatgttaatctaaaaaagttcaatattaagtagttttttatttgtgtattggcaattcgttcaaaattacccattttgaactaatttatgaataagtattcatggtattatgcagcaggacatgttacggatgaaaccaaaaaatacgtaagataaagattgtttatggaacacatgattatgtggggttcagtattaccaatctgtgaccaagcaatgatcaggaaaaactagttaataatgaaaaagtatctgttaataacttcggtataaaaaaaatttttgtgaccatgattaggcaaacatttctgggatatgataccaaaggtactatctatgaataataattttttaaattggtcttatcaaaaataagaacttctgttcttcaaaacacagttaagagaattaaaaggcaagccactgactgggagaaaatatttacaaatcacttatcttatcaaagacttctgttcagaatatataaggagctcacataactcaatattaagaaaacaaacaatccagttgaaaaatgaacaatagatttggaacagtcctttacccagagaagataatataaatggcaaataagcacataaaaagattcttagctgggcgtggtggctcacgcctgtaatcccagcactttgggaggctgaggcaggtggatcacgaggtcaagagatcgagaccatcttggccaacatggtgaaaccccatctctactaaaaatacaaaaattagctgggtgtggtggtgtgcacctgtagtcccagctactcaggaggctgaggcaggagaatcacttgaacccagaaggtggagtttgcagtgagccaagatctcgccactgcactccaccctggtgacagagcaaaactccttcttgaaaaaagaaaaaaagattctcagcagagttagtcattaggaaaatgcaaaataaaaccacaatgagctaccaccacacatccattagaatatctaaaatctaaaaggcggtcatgccaagtgtcggcaaggatgtggagcaactgaactctcatactttgttgattgggaatgtaaaacgatccaacccctatggaaaagagcttggccatttaaaaatatacacccaccatatgaaccatgcatttcactcctagtttctcaagagaaactaaaacatatatttacacaaagacatgtacgtgaatgttcatacaaccttatatttgtagtaaccaaaaactgaaaacaacacaaatgtcaatcaactggtaaatggacaaattgtggtgtatcctgtacagtggaatacttagcaaccaaaaggcatgaactatgaatacaaacaataacatggatggttcttacaaaagttatgttgagtaaagaagccataccaaaaaaaaaaaacactgattttatttatataaaattttagaaaatgcaaactaatttatagtaatagcatttcagttattttggggtgatggtaggagttagaggtggaaagggcaagaaggagaagataaaagggtgtgagaaaacttttgagattgatggatatgtttattgtattatcttgattgtggtgatggtttcatgggtttataggtaggtcaaaacagcaaattggacactttaaatatgtgcagtttattgtctgttacatgtatctcaataaaactttaacaataaaagaaagattacttccttttaattgatggcttgttttagaataaaactataaagtgttaccagaagaaagggcctcaaaaaattcccttgttagatttctttagctagcagggacttatggttagtaataatagcacacatttatagtgctagatgctgttctaagttttttacgtattttaacttatttaatcattataacagcctaatgaggtagttgttactattatccccatttcatgaatgaggaaattgaggtattgagcagttaaataacttgcccaaggtcaaagctagaaaatgccttacccagatttgaacacaggcagtttagctcctgtggtcacagctcttattcgctgtgagtaagtaaggaaaccaatagaaacgttcaaagtctcagcagccagagccagaggtagtcctagtacccatcttagaaatacacaccaagataatatttccttcgaggcagaaacatacatgactaacggctctaaacttggaagaccagagttaaggctagttattattactgcagcttagagctactaatttttacccctagataaagaggatgcctgtcagaggtgcagtgattacattgtgtccatgtggacagatgttttagattcttctatggttgtatttattgataagggtccagggatttctttttaagttcctgttaaagctattttcaggggctcatttataattaagcgcataaaataggaaagagaagaaagaaaatcacacaatttgtgatgtgtgattacgaagagatttatgactactgtaaatttcaaatttggttatgttatatgagagatgatagtgcttatggtggagcgtatgtttcttgaatagcaaatggaagataacaatacctactcacacttctgagaattaaatgatgttactatatataaaagctcttcgaaaattgcagtgcattatgcagattttcattttatgcaaaaagtggttatatggaagagtttgctgccaaattaagttcttatcctgtctaaatccattatatgtatataaagtagtttgattcataagtagctctgaattctctaatgaaaatagacagaaatgacttgaatatttgaaatctgtatatatgatccaaatctttttaaaggtttttttttgcaacgtcttttcttttgtaataggtacctcatcacctatttattggtagaagtgcgaataaataaaaagcaataaaaagcaactagaaagcaagcatattattaaaattttataaacacttgaataatttgacttctcagatttttttaagtaactaaaaaataatattatgacttcatatcttaaattatttagtaccaactaaagcaaaatcaggatgttaagcaagttgaacacaaaccatcacaaagttacctacgtg

SEQ ID NO: 5822 - DNA, 2849 bp, Homo sapiens
aaagcactagtggcttgccagattgttctaccagacccaggtattgcaggctttactgtcattgactacttccatcaacttttgcagacttttaatttcaggaaacttcagtgtgactctcaggcacctaacaatcacttacttgctttagatcactcaaatagtgatctcagcagcatatatacttctgacagcacttctgattttttcaagtcctgcagcaaggatactttttcaaaattctggcagccatcacttgaattcacttgcattgtttcacaactaacagataatgatgatttttcagcttcagaacaaagtaaggcctttggtactcttcagcagaacagaaagtccatctccattgcagaggccctggttccagtagctgccatgatcccattcaggattcatggagccttgtttcatatatggataaaaagagtacagcagaaaagttgggtaaagaacttggcttacaagctaaggagctgagtgcagttcacagcagtcatcatgaaattggagttaatgactctaatttattctctttggaaatgcgagagccccttgagtcaagtaatgcaaaatccttccacagtgcagtggaaattaaaaataggtcccagcatgagctgccatgttttcagcatcatggtatagataccccaactagccttcagaagagatctgcatgttgtccaccttcgttactcagacttgaagagacagccagcagttcccaggatggtgaccctcaaatttgggatgatctgccattctctgaaagcctgaacaagtttctggcagttcttgaaagtgagattgctgtaacccaggcagatgtcagtagtaggaaacatcatgtagataatgacattgataaatttcatgcagaccacagcaggttatctgtgactccccagagaactactggagccctgcatacaccacctatagctttaagatcatcacaagtaatagtcaaagcaaactgtagcaaagatgacttccttttcaactgtaaaggaaatctaagtcctagtgttgaaaaggagtcacaaccagataacaaagtagaggctgtctctgtaaatcataatggaagagatatgtcagaatattttttaccgaatccttacctgtcagctctgtcttcatcttcaaaagatttagaaacaatagttactcttaagaagactatcagaatctcaccacacagggagagtgaccattctagtctaaataacaaatatttgaatggatgtggagaaatatcagtttcagaaatgaatgaaaagttgacaactctgtgttataggaagtataatgatgtctctgatctttgcaaattagaaaataaacaatattgtaggtggtccaagaaccaagatgacagttttacaatttgcaggaaacttacatatcctttagaaactctttgcaatagtccaaatagaagtacaaatacattgaaagaaatgccttggggacatatcaataacaacgtaacacagagctattctattggttatgaaggtagctatgatgcctctgctgatctctttgatgatattgctaaagaaatggacattgcaactgagattaccaaaaaatcacaggatattttgttaaaatggggaacatctttggcagaaagtcacccttcagagtctgatttttcactgagatcactttctgaagacttcatccagccttcacaaaaattatccttgcaaagcctatctgactctaggcattcaagaacatgctctccaacacctcattttcaatcagattcagaatataattttgaaaatagtcaagactttgttccatgttcacagtcaactccaatttcagggttccaccaaacaagaattcatgggataaacagagctttcaaaaaacctgtattttattcagatcttgatggtaactatgaaaaaataaggattttccctgaaaatgacaaacagcaagccagcccaagctgtccaaaaaatataaaaacacctagccagaaaatcagaagccctattgtatctggtgtttcacaaccagacgttttcaatcactacccttttgctgagtgccatgaaactgatagtgatgaatgggtccctcctaccacacaaaaaatatttccttcagatatgcttggattccaaggcataggtctagggaaatgccttgctgcctatcatttccctgatcaacaagagttaccaagaaagaaactgaaacatattagacaaggaaccaataaaggtttaattaagaagaaattaaagaatatgcttgcagcagttgttacgaaaaagaaaactcataaatataactgtaaaagttcaggctggatttccaaatgtccagacattcaagtcttagcagcacctcagctgcaccctattcttggacctgattcttgttcagaagtcaaatgttgccttccattttcagaaaaaggcccaccttcagtgtgtgaaactcgaagtgcttggtcacctgaattgttttcataaaaagtcacctgaacccaattcctgaacttttaaatctgtttggaaatgtttgccttcaggggtacggaaagcattctttacattttgaacacttggagagaagcaaattgaaaacaggactctgctgggagctactgtgccttttaaaatataaagccattgttttccccagggttttatctagaatactatgattaggtagttgagcactttatcttatactgtttattgtactttaataatattgttaagattgtttttgaaagtattaatgtttgttaaaatcacatatacatccagaaataaagactttgcaaaccaaaa

SEQ ID NO: 5823 - DNA, 2850 bp, Homo sapiens
aaagcactagtggcttgccagattgttctaccagacccaggtattgcaggctttactgtcattgactacttccatcaacttttgcagacttttaatttcaggaaacttcagtgtgactctcaggcacctaacaatcacttacttgctttagatcactcaaatagtgatctcagcagcatatatacttctgacagcacttctgattttttcaagtcctgcagcaaggatactttttcaaaattctggcagccatcacttgaattcacttgcattgtttcacaactaacagataatgatgatttttcagcttcagaacaaagtaaggcctttggtactcttcagcagaacagaaagtccatctccattgcagaggccactggttccagtagctgccatgatcccattcaggattcatggagccttgtttcatatatggataaaaagagtacagcagaaaagttgggtaaagaacttggcttacaagctaaggagctgagtgcagttcacagcagtcatcatgaaattggagttaatgactctaatttattctctttggaaatgcgagagccccttgagtcaagtaatacaaaatccttccacagtgcagtggaaattaaaaataggtcccagcatgagctaccatgttttcagcatcatggtatagataccccaactagccttcagaagagatctgcatgttgtccaccttcgttactcagacttgaagagacagccagcagttcccaggatggtgaccctcaaatttgggatgatctgccattctctgaaagcctgaacaagtttctggcagttcttgaaagtgagattgctgtaacccaggcagatgtcagtagtaggaaacatcatgtagataatgacattgataaatttcatgcagaccacagcaggttatctgtgactccccagagaactactggagccctgcatacaccacctatagctttaagatcatcacaagtaatagtcaaagcaaactgtagcaaagatgacttccttttcaactgtaaaggaaatctaagtcctagtgttgaaaaggagtcacaaccagataacaaagtagaggctgtctctgtaaatcataatggaagagatatgtcagaatattttttaccgaatccttacctgtcagctctgtcttcatcttcaaaagatttagaaacaatagttactcttaagaagactatcagaatctcaccacacagggagagtgaccattctagtctaaataacaaatatttgaatggatgtggagaaatatcagtttcagaaatgaatgaaaagttgacaactctgtgttataggaagtataatgatgtctctgatctttgcaaattagaaaataaacaatattgtaggtggtccaagaaccaagatgacagttttacaatttgcaggaaacttacatatcctttagaaactctttgcaatagtccaaatagaagtacaaatacattgaaagaaatgccttggggacatatcaataacaacgtaacacagagctattctattggttatgaaggtagctatgatgcctctgctgatctctttgatgatattgctaaagaaatggacattgcaactgagattaccaaaaaatcacaggatattttgttaaaatggggaacatctttggcagaaagtcacccttcagagtctgatttttcactgagatcactttctgaagacttcatccagccttcacaaaaattatccttgcaaagcctatctgactctaggcattcaagaacatgctctccaacacctcattttcaatcagattcagaatataattttgaaaatagtcaagactttgttccatgttcacagtcaactccaatttcagggttccaccaaacaagaattcatgggataaacagagctttcaaaaaacctgtattttattcagatcttgatggtaactatgaaaaaataaggattttccctgaaaatgacaaacagcaagccagcccaagctgtccaaaaaatataaaaacacctagccagaaaatcagaagccctattgtatctggtgtttcacaaccagacgttttcaatcactacccttttgctgagtgccatgaaactgatagtgatgaatgggtccctcctaccacacaaaaaatatttccttcagatatgcttggattccaaggcataggtctagggaaatgccttgctgcctatcatttccctgatcaacaagagttaccaagaaagaaactgaaacatattagacaaggaaccaataaaggtttaattaagaagaaattaaagaatatgcttgcagcagttgttacgaaaaagaaaactcataaatataactgtaaaagttcaggctggatttccaaatgtccagacattcaagtcttagcagcacctcagctgcaccctattcttggacctgattcttgttcagaagtcaaatgttgccttccattttcagaaaaaggcccaccttcagtgtgtgaaactcgaagtgcttggtcacctgaattgttttcataaaaagtcacctgaacccaattcctgaacttttaaatctgtttggaaatgtttgccttcaggggtacggaaagcattctttacattttgaacacttggagagaagcaaattgaaaacaggactctgctgggagctactgtgccttttaaaatataaagccattgttttccccagggttttatctagaatactatgattaggtagttgagcactttatcttatactgtttattgtactttaataatattgttaagattgtttttgaaagtattaatgtttgttaaaatcacatatacatccagaaataaagactttgcaaaccaaaa

SEQ ID NO: 5824 - DNA, 5646 bp, Homo sapiens
tccagtggcgagttctttggcagtgcctcacagccagcggtagaacttgttagtggctcacaatcagctctaggcccacctcctgctgcctcaaattcttcagacctgtttgatcttatgggctcgtcccaggcaaccatgacatcttcccagagtatgaatttctctatgatgagcactaacactgtgggacttggtttgcctatgtcaagatcacaggtaagttgtctggttcccttggaatttgttatttataatctttgagatgctctaactcattgaatgatagattagtataaaacagaaaaataagcaagtcctttttatgtgtatgaatatgtgtctgtgtgtgtatatatacgcatttgcacatttcatttacctcatactctcccctagcatagtcatttgcattctggaaggcaagaccttctcccccatcttgtagtcactgtaaagccaagcatggtgcctttgcacagaggaggaacatggcaaaaatttattgttacaacaaattggtacttgatagtttttttaaattgtctttaagaaaaagaaataggccaggcgcagtggctcacccctgtaatcccagcactttcggaggctgaggtgggtggatcacttggtcaggagatcaagaccatcctggctaacacggtgaaacccagtctctactaaaaatacaaaaaattagccaggcatggtggcaggcacctgtagtccctgctacttgggaggctgagtcaggagaatggcgtgaacccaggaggtggagcttgcagtgagctgagatcgcgccactgcactccagcctgggcgacagagtgatactccgtctcaaaaaaaaggaaaagaaaaagaaatagagatattgtttcacttacggcaagtatccacttagtaaaatttctggtcatgtccctaaagaaatatcactcattggttgtaaataattattgctaatatggaaaatcattctctcgaatggtgaatgttcttcccaattctggacctgctctacattatataaatgttttataggctcatctttcaactttcattttcataaagaaaaacaaccaaaatgggagcttcttaattcactattttatagttaaatccgaattacctagtactagcttagaattcagacaagtgcaggcttggaaaatatgtgtctgaatggtaccaggaacttgctatttttgactcaaactattgagaatatgtgtttatgatgctaattactcattttaatgtgtagattctcgtctttggggtattaggatgaaggaaaagaagaaagaagcagaaaggtgactgctctatgtaacagaaataagacctaatgtatgagttaagcataaagtcagtctactttatttgcagtcttaattgtaactgtcataattctttgcattggtacatttttaattattcttcctcttcctgttccttttttctgtccttttcagttatcctcaataaccactaggaacctctgcttctttctcctgaatttcttctttctcctacattgttccatatattaatcagttcagttagtgttgctcactttagatagtaaaagtatacacagaacagcaaaatgtcaggatatgtgaaatataaattgctttttgacagttttgccttatatccttgtataatgtgagacatcatatcctgaattctctgttttgttttgttgttttgaaacagagtctcgctctgtcgcccaggctggagtgcagtggcacgatctctgctcactgcagcctccacctccttggttcaaagtgattctcctgccttagcctcccaagtagctgggactacaggcatgtgccaccatgcctggctgattttgtatttttagtagagatggggtttcatcctgttggccagtctggtcttgaacttctgacctcaggtgatctgcccacctcagcctcccaaagtgctgggattacaggcataagtcactgcgcctggcctctgaattctgttttgaaagaataaatgtccacttgtgtatctccttaaagctgtactaacctaaaatcggtagttcccctgggcatttgccagggatggtggcttctagactttgagtgatgggagaataattgttagtgtaggtaagttgttggttttatccacctcaaacctgattgggacttcagaggaacctctttgggaagctaatgattcagggtattgaagacattagcatagaacattagtggttctttttgtttcagaagttcattgttgtgattaaattgccatctgataatttttatagaacagatgcttaatttttagagcatttttctattttccagcctttgcaaaatgttagcacagtgctgcagaagcctaatcctctctataatcagaatacagatatggtccagaaatcagtcagcaaaaccttgccctctacttggtctgaccccagtgtaaacatcagcctagacaacttactacctggtatgcagccttccaaaccccagcagccatcactgaatacaatgattcagcaacagagtaagttaccttaagacgtcccacttctttgtgtacttgcagtcttttgccttaatgccaggactacttcaaactataaataaaaatatatcacataaattgtaacagttaaccaaatgcctgttcacttaagatattttcacataatatttactgggtattcctcctggcacattgaattactttatattctattcttgtcctgataacatttattgtattgtggagagttttaaggacctgatcactaaaataaaaatttgctatacagatttttttttaaatataggcaaatacgatggacaaacaaaaatcatctgattctgccgttgaggggtaattgccattaatacatatttctttctatgttttctttttttttttttttttttttctgagatggagtcttgctctgtcgcccaggctagagtgcagtggtgcaatctcagctcactgcagcctccacctcccagttttaagcaattccttgcctcagccttccgagtagctgggactacaggcgtgcaccgccacacctggctaatttttatatttttagtagagacagggtttcaccctgttgtccagtctggtcttgaactcctgacctcaagtgatccactcgccttggcctcccaaagtgctgggattacaggcgtggggcaccgcgcctggccactttccatcttttctaagcatatttttaatacttgggatcattctctctatactgtttcttattcaacattaagttatcattttccctgtgttgaataatattcttaggaaaatgattgttagctcttgatagttatattagtgtatgatttcccttgctaattatttcaattgtttccagctatttgttattataaatcaagattttgtataaatcttcatacttctgtttttttcttaatagaatgttctaaaaataagtcaaaggatataaactttttaaagatttttgtataaatcttcatacttctgatttttttaatagaatgttctaaaaatagaataagtcaaaggatgtaaacctttgaaagattttttatacacactagctcttgacaacttgttaagtaggatttaacaataggttttgtaggaatgtttttaagttggctgtttttccccagtctactcttactgtttctacatctctggggaaccagagccaatagtcactgaatatatgtctcaagaggaaccagtgcagagtaattgatttctaataaaatcactgttaaggaattttattggggctaaagaatgtatagatagatggtcagaagttattagttctctgttctatgaacctaaaaatttattgtggtaaagttcttctgtctgttttcgtctggtagatatgcagcagcctatgaatgtgatgactcaaagttttggagctgtgaacctcagttctccatcgaacatgcttcctgtccggccccaaactaatgctttgatagggggacccatgcctatgagcatgcccaatgtgatgactggcaccatgggaatggcccctcttggaaatactccgatgatgaaccagagcatgatgggcatgaacatgaacatagggatgtccgctgctgggatgggcttgacaggcacaatgggaatgggcatgcccaacatagccatgacttctggaactgtgcaacccaagcaagatgcctttgcaaatttcgccaattttagcaaataagagattgtaaaagaagcagattgaatgaagaatttttagctgtgcagataggtgatgttgggatggaaaatgctaatcaactaccctttcttttatcaagtaattaaaataaatctacataaagaaccaaaaaggctgttttataaaagtgaaatatccagtatttcagagggccaggcaagagcacttcagatgaggcagtcaaaatcatttttttccagtgaggatagaccacaagtgggtggtgagaccattgaaagcctttatcaactgaagagtccatttaacagcataatttgtgggaagactggaatagggctgaataaatgtgtttgaatctctaattttatactttcttttcctgaggaacttgatttttctgtccctggatcgccttgtcataattgggtctgttccttttactaccactcttgagtccatatatgaaatcattaaagttggatgatcagttttttataaaaatatatatttttgtccaagaaaaaaaaaagcatacatatgtgattatggctaaatcaaaggtaactggaatgtatatacttttgctaatgttccagcaacactgctattatactatccaaatttttattgtaacaaaacctctttaagcaattggtgattgccatgggacttttcccatgtcttctgctgtaattatcctgtgcagaactaggaagaaatttttttcaggactgctctatggtttcctttaaaagaaaaaaacttctgtttgtttttagcagtcattatttacaatttgcagtgattaacttggcaaggcttccttccgtgtttatccctgtagccatcatttaagtcaggaacagtcagaaaaatatttattttattttttttttgggtgtctgcaaaggtaaaaatccattaaaaccttaagttaaatataaatgttacaactcaatgtttgcttttagattttatacagtatttgttttgttttggttttgagtgtatataatgcagcattagcaatatggttccaatagaggagttaaatatatattgttaaaggagacctgtagcagtcaaagattttattgatttaatgacaaaggaaattaatgaaaatgtttttgtttttctgctgtaattctgcattaagctcacatgaaaatcatgattctagagtttggaatgcaaaattaattgttttaccctcaagctgggaatatttttcaaaataaatactataatatagatatcaaattattacctccccatgttatgttgaaaatttttttattaaattgataaaactttatttccattatattcataatgttctgttatacataacattaaaatgttcattaaaatcaatgttgaactgc

SEQ ID NO: 5825 - DNA, 3732 bp, Homo sapiens
gtctggtcttgaacttctgacctcaggtgatctgcccacctcagcctcccaaagtgctgggattacaggcataagtcactgcgcctggcctctgaattctgttttgaaagaataaatgtccacttgtgtatctccttaaagctgtactaacctaaaatcggtagttcccctgggcatttgccagggatggtggcttctagactttgagtgatgggagaataattgttagtgtaggtaagttgttggttttatccacctcaaacctgattgggacttcagaggaacctctttgggaagctaatgattcagggtattgaagacattagcatagaacattagtggttctttttgtttcagaagttcattgttgtgattaaattgccatctgataatttttatagaacagatgcttaatttttagagcatttttctattttccagcctttgcaaaatgttagcacagtgctgcagaagcctaatcctctctataatcagaatacagatatggtccagaaatcagtcagcaaaaccttgccctctacttggtctgaccccagtgtaaacatcagcctagacaacttactacctggtatgcagccttccaaaccccagcagccatcactgaatacaatgattcagcaacagagtaagttaccttaagacgtcccacttctttgtgtacttgcagtcttttgccttaatgccaggactacttcaaactataaataaaaatatatcacataaattgtaacagttaaccaaatgcctgttcacttaagatattttcacataatatttactgggtattcctcctggcacattgaattactttatattctattcttgtcctgataacatttattgtattgtggagagttttaaggacctgatcactaaaataaaaatttgctatacagatttttttttaaatataggcaaatacgatggacaaacaaaaatcatctgattctgccgttgaggggtaattgccattaatacatatttctttctatgttttcttttttttttttttttttttctgagatggagtcttgctctgtcgcccaggctagagtgcagtggtgcaatctcagctcactgcagcctccacctcccagttttaagcaattccttgcctcagccttccgagtagctgggactacaggcgtgcaccgccacacctggctaatttttatatttttagtagagacagggtttcaccctgttgtccagtctggtcttgaactcctgacctcaagtgatccactcgccttggcctcccaaagtgctgggattacaggcgtggggcaccgcgcctggccactttccatcttttctaagcatatttttaatacttgggatcattctctctatactgtttcttattcaacattaagttatcattttccctgtgttgaataatattcttaggaaaatgattgttagctcttgatagttatattagtgtatgatttcccttgctaattatttcaattgtttccagctatttgttattataaatcaagattttgtataaatcttcatacttctgtttttttcttaatagaatgttctaaaaataagtcaaaggatataaactttttaaagatttttgtataaatctttatacttctgatttttttaatagaatgttctaaaaatagaataagtcaaaggatgtaaacctttgaaagattttttatacacactagctcttgacaacttgttaagtaggatttaacaataggttttgtaggaatgtttttaagttggctgtttttccccagtctactcttactgtttctacatctctggggaaccagagccaatagtcactgaatatatgtctcaagaggaaccagtgcagagtaattgatttctaataaaatcactgtaaaggaattttattggggctaaagaagtatagatagatggtcaagaagttattagttctctgttctatgaacctaaaaatttattgtggtaaagttcttctgtctgttttcgtctggtagatatgcagcagcctatgaatgtgatgactcaaagttttggagctgtgaacctcagttctccatcgaacatgcttcctgtccggccccaaactaatgctttgatagggggacccatgcctatgagcatgcccaatgtgatgactggcaccatgggaatggcccctcttggaaatactccgatgatgaaccagagcatgatgggcatgaacatgaacatagggatgtccgctgctgggatgggcttgacaggcacaatgggaatgggcatgcccaacatagccatgacttctggaactgtgcaacccaagcaagatgcctttgcaaatttcgccaattttagcaaataagagattgtaaaagaagcagattgaatgaagaatttttagctgtgcagataggtgatgttgggatggaaaatgctaatcaactaccctttcttttatcaagtaattaaaataaatctacataaagaaccaaaaaggctgttttataaaagtgaaatatccagtatttcagagggccaggcaagagcacttcagatgaggcagtcaaaatcatttttttccagtgaggatagaccacaagtgggtggtgagaccattgaaagcctttatcaactgaagagtccatttaacagcataatttgtgggaagactggaatagggctgaataaatgtgtttgaatctctaattttatactttcttttcctgaggaacttgatttttctgtccctggatcgccttgtcataattgggtctgttccttttactaccactcttgagtccatatatgaaatcattaaagttggatgatcagttttttataaaaatatatatttttgtccaagaaaaaaaaaagcatacatatgtgattatggctaaatcaaaggtaactggaatgtatatacttttgctaatgttccagcaacactgctattatactatccaaatttttattgtaacaaaacctctttaagcaattggtgattgccatgggacttttcccatgtcttctgctgtaattatcctgtgcagaactaggaagaaatttttttcaggactgctctatggtttcctttaaaagaaaaaaacttctgtttgtttttagcagtcattatttacaatttgcagtgattaacttggcaaggcttccttccgtgtttatccctgtagccatcatttaagtcaggaacagtcagaaaaatatttattttattttttttttgggtgtctgcaaaggtaaaaatccattaaaaccttaagttaaatataaatgttacaactcaatgtttgcttttagattttatacagtatttgttttgttttggttttgagtgtatataatgcagcattagcaatatggttccaatagaggagttaaatatatattgttaaaggagacctgtagcagtcaaagattttattgatttaatgacaaaggaaattaatgaaaatgtttttgtttttctgctgtaattctgcattaagctcacatgaaaatcacgattctagagtttggaatgcaaaattaattgttttaccctcaagctgggaatatttttcaaaataaatactataatatagatatcaaattattacctccccatgttatgttgaaaatttttttattaaattgataaaactttatttccattatattcataatgttctgttatacataacattaaaatgttcattaaaatcaatgttgaactgc

SEQ ID NO: 5826 - DNA, 719 bp, Homo sapiens
ctacattatataaatgttttataggctcatctttcaactttcattttcataaagaaaaacaaccaaaatgggagcttcttaattcactattttatagttaaatccgaattacctagtactagcttagaattcagacaagtgcaggcttggaaaatatgtgtctgaatggtaccaggaacttgctatttttgactcaaactattgagaatatgtgtttatgatgctaattactcattttaatgtgtagattctcgtctttggggtattaggatgaaggaaaagaagaaagaagcagaaaggtgactgctctatgtaacagaaataagacctaatgtatgagttaagcataaagtcagtctactttatttgcagtcttaattgtaactgtcataattctttgcattggtacatttttaattattcttcctcttcctgttccttttttctgtccttttcagttatcctcaataaccactaggaacctctgcttctttctcctgaatttcttctttctcctacattgttccatatattaatcagttcagttagtgttgctcactttagatagtaaaagtatacacagaacagcaaaatgtcaggatatgtgaaatataaattgctttttgacagttttgccttatatccttgtataatgtgagacatcatatcctgaattctctgttttgttttgttgttttgaaacagagtctcgctctgtc

SEQ ID NO: 5827 - DNA, 328 bp, Homo sapiens
tctggctgcgccatgatctcaaccggctaatgccgagagtttgggatgacagctttctgcctctagtcggcccccggcttccccagggaaattgaaagtggaagctggttccaggtagaccagcgcttccaacccagaagcgttgggggttgttagaaagccattccccagacagcctcacacttgagtcttaagtctggtggccgccctatcgtttttaaccgtccgacaggtgcctggtattttcctccaattctaaggaagggtagaacagaatagcaagcgaaagcgctttggaggtcccttcatgattgccaaaatgttacca

SEQ ID NO: 5828 - DNA, 183 bp, Homo sapiens
tacagattgaatgcatttgggccatccacgggttcctgggttaaggatttttgatagaaaggctactggttgtcagtggcttcagtgctttcgggctaggcctttgtttacactgacaacaaaatggtattggagtgttatggggtcacagagaagaccttcaattatcaattataggtttta

SEQ ID NO: 5829 - DNA, 540 bp, Homo sapiens
tagtagtcattctaataggcatgaagtgatatctcattgtggttttaatttgcatttccctgatgatttgtgatgttgaatatttttttcatatacctactagccatttgtatgtcttcatttgagaaattctattcaagtcgtctgaccagtttttaattaggttatttgctttcttactattgagttgtttcaattccttatatattttggatattaaccccttgtcagatgtttggtttgcaaatatattttctcattctgcaggttgtctccttactctgttcattatttttgtagttatgcagaagctttgtagtttgatgtaatcccagttgtccaattttgcttttgttgcttgtcatttggggacatacccataattgatcttagccaaaaggctgagaagtgatttgggtcatattaaaaaatatcattgccaagaccaatataatggagtttttttctaggttttcttctggtaagtttatagtttcaggtcttatgtttaagtctttaatccattttgagttgactttt

SEQ ID NO: 5830 - DNA, 5746 bp, Homo sapiens
tttgttttgctccaaaacaaggcagtaactggtttgaaggggggaaaagattttatttagctattgcatttccacaaagaaacattgccttgcattgattactaacccttctttctgtgtgtgtttctcccctccccagaccagagggtggcatccttctgcaccctgacagatatgcagcatgggcaggacctggaaggggcccaagagctgcccttatgtgtagatccaggcagtggcaaagagttcatggacacaactgggtatgtgagcccctgtggacccctccctcctgctgttccaggcatgattagccaagattcggctaaccgactaaccctgagccaggcgggcgaccatattgcaccatgccctttcccagtcctgaagaatccagagaagggactgagtgggactacttggctccctgccctgctgtgggagaccgctcttggctgcatgacccctctgctccatgggcacaccctgcctgccaagacttgtgaccctgtgcccatggtgacgagcctcactgtcaaagagggcaagaagaggcctcaaggtcagcgtctgctgctgaattactgcaacagcaccatgcagggataactcgccgattggccttccacctgccaggctgcacatgctcaccagcccagggcatggcccctcccagaacctggtccttgatccagcctcatgccctccactgaaatatgttgggaacaccccactctttcccctatattcatgacatgttcattccccgtgaaatgtgtattctttacctctgtcatccattcttaattccaacttctatgtgagctgaatatagaacttggaattaacttcattaacttgcatgttcacattggtaacgagcttcataatattgttatcatagggaaaggcaaattggggaaattgactggttcccaggacttcatttgggtcttccttgtctccattggataaaccaacttaaataatatatcttttgttttcctaccaactcgtatatctatagagtttctgcatctctttttaaatcagtaaagtcccagaatgggctttccactagatcagcaatatggacactttcccattctgacataatataatatatctgcttgctgggctctaagcacatgaaataattttttcgagtgaaaacttgaccaacaaaaatgctcgattgactctcttgaatctttctaattctatccttatttgctagggagcgttctccatcaccactgaccgggaaagtcaatcagctggaattaattcttcgacaactccagaccgaccttcggaaggtaatcaattggaagagcataatcagaactgtttctcttataaaatcagccccttataactactacagataaattgaaaagactcaggaaagaaaactgccttacacaaaaaccaatgataaataccaacagatgctcctgaggtctcactccatctgctgacctgcagctgatgtatttcattttgtgggatgcagggatctcaatggatatgagtaaatgaggatgagcccttggtgtggcaaatcttcagtgtgtagtagaagcatggtgggccagcattttttagttcagtgagttatcagttgcgccaactctgtatgagatgacctcagaggagtccattgctgccagaaagcctggtctctatgagtcctgtcctctgtcttgaatcagcttcacagcccttagaacttctgctgtacacatcaacctgcacatggtctgtcctcaaaagaaattaaattctgtatcccacaaatacttggctgagctctgttccatcagccctgtgctggagagccagttggctgtccagggaaacggaatggggtgcggtagcaagcgggagggcatcacaggaaggtttttgttgtgatggtttggtttggtttggcttatgaagaagggagaaattgtagctggtgagaatgctgaggaaaggattcagttgggagggaaattatgatgagggtgaagagcaagtgggtggagttctgatctagtcacaaggagggagctggccttggataggagtagggacagctcatacatagttaccagagtggagcagagtatgtgtgcacatgtgtgtgttcatatatgcacatgttcattcacatacacagggtccagacagagatgttggcaaatttctctgattgtttcttttctttctagtcatgagctaagagtggtgggagtataagagttttgtggatagcggatatgggtgcaccacagcgtgtaaaccaaccgggtttaggagacttgcccaaaaaaagctaaagcacgtttgaatttggagcataaattaaagcgatacctgttttcctggtcgtgtgttttttccccagcttgggtgaccagctgtcccagtttgcccgggatggagaagttttctaggatgtggaagtttccatattagaaccggcaaagtcccatgcaagctgggatggctggtcaccctatctccagctgcaagtgtagaaccgttggagagttgaatttagccaatattaaagtttagacgggaaatcaagacgagagagagagagagagacaaggaccctggggcgtgtacagggcatgaataaaccaaagaacctggagtccaggctggttgaagagaaataatgtcactgctggggaatggctgggttggaggtgttggtggacagtgaaaataagagtaagattgataagattgatggagtctatcattactggaggagtggatactggagaaattatttttaaaagactggaggtggtggtcaagaagtaggaacttgaaacttttaggaagaggtgcagtcattgacaatagcatggtataggatgtggtcatgggagtgggggttgaggagggtggggtttgaagatcactgagagaaagcgatggagaggctgaacggccagagtgtcagatggaatatctcagtggattcgaaatcatcaacacagatgacaggagtgggatggggagaaaagagcaaaccaggttctagaatcttcccgtaatgatggttggaactggggatacagtagataattgcagccaggaggggtagcaggtctcatgacctaatggcacgttttttagaggagctggaattgtaggaagtagtggagatctggcctgaacaatagaggatgcactgtctgcctgcccgacccccatagtgagctgctggggacggtctcctcgggagggagccaggattcacttagagcacgaagacgaaaggaatttcaggagagactgagcgtgcacaaggtcttcttggcagaatccaagttcatggatcacaataaaaggtttgcagggatgtggagaggtgggcagccgagtcgcagcagagatgtgctgagctgtgggactcagactgtcttgggactgagagtcgtggtgaggaatgtccggggagagtcagtatccagggtgggctgcagctgcttcttagagtgaagtgagtctatccagggtgggctgcagttgctccttacagcaaagtgagtggtcagctctgattcaggcctcctctgaggaccagtgtcttttgggccagtgaccaggcaggtggtattgaggagggccttggaagggctcaggaaacgaggaagccttgagggcaggaccagatatgccaagggtgggggcgtccactcacctcactcaatgctcctgcacagtgctgggggtggcatgtggtggctgtagtggttgagttagatcccgttacagaaataccgattattacaatctgacagtgacccctctattcatttagggcaaggcatccctttcagcagggggggaactgaaactgctgctatacatttttttattgctacatgttggaaactccagatgtgattcttctgaaagtcttgattatttttacacagtttttaatagcagattttaagggtcattatggaaatatagtatagcaggaaagcttgatggaatgaaagacctaagtacatattttattataaacatatgtaacagctctgctaattccaattttctacttagaaagttttgtgcatttgtcaaaagggtattacctttaacctccctgtagtctcccttttttggatagagggtaatataaactatgatgaacacccttcctatataaaggctatcttagcaccccatgggagcagagtgggatgaaagaacagggtgtgtggagtgttcattcccatccctttgtcatcagcaggaatcaggatcagaaaagtcccctcactaaagaaagtcaccccttctcccctcaaaaagtacataagtaaaaataagaatcaaagattctcgtagcccagcttaggaggaatgaatgtatcgatcagtctccatgactcagtttatttctgctctgaccaggaaaaacaagacaaggccgttctccaagcagaagtgcagcacctgagacaggacaacatgagactgcaggaggagtcccagaccgcgacagctcagctgcggaaattcacagaatggtttttcaccaccatcgacaaaaaatcttagccaatccgcacctcatcaagggaccactgggaaatgccccttgtccctttgaagtcacaaacatgtggtttttctgtgtgctttcaaccaatcgtagatgtttttgctgttccattctgtgtagcaccattcaccacagcaggatagggagcctcgactctttctcggtaaccacggcagagagcagcgccgatgtgaagatgaatgaatgtaactcctggtgtgaagatgaatgtaaaccctggcgacagttgagacctttttcttttagactctgctaaaacagtgctctggcttgggcttacctcaagagggaagatagttgagttttatttcctgtatatcaggtgacctggtagagatgtaaagcaatttaccatagtttgggctttagtattgtaaaataaacatgagaacaaataatcagacatatactttaatgttaaaggtgctctatttttttggatgtacagtagttttatttccacagccacattaccatagcaataagaaaggaggcatagtacatagttggaaaagctttgtggggggattaaaaaaaaaaaaaagcactgttgtgtttaacactagttcagatgcagttaccttagagacttatttatttgcaggaacaaatggtgcctgaatattaacagtgttctgattaaaaacaaaaaaaagatacatatgccttgtaaatggctcaccgagtggtcagtagtcacttcaactcttagttcacttttgtatagttgctctgctggaaagaaatgagagtgaatctgcttactcactagaacttccctgtgtgctgtgagccagcggaaccacttgtacaatgccagatttgtttatctttgtacagaagctttgatgaagtgtcttgtatttaacacccttatttaagcttatttaaccttaaattgttaattttataaaatttggtttggcctgcactacgatgagggatggaggtagctgcaggctcagaagagactgagcttgcacagatcagaccgagaagcagggtgagagattctaacgactggatgctgctagtaacacattgtttgtattgctttaccatttttaactgttagatttgagatgaacatacattttgcttttttaataaatgtttaaaagaagtccacataagaaa

SEQ ID NO: 5831 - DNA, 608 bp, Homo sapiens
gattttttgtgatctaacatgtcaacagtctgactgtatgtgaatttatttcaggtcatttagaaccttgatttgtattaaatactgttcagctcctttctcatagaatcccagatcgatttcaggaaggagtacctagcagtttttaatagctgctgtgtggcggacactattctctgaacttttcatccatctcatttaaccccaatggtatctatccttcataggtaggaggtggggttcccatttacaaccacatgaactgtgggtcaagtgaagtaatttacgcaagactgcctttaaaaaaataaaataaaataacactttggtgttgccagcactttgagaggccaaggcgggtggatcacctgaggttaggagttcaagaccagcctgaccaacatggagaaaccctgtctctactaaaagtacaaaattagccgggcatggtggcacatgcctgtaatcccagctactcgggaggctgaggcaggagaatcccttgaacccgagaagcagaggttgcgatgagccaagatagcgccattgcactccagcctgggcagcaagagcgaaactccatctcaaaaaacaaacaaaaacagtaa

SEQ ID NO: 5832 - DNA, 330 bp, Homo sapiens
cttccttctccacagtgttgctgtgttttgaatctgtgcttctcaaactgtggcacccaggccagtagcatcagtatcacctggaatttgacatgcacgtttattcagccccaagcaaatctgttgaatcagaaactctgaggacaggtagggtccagcaagcaagtcggggacccaaatgcacacatgccaacgtgtgagagccagcgttgcagatcagtaattgttccgggctgagtttcgcctcctcccaccctcctgtgttgacagtcctcatccccgataacccagaatgtgactgtatttagaaatagggtctttcaatatgtg

SEQ ID NO: 5833 - DNA, 330 bp, Homo sapiens
cttccttctccacagtgttgctgtgttttgaatctgtgcttctcaaactgtggcacccaggccagtagcatcagtatcacctggaatttgacatgcacgtttattcagccccaagcaaatctgttgaatcagaaactctgaggacaggtagggtccagcaagcaagtcggggacccaaatgcacacatgccaacgtgtgagagccagtgttgcagatcagtaattgttccgggctgagtttcgcctcctcccaccctcctgtgttgacagtcctcatccccgataacccagaatgtgactgtatttagaaatagggtctttcaatatgtg

SEQ ID NO: 5834 - DNA, 145 bp, Homo sapiens
gatcacttgaggtcaggagttcgagaccagcatgaccaacatggtgaaaccctgtctctactaaaaatacaaaaattagccgggtatggtggcacatgcctgtaatcccagctactcaggaggctgaggcaggataatcgcttga

SEQ ID NO: 5835 - DNA, 145 bp, Homo sapiens; identical to SEQ ID NO: 5834

SEQ ID NO: 5836 - DNA, 311 bp, Homo sapiens
tacctcaacctctggttgctccgtgattttgtttgtataatgaagtcacaacccatcagagtaataagggccttccgtaaaaatctccctggttttcaacaatgcccttagacagggagttccctgagctccaaagaagacttgtccccttaggcagagctttagatgtctttattcttatggcccacaatccccctgggcagaaatcttgtcccactgcacaggaactgagattgggattccactgttccaggaatgaccccacctccactttacatgtaggcatggtagggggtaaatggcagcccctc

SEQ ID NO: 5837 - DNA, 311 bp, Homo sapiens
tacctcaacctctggttgctccgtgattttgtttgtataatgaagtcacaacccatcagagtaataagggccttccgtaaaaatctccctggttttcaacaatgcccttagacagggagttccctgagctccaaagaagacttgtccccttaggcagagctttagatgtctttattcttatggtccacaatccccctgggcagaaatcttgtcccactgcacaggaactgagattgggattccactgttccaggaatgaccccacctccactttacatgtaggcatggtagggggtaaatggcagcccctc

SEQ ID NO: 5838 - DNA, 311 bp, Homo sapiens
tacctcaacctgtggttgctccgtgattttgtttgtataatgaagtcacaacccatcagagtaataagggccttccgtaaaaatctccctggttttcaacaatgcccttagacagggagttccctgagctccaaagaagacttgtccccttaggcagagctttagatgtctttattcttatggcccacaatccccctgggcagaaatcttgtcccactgcacaggaactgagattgggattccactgttccaggaatgaccccacctccactttacatgtaggcatggtagggggtaaatggcagcccctc

SEQ ID NO: 5839 - DNA, 264 bp, Homo sapiens
tatagctaatttgttagtcctactgaaaggagttggccagcatgctttatgtagacagtaagggaagggtcctggagaatctccaaccttccccacaagtgtttacactagatgttttgtgcagataaaggaatctgcacaggagggttgcccaaacatgcccccagcagactaatggccccttagtctgaggatggggtggagtctcttacaaataaggaacccagcctcatcagccttaaaaaaaaaaaaaaaaaaaaaaaa

SEQ ID NO: 5840 - DNA, 353 bp, Homo sapiens
aaaagatatagctattttaatggagattctttacagatgcgaattccctccccccacccccaccacaccaaggacagctttgcagggccatttcaaaatacggccaagaaacatgtattggggtaaaatattttgactttcttctttgtcacataatgttatgccagagtcggattggaaagtaagtcacaacatagagggttaaataaaactaatctgatgagaatttatggtttgtagggcatgaatccccagaccacttagataagaatttgggcaagataaaaaaaaaaaaaaaaatcagagcttagccctcagggataactcggaacagggagccagggaagtgagaa

SEQ ID NO: 5841 - DNA, 264 bp, Homo sapiens; identical to SEQ ID NO: 5839

SEQ ID NO: 5842 - DNA, 264 bp, Homo sapiens; identical to SEQ ID NO: 5839

SEQ ID NO: 5843 - DNA, 354 bp, Homo sapiens
aaaagatatagctattttaatggagattctttacagatgcgaattccctccccccacccccaccacaccaaggacagctttgcagggccatttcaaaatacggccaagaaacatgtattggggtaaaatattttgactttcttctttgtcacataatgttatgccagagtcggattggaaagtaagtcacaacatagagggttaaataaaactaatctgatgagaatttatggtttgtagggcatgaatccccagaccacttagataagaatttgggcaagataaaaaaaaaaaaaaaaaatcagagcttagccctcagggataactcggaacagggagccagggaagtgagaa

SEQ ID NO: 5844 - DNA, 294 bp, Homo sapiens
ggaagaatcaatatcattgaaaatggccatactgcccaaggtaatttatagattcaatgccatccccatcaagctactaatgactttcttcacagaattggaaaaaactactttaaagttcatgtggaaccagaaaagaacacaaatttccaagacaatcctaagccaaaagaacaaagctggaggcatcatgctacctgacttcaaactatactaaaaggctacagtaaccaaaagcataaaaagtttaaaatgcttgatatcatggtactggtaccaaaacagagatataga

SEQ ID NO: 5845 - DNA, 244 bp, Homo sapiens
gttatacctgcctaattttagaaagataaattatgaatgtcgaaatgaaaggtaagcagaagaatcagccaacattggcaacattatagaaattaatttaaatttgcattaagccaggaacatattgtttgtaaattatgaggcttctatgtacttttgtacagctttaatgaaaaagaatcatacttacttgattaagcattggctttgctaattgtggaactaagaccaaaatagtcatttt

SEQ ID NO: 5846 - DNA, 193 bp, Homo sapiens
ggtggctcatgcctgtagtcccagcactttgggaggccaaggcgggcggatcacctgaggtcaggagtttgagaccagcctggccaacatggtgaaaccccgtctctactaaaagtacaaaaattagccaggcgtggtggcaggtgcctgtaatcccagctactcaggaggctgaggcaggagaattgcttga

SEQ ID NO: 5847 - DNA, 421 bp, Homo sapiens
tactggcatccattcctatgtcagaaaaataatttgcctttgctggactgacactatttgaagaaatgattattgggtatccagagggattttacttgatactgctaaatggtagttatatgtcaacatagtaattaactcatacatggagagataagaataatttggtttattatcaaatcgatattttgaaaccaatttattatattctcaggatgctagtgagaaacttcatctgttatccttttcgtctccttattttcttcatttaaaaatgttctattagtaattataaattaactttcagtttttattcttttatattggaatattaactaccaattgccaaactcctccacattttctgcaatgataagagaaatctaagcatatgggggtggagaaaactcttggtctgtcg

SEQ ID NO: 5848 - DNA, 421 bp, Homo sapiens
tactggcatccattcctatgtcagaaaaataatttgcctttgctggactgacactatttgaagaaatgattattgggtatccagagggattttacttgatactgctaaatggaagttatatgtcaacatagtaattaactcatacatggagagataagaataatttggtttattatcaaatcgatattttgaaaccaatttattatattctcaggatgctagtgagaaacttcatctgttatccttttcgtctccttattttcttcatttaaaaatgttctattagtaattataaattaactttcagtttttattcttttatattggaatattaactaccaattgccaaactcctccacattttctgcaatgataagagaaatctaagcatatgggggtggagaaaactcttggtctgtcg

SEQ ID NO: 5849 - DNA, 1149 bp, Homo sapiens
gagaaacttacttccgaatgcatctttagggagcagtttgaagagaactggtataacacctattcatctaacatatataaacatggagacactggccgcaggtattttgtggcacttaacaaagacggaactccaagagatggcgccaggtccaagaggcatcagaaatttacacatttcttacctagaccagtggatccagaaagagttccagaattgtacaaggacctactgatgtacacttgaagtgcgatagtgacattatggaagagtcaaaccacaaccattctttcttgtcatagttcccatcataaaataatgacccaaggagacgttcaaaatattaaagtctattttctactgagagactggatttggaaagaatattgagaaaaaaaaccaaaaaaaattttgactagaaatagatcatgatcactctttatatgtggattaagttcccttagatacattggattagtccttaccagtagactgaagccaaaaatctgttaaactgtggataatgggaaccctcacatggttgctgctggtgcctcacctctctggattatgtttactttaaaatttatgttaaaaatagagacttcatgttgaagaaatggattgacttagccaagagcattgctacataaattctgaggaccttgtagaattcacaggttatggcattatatgttttaagaaaaaaaaaaactaaacaacacctgggtgaaacatgaactatgaaacatgccacaccaagacagaacactttttaaaagaatggacctatttatacactttcaatttgaaaatatttattatatatatttatttattaaagagtttattttttactgggatatgaagataatacaaagagtaaaaaacaacaaaacttccgttattgtgccattactttattgtggtgtcttgctctgtaaagaggacattattataccaccttaaccatagaatcagattttgaatttctttttaaaatatagtatagattatattttttatgcagtcaattgccttctaaatgtaacgttggtttcttttggcctagaaaaatgcctcattgatttgtattaaattcaacacacattcaaaagggaattaaacattttcatgcagtgttttggc

SEQ ID NO: 5850 - DNA, 531 bp, Homo sapiens
cattctccccaagggactatctgggagaatgtcagagggggtctttttagttcgctctttcctttgttctgtaggcctagaattcctgtttcccattttcacttagtctctgtgtcaggtttttgctgtgtactcagccccccttactggaggtttcttgcacactccgggttctctgaaaatgccccaataccaaggcagtactgataatccaactttcctaccttggatcatgcaggaggttggctggttgccatggtgcctgcttttctccttgtgtcacctccgctgtctcctgaacaagacttgggtttgtctgtggcttctgcggggagccaagatgtccagagcaggccacataaatcaagtggggtgcgtctcccttctcggctggagtcttaactccatacaggcacagagatagccgtatgggccaccaggttgtgagaaacaattcacccgtccaaacccacagaatggactcagagacccggacagtagcaaaagcgagacttttaatgacggtcttgc

SEQ ID NO: 5851 - DNA, 531 bp, Homo sapiens; identical to SEQ ID NO: 5850

SEQ ID NO: 5852 - DNA, 8907 bp, Homo sapiens
ctgacaagcaggcattggctattgaagcaggggcctagtatcctgtttcttctgtagtttgctgacctatgccgattcaagacactttgtcccggaaatggaccactgtatgcgttattttctatactccatgaatatgattggtttgtaaggtgtgtattgattttatttaagtgtaattgctgtttgcttagccaattggcataatttatgctaagcaaactacaaatatggatttattttattagtcacagctacagaatttattccacttgtggaatgatgttttgtttttgtagcagattagaaaagttttgtttggtgctttggcaggattaagctagggtataatcttttatgagattttggcatattttaatattatttacatagacactctgcccatttattatagacaataaaggaactattggactaacagtagtaaattttttcctccaaaaggtaattaataaaatgtctccaacatctctaaagatcacactaaggcaactcatggaggggtcttcaaagaccttgcaagaagtactaactatggagtatcggctaagtcaagcttgtatggtaagaatttaaaaaaaaaatgtcattttttagttctaaaagtaacatacgtttattgtagaacttgtaaaatacactaagtgcaaacaagaaaattaaaaccacctgtaaatttactctacaaaaacacaacaggccagttagttttagatgtgtggaagtattgctacccagattgttattaagcctttataaaatagcaattacatttgcatgtcagtgtaagaagctctctaacctcatcttagaggaattcaaaatagaaattaatgtctttcagcgatggtctctgtgaccttgggcaaggcatataaactctgtaaatgtgaattccctcattggtaaaatgaagaggattatttataagcagatatatatataaagtaaatgcacaaatggaagttattagtctgttacgtgtttaaaataatgagcattattaaagtaccattgtaaacataaagtggacaataatcacatagaatattgatttcatgaaacatctcatatttatatttatttattcttccagatgataaactctttaaagtcagaatcatcctttatgttcagaggacccttaagaagcatcttattatttagactaatatatggactaaagggactatttggcttaatagccagaaaggagacattcctaatgactttaatgtaatagttattaagatgttcaatgtagttcatctagttagaaataactctgttagccatgtcttaaagtcactccttgagggatgtaaatggcagctgacgtctattgtttattatgtgcaggtactacgctaggcactttatatgcatttgctccattaaatcttatggtatctctagaaggataggtactgttattgactccattttacagatgaagaaattgttatatagtggtgtaacttgcctaaggttgtgcagctattaagtgacagagatatggcatatgaaaccaggcagtcttactccagtgcctgcactcttgaccactctcctgtatacctcacacattccatgtttttcattacacttttagtgcactgcctagattgattgattcttgccttcattctctcagcaaatatgttagctatgtcccaggcactgtgctcagtgttagccttatattgttgaataagaagacacagtcctttattttcatgggtttagtctactgagactacaaagaacaagtaaacaaaataagtaaaataattataaattgtgataagtactctaaaggaaaacatacagggttggtgatagaagagattatgcagggacaggagggagttggggggcaatgggaaacctccttaagtagatcagggaagacatctttgtgatgtcacttcatttgtgacctaaaggatgagaaaggagtatgttgagaagactcttgggcttaagcaggaggtgatttgatttttcatttcattcggttcaatttgctttaagaaggaaattgttgctgctgtgtggagatagggttggagaggttcaagaacggtttagagaccagatatagatttcctgcagtgatccaggtgtgaaatagtagttttgagacaagcatggtggcaattgagagaagtaaatggatttgagacacatgtaggagatagaatagataggacttgctggatgtgagggaaggaatgcatttaggagttagagattagaggaatgagttggagatttaaatctgaaagacaccaacagcaattaagaaaaccttggggattcgttatttactaaacaagagtgcttactatgtcgtagacactgttagaggtacccaggtacataggttccaggtacataggtgtgctccaggggttgaggttgaaaaggcagaaaacagtttaaatcattatcttggggagtagggagtaggataacacctgccctcatggaacttactttataatggggaaatagactgtaaacaagattaatacataaaatatatattatatgattataaatattaacaagaaaaaggaagcaggatatgtgatatagagtaacagggggatgaattgtagatgggatgaccagagaaggcctcactgagatgttctttgagtgaattcctgaaagaagtaaggaagtgagcccatgccattatctagaggaagagcatcccaggcagtgggaactgcaagaacaaagctgtgaggctggagcatgactgcctgtgctagggaccacaaagaggccgtgtggaagcggatggggggcagaggttgtggtgagtgagagatgaggtcagaggaaacagtgtagagaaaggctgtgcagagcatacagagccttgaaggtctctctaaggactttggctgagtaaaatgggaagccactaggtgattatgaggagaggaatgccatgatcttatactttaaagaattgatcactcaggctgctatgttgagcactgaataggtaagatcatattataaagaaaatgagagtccagacctgagccctaaggaactctaacattttgaggtgtggtagagaaagagcagtaggaaggaaaaaaaggatggagaggtaggaggaccaggagagtgtagtgtcacaaaagaaagtgaggaatgtttcggggaggagggtgtaatggacagtgttgaacgctgtcaaagtgtagacgaggttagaagtgtcatttgaccttggcgatgccgatgtcatgggtggttttggcaagccattttagaggagtgggggcagaagttagagtgtagtaagttggagaggaaaaatgggatgtgaagaagtggagagaatatgtgtagatgaatactcttgaaagtgaaataggatagaagctgggactgtggaatcaaatgaagttccttttttattttgtaagatggaaggtactagaacatgtttaaaaatgattgggaatgatccaatagagaaacaagattatgttgatgatactaatggtagttaatatttactgaacacttagtgtcggacactgtgcttggatgtggattaaaataatcctaggatggatatataaattaccttttcatgtaaagaaactagggttggagaaattactagtccgaggtcacatagttaatatgtagctatcaggatgtgaacctagacatttgaactcagctatattgcctacatcgatgattctaggaaaataaaagtgaatgaccacatcaagcaaagtccatccttgagaaggcaagaggggatgtgaattggaatgcaagggaggactggtctttgaaaaagggatggtcctttcctccacggcattgaaagagaaggcaggtgcagatggccacagttgcctgcaggtgttttagtggtgagaagacaagacttcatatctaagagcttctcgtatttttaaagaagtcagaggttaagtaactggctgagactataataagagtgtgctctacgggtagaggttgagaaggcagaaaacacttaaaatcattatcttggggagttgggaagagatcttggattgtttggcagttttctgtgcctgtttgagatttttgatcatgaattttaaatgaaaccagtcacagttgtatgattttctgcagcaagacttagctgctgaagtgcaggcaggggtacgtgatagggtttagttggtgccaggattttgctaggattgtaaaaaaggaaaaaaggtttgggggagatgatgacattttgacaggaaagtgaccatattaaaggactggtgaaattgggctggatgaagagcaaagtgaagccagcacagatggggagaaagtcataggatctgtggacctcagtaagatcaatgatttgtagcagtggagatacttgagcaaataagatttaggaggtggtgatcagagagtgggctatcagaggtggttcagtctctgaatgtcatggttcaggttgtggccatgggagtggaaggctgaagtgaatagaggagagagaaaataacccagaataaggacacccagaaattatccccatttaatctcaattttctttcagagaggtcatgactttcatgaaggcgttagagctggtaagtggcaaatgggaacttaccattttggggaaatgggatttgtgagcatatgctgttaattaaagaagatacagattatgcatcccaaatcctaaaatccaaaatgtaccaaaatctgaaactatttgagcaccaacatgacactcaaatgttcattggaccataagtataatgcaaatattccaaaatctgaaaaaaaaaaaaaaaatcaaacctgaaacacttctgatcccaagcattccagataaagaatactcaacctatagttgttttagtagtgaaaattaaacttttattaagattgcaaagttgtgtatgtttttaaagaatatgttaccatctgggatatgaaaaggaagatcagtctttgaaactgataattgttttaaaaattcacataacttggccactgtttcctaatttatatataaggtaatcctgcccctacaatcatggactgcatctgataagtgcagcattgagcttgtaaactcatcctgctgccatcctgctgctgtggcctttgaaacatgcatttattaccttacaaaaagccctcaaatcccctaccctttctccctctttcgtgctggcctggcaaaattgaccagtggtctaaccctactttccaccttcttgcctgtacctcagcagttaaacattgctggggaaaaagaccatatgatgtcattagtaacatctgcagattgtcttattaatactttccattttgcttataatctccaatgtcagcatatttagaaaaagcaagtgaagtgcttgacgtgcttgactgttttttctagcatacttgcaacaattcctttttatgcataattcttatccttataaaaagctgttatttatgttgtataaaatgagttgttccctctgcatgtattttgcatatctaatgttcctgtttttattaattattttactatagtgcagactctggatatcctttgttttttttattttattttattttttttggagacagggtctcacactgtcacccaggctggagtgcagtggtgcactttcggcttactgcaacctccacctcccaggttcaagtgatttgcctacctcagcctcctgagtagctgggactaccagcccatgccaccacgcctagctgatttttgtatttttagtagaaacggggtttcaccatgttggccaggctggtcttgaactcctgatattatgtgatctggctgccttggactcccaaagtgctgtgattacaggcatgagccaccgtgcccagcctggatatacttttttatctgaataaaaggttatgttatgttctctcagctcttaagctttgataaacaatcactcttcatagagttctcttcatttctgacatgatacaatatcagaaataaggacttgattgaaatctttttagtattcagcacatggagctgatcagaggagatggcagtgtgtcttgtagaaactaagtaacataggcattttcctcacaaattctctgcaaattcttgctgcatgtggattacagcctagaactctgattttagaggacctgtaagcatacagggttatattgttaaagtattcattatatgttataatagcccttctttaaaaagaaagatactgtttttagataaatactgttattttgaggaaaaaatgttgaaaccaatcagcatcaaagttctgattcataaaggaagtgcttattatacgacttttttttgttttgttttgttttttgagatggagtctcactctgtcacccaggctggagagcagtggcaaaatctcggctcactgcaaactccgcctcccgggttcacaccattctcctgcctcagcctcccgagtagctgggactaaaagcgcctgccaccacgcctaatttttttgtatttttagtagagacggggtttcacagtgttagccaggatggtctcgatctcctgacctcgtaatccgcctacctcagcctcccaaagtgctgggattataggcctgagccaccgcgcctggcctatgctactttttaatgaagagaaagtatattgccgcctctttcagaaagcagcgtctgttctgagattgaaaactgttgtgttctttacatagtcaaatgtttgctgcagtttgctaataataaaaacatattagcaagttaaagtaagttagcaaatttaacagttgttaaaaattcttactgttaacatctagaacaaattactactttgtggttatagaagaagaaaaaaagaccatcttagtggagctggatacccactcaaactccatgtagtggctatctcaggagacttgcaaaacctgagctgcctacatggcacgaacttgtatgtattctagtaaaaaaattgttagcttgaaataaaataacaaatttgattaatagtctctttgctcttgtccttcagtgggatctcaaggagacaggtagtattgaccagaagacttagagtgagagagattcttgtggaaaaaatgtgccggggttgttctttgtttacactgtccacggaatataaaactttcaaatagtagggatcagaacatcagtatttaatatcgccactgatctgataccagaatctcatagtaggcagttaaatcttaaaaacaaacctcccgtatctgcatttaattgtatgtaaaagcttccctccacctaccaaggcagtcttcttccttggttcccatactgcttctttaactattttagcctttaaatgctaaattaggtttttctagttcactatagtttgcacatttaaatatttccattcttcacaagaattatgtgcattttaagcatggttgaaatttgctgccacaaccataacattaaaatttggagatcattgtagattcatgcggttgtaagaaataatatagagatcttgcataccttccacccagtctcccaaatgataacgtgtgtgtaactacagtatactggacattcctcccccttttttttcggagaagttacagattgcctcataatcctgtggggatactatgtggctatgatgagtgatgactacactgaaataggagaactagacggtttcatgataacctgatttttttaaatccagagctgtctgaactggaggattcagcagaacaacagtatccacatttaattatgcatgaagtccccttttctctaccttaagcaattaatttcctcccaaaattcaatgtggaggaggttagaaggcacatctggtccctctgccctcccctgcctttactttaaaccactggttttacctgttttgtaatgtggaggtttcactggcaattttatttcaagaagaaaaaaagaattctaatgtttaaaccactggattaattcagtaggctttattaaagctaagacatgaggcttaggaagttagaaaatatccaccccagtcatcaaaagtatattgctgtccatccctggagatttaatttaaaagaaaaatagaatacatataaaaattttgcaggaaaaaagtatgatagaaaaatgtgcctagtataagaatttctgtcaattcagtaagtaaaatctagcaatattagacaaaaataatggtattaacatttgtatcttctcttgacagttttaattgataaagaccagagtccaaaatggaaaccagctgatctaaaagaagttactgaggaagatttgaataatcactttaagtctttgggaagcagtgatttgaaattttgaggtgacaggcttttaaggtatattttgtagcatgggttggcaatctacagcatgtgggccaaatccagcctgctgcctgtttttatataccctgtaagctaagaatggtttccgcatttttaaatggttgggaaaagaaatcaaagactaataattcatgacgtgaaaattatcagaattcacaaataaagctttattggaactagctatactcatctgtttatatattatctgtggctgctttgaaatgagtagttgcaatagagatggtaaagcctacaaagcctaattatttactgtctggtttttgtcagaaaaaagtttgtcaatccttgttttagaagatggaaaaatgtgaagatctttggagattctcttgagtggtatatctaattgaaatgggatcttcgtttggcttgtatgttgatgaaatcaacttaggtatacaatataaaaaataaagaccctgaaaattgttttgga

SEQ ID NO: 5853 - DNA, 8907 bp, Homo sapiens
ctgacaagcaggcattggctattgaagcaggggcctagtatcctgtttcttctgtagtttgctgacctatgccgattcaagacactttgtcccggaaatggaccactgtatgcgttattttctatactccatgaatatgattggtttgtaaggtgtgtattgattttatttaagtgtaattgctgtttgcttagccaattggcataatttatgctaagcaaactacaaatatggatttattttattagtcacagctacagaatttattccacttgtggaatgatgttttgtttttgtagcagattagaaaagttttgtttggtgctttggcaggattaagctagggtataatcttttatgagattttggcatattttaatattatttacatagacactctgcccatttattatagacaataaaggaactattggactaacagtagtaaattttttcctccaaaaggtaattaataaaatgtctccaacatctctaaagatcacactaaggcaactcatggaggggtcttcaaagaccttgcaagaagtactaactatggagtatcggctaagtcaagcttgtatggtaagaatttaaaaaaaaaatgtcattttttagttctaaaagtaacatacgtttattgtagaacttgtaaaatacactaagtgcaaacaagaaaattaaaaccacctgtaaatttactctacaaaaacacaacaggccagttagttttagatgtgtggaagtattgctacccagattgttattaagcctttataaaatagcaattacatttgcatgtcagtgtaagaagctctctaacctcatcttagaggaattcaaaatagaaattaatgtctttcagcgatggtctctgtgaccttgggcaaggcatataaactctgtaaatgtgaattccctcattggtaaaatgaagaggattatttataagcagatatatatataaagtaaatgcacaaatggaagttattagtctgttacgtgtttaaaataatgagcattattaaagtaccattgtaaacataaagtggacaataatcacatagaatattgatttcatgaaacatctcatatttatatttatttattcttccagatgataaactctttaaagtcagaatcatcctttatgttcagaggacccttaagaagcatcttattatttagactaatatatggactaaagggactatttggcttaatagccagaaaggagacattcctaatgactttaatgtaatagttattaagatgttcaatgtagttcatctagttagaaataactctgttagccatgtcttaaagtcactccttgagggatgtaaatggcagctgacgtctattgtttattatgtgcaggtactacgctaggcactttatatgcatttgctccattaaatcttatggtatctctagaaggataggtactgttattgactccattttacagatgaagaaattgttatatagtggtgtaacttgcctaaggttgtgcagctattaagtgacagagatatggcatatgaaaccaggcagtcttactccagtgcctgcactcttgaccactctcctgtatacctcacacattccatgtttttcattacacttttagtgcactgcctagattgattgattcttgccttcattctctcagcaaatatgttagctatgtcccaggcactgtgctcagtgttagccttatattgttgaataagaagacacagtcctttattttcatgggtttagtctactgagactacaaagaacaagtaaacaaaataagtaaaataattataaattgtgataagtactctaaaggaaaacatacagggttggtgatagaagagattatgcagggacaggagggagttggggggcaatgggaaacctccttaagtagatcagggaagacatctttgtgatgtcacttcatttgtgacctaaaggatgagaaaggagtatgttgagaagactcttgggcttaagcaggaggtgatttgatttttcatttcattcggttcaatttgctttaagaaggaaattgttgctgctgtgtggagatagggttggagaggttcaagaacggtttagagaccagatatagatttcctgcagtgatccaggtgtgaaatagtagttttgagacaagcatggtggcaattgagagaagtaaatggatttgagacacatgtaggagatagaatagataggacttgctggatgtgagggaaggaatgcatttaggagttagagattagaggaatgagttggagatttaaatctgaaagacaccaacagcaattaagaaaaccttggggattcgttatttactaaacaagagtgcttactatgtcgtagacactgttagaggtacccaggtacataggttccaggtacataggtgtgctccaggggttgaggttgaaaaggcagaaaacagtttaaatcattatcttggggagtagggagtaggataacacctgccctcatggaacttactttataatggggaaatagactgtaaacaagattaatacataaaatatatattatatgattataaatattaacaagaaaaaggaagcaggatatgtgatatagagtaacagggggatgaattgtagatgggatgaccagagaaggcctcactgagatgttctttgagtgaattcctgaaagaagtaaggaagtgagcccatgccattatctagaggaagagcatcccaggcagtgggaactgcaagaacaaagctgtgaggctggagcatgactgcctgtgctagggaccacaaagaggccgtgtggaagcggatggggggcagaggttgtggtgagtgagagatgaggtcagaggaaacagtgtagagaaaggctgtgcagagcatacagagccttgaaggtctctctaaggactttggctgagtaaaatgggaagccactaggtgattatgaggagaggaatgccatgatcttatactttaaagaattgatcactcaggctgctatgttgagcactgaataggtaagatcatattataaagaaaatgagagtccagacctgagccctaaggaactctaacattttgaggtgtggtagagaaagagcagtaggaaggaaaaaaaggatggagaggtaggaggaccaggagagtgtagtgtcacaaaagaaagtgaggaatgtttcggggaggagggtgtaatggacagtgttgaacgctgtcaaagtgtagacgaggttagaagtgtcatttgaccttggcgatgccgatgtcatgggtggttttggcaagccattttagaggagtgggggcagaagttagagtgtagtaagttggagaggaaaaatgggatgtgaagaagtggagagaatatgtgtagatgaatactcttgaaagtgaaataggatagaagctgggactgtggaatcaaatgaagttccttttttattttgtaagatggaaggtactagaacatgtttaaaaatgattgggaatgatccaatagagaaacaagattatgttgatgatactaatggtagttaatatttactgaacacttagtgtcggacactgtgcttggatgtggattaaaataatcctaggatggatatataaattaccttttcatgtaaagaaactagggttggagaaattactagtccgaggtcacatagttaatatgtagctatcaggatgtgaacctagacatttgaactcagctatattgcctacatcgatgattctaggaaaataaaagtgaatgaccacatcaagcaaagtccatccttgagaaggcaagaggggatgtgaattggaatgcaagggaggactggtctttgaaaaagggatggtcctttcctccacggcattgaaagagaaggcaggtgcagatggccacagttgcctgcaggtgttttagtggtgagaagacaagacttcatatctaagagcttctcgtatttttaaagaagtcagaggttaagtaactggctgagactataataagagtgtgctctacgggtagaggttgagaaggcagaaaacacttaaaatcattatcttggggagttgggaagagatcttggattgtttggcagttttctgtgcctgtttgagatttttgatcatgaattttaaatgaaaccagtcacagttgtatgattttctgcagcaagacttagctgctgaagtgcaggcaggggtacgtgatagggtttagttggtgccaggattttgctaggattgtaaaaaaggaaaaaaggtttgagggagatgatgacattttgacaggaaagtgaccatattaaaggactggtgaaattgggctggatgaagagcaaagtgaagccagcacagatggggagaaagtcataggatctgtggacctcagtaagatcaatgatttgtagcagtggagatacttgagcaaataagatttaggaggtggtgatcagagagtgggctatcagaggtggttcagtctctgaatgtcatggttcaggttgtggccatgggagtggaaggctgaagtgaatagaggagagagaaaataacccagaataaggacacccagaaattatccccatttaatctcaattttctttcagagaggtcatgactttcatgaaggcgttagagctggtaagtggcaaatgggaacttaccattttggggaaatgggatttgtgagcatatgctgttaattaaagaagatacagattatgcatcccaaatcctaaaatccaaaatgtaccaaaatctgaaactatttgagcaccaacatgacactcaaatgttcattggaccataagtataatgcaaatattccaaaatctgaaaaaaaaaaaaaaaatcaaacctgaaacacttctgatcccaagcattccagataaagaatactcaacctatagttgttttagtagtgaaaattaaacttttattaagattgcaaagttgtgtatgtttttaaagaatatgttaccatctgggatatgaaaaggaagatcagtctttgaaactgataattgttttaaaaattcacataacttggccactgtttcctaatttatatataaggtaatcctgcccctacaatcatggactgcatctgataagtgcagcattgagcttgtaaactcatcctgctgccatcctgctgctgtggcctttgaaacatgcatttattaccttacaaaaagccctcaaatcccctaccctttctccctctttcgtgctggcctggcaaaattgaccagtggtctaaccctactttccaccttcttgcctgtacctcagcagttaaacattgctggggaaaaagaccatatgatgtcattagtaacatctgcagattgtcttattaatactttccattttgcttataatctccaatgtcagcatatttagaaaaagcaagtgaagtgcttgacgtgcttgactgttttttctagcatacttgcaacaattcctttttatgcataattcttatccttataaaaagctgttatttatgttgtataaaatgagttgttccctctgcatgtattttgcatatctaatgttcctgtttttattaattattttactatagtgcagactctggatatcctttgttttttttattttattttattttttttggagacagggtctcacactgtcacccaggctggagtgcagtggtgcactttcggcttactgcaacctccacctcccaggttcaagtgatttgcctacctcagcctcctgagtagctgggactaccagcccatgccaccacgcctagctgatttttgtatttttagtagaaacggggtttcaccatgttggccaggctggtcttgaactcctgatattatgtgatctggctgccttggactcccaaagtgctgtgattacaggcatgagccaccgtgcccagcctggatatacttttttatctgaataaaaggttatgttatgttctctcagctcttaagctttgataaacaatcactcttcatagagttctcttcatttctgacatgatacaatatcagaaataaggacttgattgaaatctttttagtattcagcacatggagctgatcagaggagatggcagtgtgtcttgtagaaactaagtaacataggcattttcctcacaaattctctgcaaattcttgctgcatgtggattacagcctagaactctgattttagaggacctgtaagcatacagggttatattgttaaagtattcattatatgttataatagcccttctttaaaaagaaagatactgtttttagataaatactgttattttgaggaaaaaatgttgaaaccaatcagcatcaaagttctgattcataaaggaagtgcttattatacgacttttttttgttttgttttgttttttgagatggagtctcactctgtcacccaggctggagagcagtggcaaaatctcggctcactgcaaactccgcctcccgggttcacaccattctcctgcctcagcctcccgagtagctgggactaaaagcgcctgccaccacgcctaatttttttgtatttttagtagagacggggtttcacagtgttagccaggatggtctcgatctcctgacctcgtaatccgcctacctcagcctcccaaagtgctgggattataggcctgagccaccgcgcctggcctatgctactttttaatgaagagaaagtatattgccgcctctttcagaaagcagcgtctgttctgagattgaaaactgttgtgttctttacatagtcaaatgtttgctgcagtttgctaataataaaaacatattagcaagttaaagtaagttagcaaatttaacagttgttaaaaattcttactgttaacatctagaacaaattactactttgtggttatagaagaagaaaaaaagaccatcttagtggagctggatacccactcaaactccatgtagtggctatctcaggagacttgcaaaacctgagctgcctacatggcacgaacttgtatgtattctagtaaaaaaattgttagcttgaaataaaataacaaatttgattaatagtctctttgctcttgtccttcagtgggatctcaaggagacaggtagtattgaccagaagacttagagtgagagagattcttgtggaaaaaatgtgccggggttgttctttgtttacactgtccacggaatataaaactttcaaatagtagggatcagaacatcagtatttaatatcgccactgatctgataccagaatctcatagtaggcagttaaatcttaaaaacaaacctcccgtatctgcatttaattgtatgtaaaagcttccctccacctaccaaggcagtcttcttccttggttcccatactgcttctttaactattttagcctttaaatgctaaattaggtttttctagttcactatagtttgcacatttaaatatttccattcttcacaagaattatgtgcattttaagcatggttgaaatttgctgccacaaccataacattaaaatttggagatcattgtagattcatgcggttgtaagaaataatatagagatcttgcataccttccacccagtctcccaaatgataacgtgtgtgtaactacagtatactggacattcctcccccttttttttcggagaagttacagattgcctcataatcctgtggggatactatgtggctatgatgagtgatgactacactgaaataggagaactagacggtttcatgataacctgatttttttaaatccagagctgtctgaactggaggattcagcagaacaacagtatccacatttaattatgcatgaagtccccttttctctaccttaagcaattaatttcctcccaaaattcaatgtggaggaggttagaaggcacatctggtccctctgccctcccctgcctttactttaaaccactggttttacctgttttgtaatgtggaggtttcactggcaattttatttcaagaagaaaaaaagaattctaatgtttaaaccactggattaattcagtaggctttattaaagctaagacatgaggcttaggaagttagaaaatatccaccccagtcatcaaaagtatattgctgtccatccctggagatttaatttaaaagaaaaatagaatacatataaaaattttgcaggaaaaaagtatgatagaaaaatgtgcctagtataagaatttctgtcaattcagtaagtaaaatctagcaatattagacaaaaataatggtattaacatttgtatcttctcttgacagttttaattgataaagaccagagtccaaaatggaaaccagctgatctaaaagaagttactgaggaagatttgaataatcactttaagtctttgggaagcagtgatttgaaattttgaggtgacaggcttttaaggtatattttgtagcatgggttggcaatctacagcatgtgggccaaatccagcctgctgcctgtttttatataccctgtaagctaagaatggtttccgcatttttaaatggttgggaaaagaaatcaaagactaataattcatgacgtgaaaattatcagaattcacaaataaagctttattggaactagctatactcatctgtttatatattatctgtggctgctttgaaatgagtagttgcaatagagatggtaaagcctacaaagcctaattatttactgtctggtttttgtcagaaaaaagtttgtcaatccttgttttagaagatggaaaaatgtgaagatctttggagattctcttgagtggtatatctaattgaaatgggatcttcgtttggcttgtatgttgatgaaatcaacttaggtatacaatataaaaaataaagaccctgaaaattgttttgga

SEQ ID NO: 5854 - DNA, 264 bp, Homo sapiens
gagaaaatacctttaggtcatataattcctaaggatataatgcaaatgccaacataatgtttatagtatggatacattagaagtatcttaattaattcaagatacatatttggggttttttgtggctaatcataagaagttgttctggttttgtttttctcagtcctcccaccagataattattttagatcagttttagatcaagtgaaaacctttcttagaaggcttaaatatacaattttattatattataataggacattt

SEQ ID NO: 5855 - DNA, 435 bp, Homo sapiens
aacttgaatttaaaatgaaattgttcattgggaccaaattggtttggtatttttttaaatcattggttatatatatgtagcatagtagattatttccaatacagaaaaaagctgttattattttactttgagggtgggctatacactagagaatggaaaaagaatgtttcaaatactgtattagaacagtatttggaagtcgctaattagagtaagagtatgggaacacaaatattaaggaaatcaggaaagaatgtaaagtcaggagtagagaagaaacaatctttccctgttactgtcacatataattatagattttatattaaaggctttaaactctagtgtctatcacttgggatcttgggatcttgttaaaaatgcacattcttagtgctccccctccatcttccccattctgattttgtaggtcttgag

SEQ ID NO: 5856 - DNA, 259 bp, Homo sapiens
gaagattagtttacactaccagattatagatattagcattatgaaaaatttgaaaattctgttttttattagtaaataaaaacatgagcaactgatgtttctagaatctagatcctaattaaaggagtctcattccagtctttatatgtgcttaagtttatgtttttcttttatcaaaacatacatttagacattaagcttaacctctaatgtagcaactggctgattattaattcagaatgtatgtaaagcgtttacc

SEQ ID NO: 5857 - DNA, 258 bp, Homo sapiens
gaagattagtttacactaccagattatagatattagcattatgaaaaatttgaaaattctgttttttattagtaaataaaaacatgagcaactgatgtttctagaatctagatcctaattaaaggagtctcattccagtctttatatgtgcttaagtttatgtttttcttttatcaaaacatacatttagacattaagcttaaccctaatgtagcaactggctgattattaattcagaatgtatggaaagcgtttacc

SEQ ID NO: 5858 - DNA, 1158 bp, Homo sapiens
cagtgggctacattagaggactgcttagacgcatgcttattctagaaaaggctgaaggaagaaagaaccacccctttccctcctcttctcagctcccttctgctgggagcacctggctgccagttcccaagttcctctccatggggaattgcagctccaaggtggcctcctggagctgcctaactccgccttcactgaaaataaggtgattgaactgtaaagctgaaatcctctgcagtcatgtctcctccagagtcttcaaggtcactcccactttttttctagacacaaatggggtcatttttgtaattctaattaacactgtctccagacataaataaaattttaaatttctcattgctatcagctgtttccactatgtttttcataaattggaatgcaattttaaacagttaataaaattctccagtacaagagcaaaacaagaagttaaaggaacacaatagtctagaaacagaagattttgatgtatttttaaattgatatgtatgttatctgttctatttagattacaaacttagagtaatgaatttgcttcagtaaatttctttgtgactgtgagtgctattgcttatattataattgggtctgggtccaaatatatattgaacttattttccaaaagaaatactctccttagattgtggcatggcaggaaagcatactgttcctagtagtcctctccaaactcctttaaaaactgagctttatggcaaatttgtaatgaagatgtaacactttcactacttaaaccatgacttcaatttgtgatataattaagggcaattactcctgttagagattgtagactaggttaggctgagttaataaatagctgtttggctctggcattagcaaggatgtcttcattagggtagtaatgtgtcaagagtgctaaataggttgccatggtatttgtgggtttcagcctggactctggctttccctgaaattaaaaatgttcagcctttaataaaaggcacttccttacacagcaaagcagacagaacactaaataggtgaaatgaccagggctcaggaacttgattgcagaggctgatgaatacacaacgtggatattttaaagtaagcattgactctgacaggctttgttaaaaaagacaaacacagagagaa

SEQ ID NO: 5859 - DNA, 2745 bp, Homo sapiens
cggaattcacatgctactccttcagaatccaggcagcaagcgaggctggagaagggcccttctcagaaacctataccttcagcacaaccaaaagtgtcccccccaccatcaaaggtgtgtagactatgtattctttctcgctctcttgtgagagtaaggaactgttgggacttatagaaagaagctcttttctgatgttaaatataatgtcagcaagatagaatcaaaagaacattctaaagaagattgagcaatgatgggttgtctgggggaaatgagagaccttgaaaggaaagggcctactgatgacttttctctgtaggtatgcatgtttatcaaaaataatggttagaaataagggttaaattcctggtgctgcaacccttaagacagtttaccaaggaaggcgtcagactcccctttcctagactttcagagaagcagaggttggcattcatctttcagtgactttggtgcctagagactgacttaggcaacttcagcagcctttctcttttggcgcacagctcttggtgtggagcactgcctttggaaagctgtagcagcgttctgctctaatctcctggggtacttatcttgaagtttcttcaaggatgactactttcctactctggccccttaatgggatcaggtactgcagaagttgtgagagccccatgtatccagatcttccccatatctctcgaagctagtgaacaaaagacactctgcctggacccttcttccaccgggtctgctgagccctcagcctgttatatagccacagagctatgcctgactgcggctgacttgcaaggcaggaaatagcaatagaaaccatagcatgctcagcctgtccacccagccactcatggactcctgaggccctgcctcatctcctgcaaatactgtggttcttgtggaggtccctgcagcttgtcttttaggggacagacagcacaagtggcttatcgagctattgctcaaaataaccctaaggctgacagatagcagggtaagtacaacctgcacaagagatccttgcatatgtgtttgactctctactcccacatgaaggaggtgtgtcagctacaaccagggcacaaagtcaattataggaactttccaggacctgggtcaggatttggcttggattctacgaacctcatagctcctttcaggattagtttagggtaaataccttcctcctgcttccctgccctgcagactctttggcagacccttctttatgtgactaagacatgagtatgaatgtgcatacacatgcacggccttgtcaggtcactttggcagtaaatgccctggccctttggtgcagctttgcctttcagttataacacaaaagatgtctgagcacactgtggctgctttggtttattagtaccaaggaagggtggccacattgatcagttatcccacttcaggggtctttctagaaagtatgaaggagtactatctttgcctctcaaagtgattcttggtggggattcattttacaaaaaatacaatggcacattgatagtgcttgcatctcccagcctttctacttcagaaggtcagttttcccactctgatgcatgatcaggtagtcttcctctcactcttagactcaggaaattattgtcatagctggaggacagtttaatctgataggcttccttatttagttttttcataaaatgcttggaattttggcctagtatttccagcgtaggctccttttcttcttcttctttttttttaaggaaagcattatttttctgaaacaataacacacagaattgcaagcagaaacaactgtctctaaagaattagttgcatgtaattagggattaaagtataagggggttcagacaggagatatacattctagttacaaaataggaaaatgtcctattgaatcaagctgtagagatagaagttatgaaaatattttttaaatctagaatattttaagtgccttactgcagactaatataatttagctttaaatgagaatgaggagttcaggaggtgaaaaataaaatatatataaatataatttaatttttaaaggctttcaatgctgcccattccccaggactgttctcacatgtcacctgctcctcaaactttccttagaccctcacccaggtatgctcttttcctcctctggaaattcccaacgttttgtttgtacctctcatttttattccctgatgtttctttttgtatgcgtctcataccttgctctccccttccttcaactaactcttaagtttcttgaaaacagggtttaccttgcctgtttttgcatcttccagaatacctaggacagggcctaagccatagaggatactcaattgccataggagaaaaaaagatgtgatccacatcaagctgttattaatgggataatgggcaaaggatttttcatcaatggctttttagtcatggagtaacttctctgtgcctaaagggcaccctgctggttttatgagaggctgggcaaatcagctcctctctcagggcaaacacaggcacaatcttgctctctctgggttctcactaatagtgctaaagtgttgactattaacatgatactttgaattttgagcttggatgtgtggatttgtatttcagcacctcgagtaacacagttagaaggaaattcatgtgaaattttatgggagacggtaccatcaatgaaaggtgaccctgttaactacattctgcaggtattgg

SEQ ID NO: 5860 - DNA, 1485 bp, Homo sapiens
gctgtttcacccaaagctcttaggattccttatgtctccccttcccaccttatacttgtttcacccaggaaagagcctctgtcatgcccatcgtctccttccctcctgaaggctcagtatctggttaattacatgacataggaattacttaccatctattttggctatttccatacacattctgagaacaaaataaaagagctcttctccatgcccctctcataatttcttcccatgcccttttttggggaaggcaggccagtcaaagcagtgatggctttgatcagagcaacgagcagatcatgatttattattgccggagtagacagtgggctacattagaggactgcttagacgcatgcttattctagaaaaggctgaaggaagaaagaaccacccctttccctcctcttctcagctcccttctgctgggagcacctggctgccagttcccaagttcctctccatggggaattgcagctccaaggtggcctcctggagctgcctaactccgccttcactgaaaataaggtgattgaactgtaaagctgaaatcctctgcagtcatgtctcctccagagtcttcaaggtcactcccactttttttctagacacaaatggggtcatttttgtaattctaattaacactgtctccagacataaataaaattttaaatttctcattgctatcagctgtttccactatgtttttcataaattggaatgcaattttaaacagttaataaaattctccagtacaagagcaaaacaagaagttaaaggaacacaatagtctagaaacagaagattttgatgtatttttaaattgatatgtatgttatctgttctatttagattacaaacttagagtaatgaatttgcttcagtaaatttctttgtgactgtgagtgctattgcttatattataattgggtctgggtccaaatatatattgaacttattttccaaaagaaatactctccttagattgtggcatggcaggaaagcatactgttcctagtagtcctctccaaactcctttaaaaactgagctttatggcaaatttgtaatgaagatgtaacactttcactacttaaaccatgacttcaatttgtgatataattaagggcaattactcctgttagagattgtagactaggttaggctgagttaataaatagctgtttggctctggcattagcaaggatgtcttcattagggtagtaatgtgtcaagagtgctaaataggttgccatggtatttgtgggtttcagcctggactctggctttccctgaaattaaaaatgttcagcctttaataaaaggcacttccttacacagcaaagcagacagaacactaaataggtgaaatgaccagggctcaggaacttgattgcagaggctgatgaatacacacgtggatattttaaagtaagcattgactctgacaggctttgttaaaaaaaaaaaaaaaagaaagaaaa

SEQ ID NO: 5861 - DNA, 284 bp, Homo sapiens
gtcatttctgcttagtcttctccaatctgtgacagttcctcagcctttccttgtcttttgtgacattgatacttttcaagagtactagtctactgttttgtagaatgtttctcactttgggttttctatgattatattgaggtaatacatgttgacaggaataggaaatagcacagaagtgatcttgtgcccttcatagtgcatcctaccaggaggtatgtggtattgatttgtcttgttacctgtgataccagccttattacttggttcaggtgaagtctacc

SEQ ID NO: 5862 - DNA, 284 bp, Homo sapiens; identical to SEQ ID NO: 5861

SEQ ID NO: 5863 - DNA, 465 bp, Homo sapiens
atgctgggctaatttttgaatttgtgtagagagggagttttaccatgttgcccagggtggtcttgaactcctgggctcaactgatccacctagggcctcagcctcccaaagtgctgagattacaggcaagagtcaccatgcctggccaaagccagatttttaaagtggaacataatctttcttttttgtttctgtattagtttattctcatactgctataaagaaatacctgagacagggtaatttattaaaaaaaagaggtttaattggctcacagttctgcaggctgtgcaggaaggatggctgcagaggcctcaggaaacttacaatcatggtggaaggtgaaggggaagcaggcacatcttcacatggccagagcagaaataagagaaagcagggggatgtactacacatttttaaacaaccagatctcatgagaactcactgtcacgagaacagcaaggg

SEQ ID NO: 5864 - DNA, 310 bp, Homo sapiens
tgcccctagctctccagtaggtggcggtgggtaggcgcagaagcggcctgtgttaggttggtgctggcctgtgcctggggcctctctctgccttttcttctgaattagaaggagtttcctcttggagcaaatagctaatttgcttgcttttgtgttgataggaggagcacagccaaattctttttactgatagataaacacgtgtttctatcaattaagcttttaattctcagtgttttatttttccattatattccaatcagtaatgaaaactgctacaattacattaaagaaaaatggttcttttggc

SEQ ID NO: 5865 - DNA, 465 bp, Homo sapiens; identical to SEQ ID NO: 5863

SEQ ID NO: 5866 - DNA, 310 bp, Homo sapiens; identical to SEQ ID NO: 5864

SEQ ID NO: 5867 - DNA, 4155 bp, Homo sapiens
cgcgcgaccggcgagggaggaagaagcgcgaagagccgttagtcatgccggtgtggtggcggcggcggagactgcgggcccgtagctgggctctgcgaggtgagagtgatcgcggtcttaggtccaactcctctacgtgccgggttcctccgccatatgggtgcccagcgcggcccctgtcccttccccgggcgcagcggagcgggcggctgctgcgtaggccaaaaggctacgctcccggtgcccccaaggcccacgagctttccccacaagccatttgcgcagtcgcgttttgtgagtaaccacctggaaggcttagctgacctttctccgtcaacaccggttcgctgtcctctgctcagaaactgggcaagggccttctgacttaaggaggtgcctgcaagggaccgtcgggaggcttcgtgctccacccggtcttggccagatctctcttgtgtccccagcaaagttgtgcgtgcggccttggcggtttcaggctcttaggcagcttgttttccttaaaagggagcgttttataaataggaaggtgattatcccttaggtgtcaggacgacccttagttaaccgtactttgtgagtggctttgaaactgtaatgagcgcagtttactgagtcattactagtctcgacccattcgtagagctagtcagtatttgttcctggaccttccttcgtaatacgcgctaaagtcaaggcatggaggttggagaacaacacgtgcaagtataggaggcccttaggctaaatgcctgctacacacggagatgcttgtatttacatagagatgtgtatttctggacataatacagaagaaaccggtcagcaactgggaggctgggaaaacctgttagctattcagaaacttttttttttttttttttgagccagagtctgttctgtcgcccagggtggagtgcagtgacgcgatcttggctcactgaatcctccacctcccggggttcaagcagttctctgcctcagcctcccgagtagctgggattacaggcgcctgccaccacgcccggctaatttttgtatttctagtagagacggggtttcaccatctggccaggctggtcttgaactcctgaccagcctgaccactcgtgatccacccgcctaggcctctcaaagtgctgggattataggcgtgagttaccgcgcccggccatagaaacaaattttaaaatttcatcagtgagacttcgtataggtttttttttttcttcaaatttgaaatgcattgcttcgtctgaaataatcattaactgtcaagaagacgaatgtcatggcttatccttgaaatattttaggtattattatttttgaggcttcagtagcttgaattctgttttcactggtaagtgctgggacttctaaaaattttcaaactaaataattgataaaattggtagtgcaggaaagttctgaagcataatacaaaagaatccaccgatacatttgagaactataatattaccaatactagggtatctattgtttacatttccctgcttcctattcataggtacccaccatttggaattttgtgcccatcagtcttttgggttttgtgggggaggggggtggtgtggatagctttgtggggttttttgttgcttttttgagatggattctcattcctgtcgtgcaggctggagtgcagtggcgcgatgtcagcacactgcaacctccatctcccaggttcaagcgattctccttcctcagcctcccgagtagctaggattacaggcacccaccatcatgcccagttaattattgtatttttagtggagatggggtttggccaggctggtctagaactcctgacctcaggtgatccacccgccccgaccccacaaagtgctaggattacaggcgggagacaccgtgtccggcccattttttaagctttgtaaagacaggattatgcatgtagttgtctgtagttcctgtgaatcataatattaaactgaaactttttttgtttcagttaattttttttgaattattcaaaaccagtagtttatattcctaatactgattgtgtgaaacattttcagcatttcagcacatgaaaatgattgtttttgcaagctccaaccttgtatgtcttcataaatcatttcgtattgctgcctggctcaatgatttattctcctgggctgctgtatgacatgattttttgccccagtccatgttctttgcagtttttagttaacttgggacttaattttacaggaatgtgtccagtaaaaatgccaatataggtatccctgctctgaaactgctaggtttgccgttataatgtttttaggtgaaggtcttcacgttagtttttatacatctaacctggctcatagctcatccttgtcgagctgtgagacagaaaagcaacggctgtgtactcactatgaccattatgtcttaaaatcaaaactgccacagtgaaggatatcatgaaatgtttccaccattttcctgccagtgctaatggctcctgtttccagtttggaataagctcatttgtggaaatactaggtactaatgagacaaacatactcagttacagaggtttgggtttgtcagtactgactatcaaaaaagcagaaacaggtaatagaataatagtacttttttattaaaaagtggtttgggagtctgaaaggtaggttgcaagtacagttcctaaaggaatgagattctcttcttggaccattcctacatataagatgcccaacaaaatgcaaataaaaatgggaattcgaaatgtaatatttaatttccaggtgcaagaaagcctttgaggtgaaggtgtatgaaagtcatcataacagatgttttccaaaaacttgtagaaggttgtgaaaaaactactaggatcacgcggcatgtattgaggtacctaaatttaattaatgttagttatgtgatgtattcttgacagataggtttaatagctggcacaatgatgacttaaattactttttgccgtttacccagctgaggttgtctttgaagaaataattttaagactgagatgccagtactgtacattgattaattactgacatgtatgtaaggcaataatttaattaagggtgaatattctttgtttttagcatataggttgctgtagatgaatgttcttagctgtcatgtttaaaaatacttctgcttcgttacctcaagtaagtgatttgtcaagcaactatgtctgctgacagttcagaaagtatctgataaacttaagggtgggggcagattcttgttgaagttgcttttgcatgtgtggtattctcaacattagttttttgaggggcacttgtgaatattgaggttatatgagaactttgagtatggaatgattttcactgtggtttctgactttgttttggaggtgtggcatgcagcattttggaaggaaaattgaagacgtgttcaagaaaacatgaacagaagcaaatgatgaaaatgagcattttacttgatgttgataacatcacaataaattatggagaaaaatacatatttggctaacttttaattgctgaacaataaagtgttttcttttaaatcaactctaaatagctccattctcatagtcactagtcagacctgttttgaacatattcgaaagattataatcttgtcaataattagcttatttatgggtggtgattctcattgaggctgacagctggggagacattgcttgtacctctaggttccctgtctggcttccccttcagagcctgctgttgtaccaggtggttgaatcttaaaactctttaataccaaatagcaatcaaattcccccttacagataaaggtttcaccttttttattcagtttgctttcatctttgtgaacaaaaaagtcatcctaatactagtacatgtaataactaagcaatatgctatgttaagagaaatgactgagcagaccagtctgtctaggactaaattggcaagaattctaaagctgaatttatatctgggtgaaggtttagagctaaatcttttctcctgttgagtactagcttataaattccttttaccaaggttataatttttatatgataaatggtataaaacctgtatagcaacatcttagtcacttccctcagtatag

SEQ ID NO: 5868 - DNA, 1144 bp, Homo sapiens
tggtgaagtaaccatctttgagactgaggttgggttttttgagctggggagattaaggtggcagtgagctatgattgcatcagtacactacagcttgggtgacagctacatataaatatgtatatataaatatagataagtaaataaaagccatctttgtgccatgcatggtggctcactcctgtaatcccaacactgggaagctgaggtactgagatgggaggatgacttgagaccagcctgggaaacatggcaaaattccatctctacaaaaaatgcagaagttatcccagggtggtagcatgtccctgtagtcccagctactcggaggcctaaggtgggagaattacttgcaaggtcaaggctgcagggagctgaggtggcgccacaaccctccaaacggtgacagcccctgtctccaaaaaaaaaagtttttaaactttccaattgtaaaaggatcctagttttataaaataggaatgtgttttgccttccccccatagagagccagacatgtttgaaatgtagtatttgagaagcacaaaataaacgtcttaacattatagaactgtaatatgtaagtattttgttgaaaactacagtcgccagtcgtgttggctcatacctgttgtcttagcactttgggagactgaggcaggcagatcacctgaggtcgggagttcaagaccagcctggccaacatggtgaaaccctgtctctactaaaaatacaaaaattagccagtcatggtggagtgcacctgtaatcccagcaggagaatcacttgaacccgggaggtggaggttgcagtgccaagataacaccactgcactccagcctgcatgacagagcgagaccccatctcaaaaaaacaaaaaacaaaaacactacctttggcttctgaaaactaatactgtttactccctgctactagtaggtattcagtaatagtgaacaacttcctccgggtcctgtggagagtgggagaggtccagctgtacagttaagcatctctgttaagggaccagttttgaaagaattgatgcatggtaacatcttggttaataaagtggcaatttggtaatgacattttgcttttctgtgaatagaactgatcttttattaaagttatggaaactgaact

SEQ ID NO: 5869 - DNA, 182 bp, Homo sapiens
tactgaaaatacaacaaaattagctgggcgtggtggcgggcgtctgtagtcccagctactcgagaggctgaggcagaagaatggcgtgaacccgggaggcggagcttgcagtgagctgaaatcgagccactgcactccagcctgggcgacagagagagactccgcctcaaaacaaaacaaaa

SEQ ID NO: 5870 - DNA, 10872 bp, Homo sapiens
gtaaaccccacagcccagtgtacccatgccctgttgaagatgatctactgctcccactgccggggtctcgtgactgtgaagccatgttacaactactgctcaaacatcatgagaggctgtttggccaaccaaggggatctcgattttgaatggaacaatttcataggtgagcaagtggttaacatatttgtgttgctggagatagcttagcttccagtcacaaggaatgttgtaattggcagctatgaaatttgtttgtttaagtgtttgctatttagtgtttgtcagaatcctgactacgctcaactactttgagaatagtaaaaacattactgcaagtgaatgttccctcaaactaatggtggcatttctgaaggtaatagatacagtggctgccaggttttaataatgagaaaatgcctttttcttggagacagagtctctttctgtcacctaggctggagtatagcagcacaatcatagctctgtgtaacctgaaactcctgggttcaagcgatcctctcaccctcagccccccaaaagccctgggattataggcatgagccactcactgagaaagtgtctttttgatatttcccgcctgaaagtcagttgtgtttatgattataggcttgtatccatgtaaatgctggagtacagtcctcatggagttgtaaaagtggcttttaaaatgttatatctattacactgcaactaaatcttctgcaaaccggccagatacgcatttgttatttggatcaggtgaaatctgattgagaaattcagggattctgtttctgtacaccatttagcagtagtagtctgctctggtgagagtggaaggactttagccctgagaatttaagggatacatattcctgcatatatattccacctagaaaaccattctcagaacccagacagcaatgtaaatgaagtggccaattgcagagagggttagttatgattttggggaaaggacaaattaaggagaatttaaatgtccagttgtcaattaccttgatgcctgaagcaacagtaaccagtgttgaagttccttatgctgagtattagtaggaccgcacacacatactaacagctcacaaaaagaaactcacatttttccccaccctagtcacctttgcataattgccgaatttgagtgtctttataagcacctgtttttcacttatttgtccaaatcatgggaacatgtatgcagtattctggcttggttttttggggggaggtgaggggtgttaatgttggggaatgctttttagtctgtgtgagagctaattaccatattaactccgtttgaaagtgcatcaataaattggctccaacagattcttaagaacactgacacagggggataaaaaaagatgtgaatattaagcacttcagcacaattgtagcctaaatagctcaaagctagaagacctgaaaaaatcttctacacacagaaaagcagaatctcatgaaagggaaggcataagaccagcaaagacatacaggccaaatggcacatcatgcccagaatgaagccatgggagaaattgttgattcaaaatatttctcatggaagtaaaaacccatagaatttccagatctaaagtcgctgtttttgttttctctctctctctttaatcccacactcatccccacacccaaatgtcaagtttgcagttcacttttgcaaaattgaatttttaaagaaagttggtgatccttttcaattgcccctataattcactgtttctccaggcaaggtagtagaatttgccatatggtacaaaaaagtgtatggtgacagtgatcgaattctgctgacttttctacagacacattgggaatggaatgcagaagggcatggcccttgccactattttgatactctaacatgtctagcagcaactataactaaactcatatccttatattaaaatacaaatgctcctacgtgtttttcctggagtttacaggtccatatcaaatcaaaaccacactctggctttctttattgatgttttaaatcagttactcgaaaacaaagaggacttaagttgctgttgttgttcttgttgggcatttttaaaattacatttgttatctttgaagaaacaaacccaagtagaagttgataggatttctgaatcgatttttccctagttattttaagtgataactttttggagggatgaggtatataattgtatctaaactttgtttttaatgggtatactattctttatttctaataagcagatataaaagaccaggagtaatagacattgttaatctccagtgctttttcatgaatttttcacaagggtttaattaatctgctttgtggttgtagaattcagtcccaatttacatgcctctgctgtaaattctttttttatttcttgtctctctctctttttttttttttctgtttgcaaggaatttttctttcccctttaaatgactgcagctaatgaatggtcaagggctttttcccccttctttaaatcagatcttggggttaagtcgggaaactgccttttgttcttccagtcaggtcgggaggctgaagatgtgggtttctgattattggcagcacaatgcaaaaggaatcgctttccctagtgagaaggggatgctttgttgctgggggtatggggggaaactcagtgccagtgtcttgagcactgaaataatgcagttggactagaccctttaagagactaaggatgaactggttttccaaatccgtcttcttgttgccatgctcttcctctcctctcttaactgcatctgcaactggccatgaattgagaccctttagtaaatgttgaagtcttgtcagccttttatcaggatggatccaaatagttaaaacaccttagaacttggttttataagacgctggtttatatgaaaccttcacttggaaatataaaccaaatacctcccttgcccccaccaacaaaagtcagtttctggagaatcataaattatgctatgcaacttgttctccatcacatactgtagctgtgttaacactcatttgactcagggccaaccctattaatgtcgcatgttgctgccagtgggaatttagtattgggattgctggcggggacaccagccaggtcctggcaggaggcaggagccagtcagatatcccgcaaacaagggcctccgtggctcgtatcagccagaagaaaacccaaactccaaaccaatcatctttggctttctcttgaggcttcttatcagggctggctgctgttacagaagagccaattgatagccaatcatgacttcctccaggggttagaggcagctttggctcccgggctgcagagtgcaggcagaatgctcttcagttgcattcttcagctgcgcaacacacaacaccatggcaccggccccaacaaaggcccagcttccccctccattcccaggctcttgtgtatagccggctggctcagagtttacaaagacgccaaacagccagaagaattggggtttatgtttcctttcagtctttcacaaacacattagtgatctggccattccttgccactaggggaataaggagttacaaaatgcactgggttttgttgttgttgttgttgttgttatttaaacgtctgcattttagatgtttattttctgtctattcataatatttttattgggagcaggtgatttcttctcagcttacgaaggaatgtgctttctgtacgtggcagccctgatgatttgacaatgatgaacacatttaagttgtgctccacttgtttacaaaagtctccttttgctagcacatcaaaagcattttttttctctcctgtagtacaatggtatattcatgctttcagcccttacttagagttagaagcatcacttgattggcgcttaccacaatgcattctgaaacttcatttgttattactgttttaaaaattgcatttcatggaaatctatttgtggtttgtgacatcggaattgtagtttagagaaatgaccccgtgcattaaaatgttgtgtagcatttgttctaggttgaaggtgaaagcttgatgactagatttggtttcattgatatgctgatgcctatgctgctttccactagaaagcttagatagaagctcagctgggggctgcaattgtcagctgtgttctttgggtaggacacaatcttccgggaactagctcttctttcaagtaaccatccttgcactacctgaagatgatagataatgtgggtctaactcctttcttgccatgcactaagcactagagtgtaaaggggggataaacaagtttaaaagttcactgtttgtcgttaatgaagcatcctttttgtcatttggggttttcatttccaagttcttctaattttgtaaaacaggtagcaggcaaaaatactaagcctcataatcctaagaaacatatatggcaagaaaacaaagacaatgtattttattgaagcgattcagtgcttactggaaaatgccatgctactccagagtctaaagcaggataatcggtgaagatatatactgtgagcccactaattttgtgtactgtatcttgtgtcatcttctcacttgcaaaaaaaaggaggtacatgccttaagataaattgaagccattgtatttgcaatgagaagtttttcttaatacaaaaattggattattcaaagttttagtatttgaaaagtcattagaattcctaggaaccctttcatttgtattatccaacggtgcactcaaggatctgaggggttttgtttttaaaaacaaaagaaaagaattaatatgccagcatcttaactgatttatgtttttgactcttgtaaatggaatgtgaaacgagaagatcctagggaagtctctgggagagctggcatgttattttgtctccagccttaggtttgtcatctgggagctaactaagagccttacagtgacagtggctgacacacgaataatcagtattgaggaaagttcctgattgggtttccttgctgtagaactaagccttcatctggccatttcacactttagagagctagtgatacatagtgactaaatgcagtttggtgtaagggaaatagacataaaaacaagaattcattatgatccatgccttacttcccctgcccccatgcaggaaacagacagaaaaaaaaatcagattgatttacccaaggccaaactaatgattgactttttatgctgtattgttcttccccaaacctcatattagatgctatgctgatggtggcagagaggctagagggtcctttcaacattgaatcggtcatggatcccatcgatgtgaagatttctgatgctattatgaacatgcaggataatagtgttcaagtgtctcagaaggtaatgaaggcaggatgctggaaaggggagctagggacctcccccgcctccgcctcccgccttgggagtgacttccctaacatgacgacacttactctaatgcaggttttccagggatgtggaccccccaagcccctcccagctggacgaatttctcgttccatctctgaaagtgccttcagtgctcgcttcagaccacatcaccccgaggaacgcccaaccacagcagctggcactagtttggaccgactggtgagcgttttggcaggaagggccgtgtttaatgacaaagaactgaaaactcttgctcaaaatgaatttttagctggaaggctaacaagtgtgggtctttcaggtgtcacttttcaagcaaataggatgtggatgtcagtcaatctgcctgtcccattttctagcccagaaagttcttgggtagccaaggagttatgatgcaataagtcttgtctcaaaatttctctttagattcaccatgcatttattgaacatctactatgtgcccatcactgtgctaggcatagagaagctcagagaaataaggcagatccttgttctcaaaaggcaccaacaaggaggcaaagagggagaagtagatgttccaggcttattaacataaaatgatgtttagtaaaagctgagatgggagaaaagtgagtaactgtaggcaaattgctttatccacagtaatatgctacaaaaatgtaagaaactattcctacagtagtaggaacacagaagagggagcctgaggagacagggatggagagaaagagcaatagcagctatgtttcacagagtgcataatatacatgcttgatcctgactctaaaagccttaggagaagagactgcatgttatctttgtgcctacagggcatggagactggtaggcctcagatggtacttacaatgaggtgggcaaggggtctaggccactcctttggagcttgcatttcaactattatttgagtggttttgtacttctaagatataaattggagttgcatcttcctcttctaattaaagttgaaaatgaattgcatatcactctggagatactttggaaatggccagaaggcacacttgtaggtagttttgtcttgtcttacaatgatctttttttgttgttgttgtttcataattaggttactgatgtcaaggagaaactgaaacaggccaagaaattctggtcctcccttccgagcaacgtttgcaacgatgagaggatggctgcaggaaacggcaatgaggatgactgttggaatgggaaaggcaaaagcaggttagtgtctgttgaatgaatttgaagtttctcccttcctagatgcctgggtgaccttcagagagggttctctcaattgtcaaccgaggcatcaggaagcaattcacagtaggtagcaacaacatggaaggcttctaggtgttcttaggaacaggctttgcactaggagtgttgagaaggcacccagttacttacaaagagtgctgagtcaaaagtttgacagtagttatagtctcgtattagggctgttccaatagtgtcattatttttaaaatatttaatgcctgtggctctttgtccaatggcctagcctcataaataaccagttctcaaaggttccattctctgacttgatgccctgtgtccctcccttagacgctcagtaacttagagaagtacccatacttttttttgtttgcttgtttgagatggagtctcgctcttttgcccaagctggagtgtagtggcacaatctcggctcactgcaacctccacctcccgggttcaagtgattctcctgcctcagtctcctgagtagctaggactacaggtgcctgccaccatgcctggctaatttttttttttttgtatttttagtagtgacagggtttcaccatgttagccaggatggtcttgatctcctgaccttgtgatccgcctgcctcagcctcccaaagtgctgggattacaggtgtgagccaccgcacccagccagtacccatacttctttacttcaacccaccatcctcctcaagagggatagctagcttccttccttccttccttccttccttccttccttccttccttccttccttcctccaacagagtatcactgtcaccctgctagaattcagtggcacaatcttggctcattgcaacctcactgcaatctcagctgctggaatgcagtggtgcaaccttggctcactgcaaccttcgcctcctgggttcaagtgattctcctgtgtcagcttcctgagtatctgggattacaggcacacaccaccacacccggctcattttcatatttttagtagagacagggtttcgctatgttggccaggttggtctcgaatgcctgacctcaagtgatccacccaccttagcctccaaaagtgctgtgatagctttgaagaaggtttccatcaaattggagaaatgaggaatccacaggaacaagaaagattagagttcattaggaattaaagaacttccatctaattttgcttagtggaaatactagaatctagcagaagtatttgataacctcttgtataatcttcataatcttcacgcctgtaatcccagcactttgggaggcagacagataaaatcttttcgctttacgaatcatcttactggggtcattttacattccaggtacctgtttgcagtgacaggaaatggattagccaaccagggcaacaacccagaggtccaggttgacaccagcaaaccagacatactgatccttcgtcaaatcatggctcttcgagtgatgaccagcaagatgaagaatgcatacaatgggaacgacgtggacttctttgatatcagtaagcatttgtggtttgaaagtacgaattgctcttgtatgtcttctgatgagaacaagtggaatgaaatttctattccatttttttttaaactaggtgatgaaagtagtggagaaggaagtggaagtggctgtgagtatcagcagtgcccttcagagtttgactacaatgccactgaccatgctgggaagagtgccaatgagaaagccgacagtgctggtgtccgtcctggggcacaggcctacctcctcactgtcttctgcatcttgttcctggttatgcagagagagtggagataattctcaaactctgagaaaaagtgttcatcaaaaagttaaaaggcaccagttatcacttttctaccatcctagtgactttgctttttaaatgaatggacaacaatgtacagtttttactatgtggccactggtttaagaagtgctgactttgttttctcattcagttttgggaggaaaagggactgtgcattgagttggttcctgctcccccaaaccatgttaaacgtggctaacagtgtaggtacagaactatagttagttgtgcatttgtgattttatcactctattatttgtttgtatgtttttttctcatttcgtttgtgggtttttttttccaactgtgatctcgccttgtttcttacaagcaaaccagggtcccttcttggcacgtaacatgtacgtatttctgaaatattaaatagctgtacagaagcaggttttatttatcatgttatcttattaaaagaaaaagcccaaaaagcagtaaaatttccatttctccctgttattttagttgccttatctggagagacgtggaggtgattttcttttttttaaattattattaagacagaatgtgagggcacaagcaggcttctgagccacttgtcagattgtattcaaagcatcaatccaagaaggaggttatgtgtacttcatttattggtgatagttggaagagactgcagactactgctttgaatgagttgaattacataagctaagatcactataggtccatttcttgaacccacttatacataaaatgtaacccatttagaaaaagattctggatatcatcccccttgaaagatagaaagcattcaggatgtcccagttatcacatgttcacacttgggtttaggggtgtttttttttaaaaccaggcaggttagctagcccaccctgtgctagttttcatgttcacactgaccctatttgaattaatatcctttgttagagtggtcgagatttcaaacccaattatgtacagggagctgtctgagagctagccagaactggggtacagcctgggctcagggaatagctgtcaacactcgggcaaagtttttgtctgtgcatgtgtatctccatttgttttgggatcccagtttttgttttaagagagtataaggtgtctcatttgagtctttttcttacctagccccctcttatcagtaaaacaaaggacttgccatggttcacagcaatgtgctacgatccaagatatcagccaaggagcccacttaggggagaactaggtgtccagatttttgtatgtgttgtttttcttgggggatggggtggggtgggagtaggtagagctgagaatactacatcttagtggtgacctttagccacgtgggtgaagtggcaaaggccatggccatatctgttgtcccaggccaaagactaacaactgccttgggaatcccttccttgtgtccttaccaaatgatagctcataaaactctgataatgtaacaaatcactttcaaaggagttcccagaagtcttcagaaagactaaaattctgtctcttcctgctttagacagccattaagatcccaactaattttaccgaacctaaaacccacaaagaggttgtttgtgttattgttcaatcttcagttgtaagagtaattctctatttttatattgaaacataattacttgatagctcagggtctacatttcattcaactttttacaccaaattctgcagagtggtcaaaatggaatattgggggctgttgtaaacagaggcttaattttattagaagtagccagttatttattaaagcatgatgttaataaaataggcatattctggctggtgtgtataagtggttttttttttaaaacaaatcagaagacataaaattgaaaaggcactccatttatatataagggaaaatagattgtaaatagctaaggggccttgtgagaacttggaaaatgtgctgatacttagtaactacctcagttgtgaggaatttcctttttagcttagactgctattacttttacttggtagaaatgaatctggtctccaaaatatggctcagagagttatccccatagaccttgttagattgtttttaatttaaaaccttgaactctgcccagctgttttcttccagtcaaattctctaaaccaataacattttccaaattaagtattcttgaaggttcttctgaactcttactgatttgttttctttctttgcattttttcctgttactcttttattatttaaattgtctcttgcttttgaacttcaactatgaaataaacaaatcatagatttttc

SEQ ID NO: 5871 - DNA, 497 bp, Homo sapiens
atttatattttatttcaaaaatcgtaactagcacctgttattttgattaaaagacactgcgaagaattgacgtaaatttctaaagtttagttactgagtgttcaaaacctaacagttcacatgaagtaaaaattgtcatttgtgattacagaatcaaaataaaaataggtatgaatggtgctacacaaatttctgcttcccctttgttagcagaatatgtctatttacatagctaaagggtagtaggttattaggttagtgcaaaagtaactgcagtttttgccattactttcaatggcaaaatactaacagttatctactagaggagggtgtgtgtgtgtgtgtgtgcgtgtgcacgcacacgcgcatgcacatgtaatgtcactgctaagccaaatgtaactttctaccttttttgaaacaacaacaaagtactcaaaattcttctgactttgaacttcatgggaaaaaatataactgcataccgtgatacactt

SEQ ID NO: 5872 - DNA, 474 bp, Homo sapiens
aaaatagtcacaaaacgtatctgacctccacatcctgtaattagaattattgtggtctggtacactgcacccagtttctgcaggagtacttctgggtgtctctaatgagtaagagagggccccatgggatattcctacagttcccagatgaacagtgggaaaggctctacgttgacaaaccccggggacctgaaaactcaggtcctcaaggagggtagaggatactggacctgacccagaccctagatgggctgtgccaagagacccagcaagggaagggattccctcctgcctcaggttctccgttcttctgtggttagaagacctgaacccaactccctccccaagcactggagatggggcttttccaagggctagggatcttgctgtcctaaggacagctgagcaagggggtcgaggaggagcttgggtggtggaggagaggaaaccgggtaagatgtgtgaagcagtcgg

SEQ ID NO: 5873 - DNA, 1759 bp, Homo sapiens
gaaaatagtcacaaaacgtatctgacctccacatcctgtaattagaattattgtggtctggtacactgcacccagtttctgcaggagtactttctgggtgtctctaatgagtaagagagggccccatgggatattcctacagttcccagatgaacagtgggaaagactctacgttgacaaaccccggggacctgaaaactcaggtcctcaaggagggtagaggatacctggaccctgacccagacccctagatgggctgtgccaagagacccagcaagggaagggattccctcctgcctcaggttctccgttcttctgtggttagaagacctgaacccaactccctccccaagcactggagatggggcttttccaagggctagggatcttgctgtcctaaggacagctgagcaagggggtcgaggaggagcttgggtggtggaggagaggaaaccgggtaagatgtgtgaagcagtcggctataccaggcacagagaggacccactgggacacaagagcctgcatgtgaagccaggccttgggccaccttgttcctcaaaggggtgcttacttccatggggtcttcaaagggactgtggaaagagaagccttcagcccacacctctgaatgcttttccaccacagcatgccctgtggcctgtatcctgctggtgtggaacagtcagacccctgcagggctgcagagcctctgtactgggcggcatcccagcctgagtgccagagctcagtgggcaggcccccgagcaagtagagaggagggcaccttttggacagaacctgtgggacaagagcgacgtctcatccgttcaggttcctcacaaaatgagagtcaggaagatcagggtgcagacctgatttcccacgaagggctgaaagcagacaaccagagggagagcagcacctgggccaatgaggtagaagacagaagaccacagtgtacttctgccctcaacctcaccccctcccacctacatcctccacaccccctgaccaccttcttcagaaacgtaataggaatcaagatcccccctggcctggttgctatgggaggcacagtggcctgatggagcctgaggcaggtgtgggaagatgtggattgtctaactggaggttgggagtccagggtgcagaaggagaagcttggagtgcaggatttggtggtatgtgtgtggcagtaggcactatgttctaattgccagttttttttttcttcttcctttttttctctagctaaacaagcactggccttgagataagcaatgctgaagcacttgcagctcacctattaccaaaaactgactgagccctccctacacaagccataactactgctttgattggacaagagactgatttcagtagttttctcttggtaagagaccactggccgtgggctggttctggacagtttacagaagctatgcacttgattgcctttgtgtccctgcttcaccttttgaagcatagggcctaattataatgtatttaaatgttgtctccaccccaaagtgaacatgggttgcatgtaacaggcgtgtttactcagcatgcatgcagcaggatcccttcacaaatattcagagctccccctattccctgttgaatatgtatatgtggccaaccagatcaacgtaaatcactattcgccctcccctccctggaaacttactttcgggtttcagcaggaagctatgcctcccagtctgtcagaatggccacttgcaggctgtaacccttt

SEQ ID NO: 5874 - DNA, 6498 bp, Homo sapiens
atcgggggaccgggcgcagtggctcacgcctgtaatcccagcactttgggaggccgaggtgggtggatcactcacttgaagtcaggagttcgagaccagccgggccaacatggtgaaagcccgtctctactaaaaatacaaaaattagctgggtgtggtggcgacgcttgtagtcccagctactcaggaggctgaggcaggagaatcgcttgaacctgagaggcagaggtggcagtgagccgagatcgcgccactgccctccagcctgggcgacaaagcgaaattctgtctctcaaaaaaaatgcataaataaataaaagaggggtggggaagcaaaacgacgggcagtaggtgtggggcgcattgggattctatagtggttagtaccctgccttgtgcctgcagcaacctctgttctaatctgaatcctggtacagtcagactctatcttggacccactggggcgaacccacgagtcttttggtttgcttttaattcctgcaccagctgcggcctttatctgcagccagaaagcagggtttaccgctggccccacagcgccatacggtctggggaaaagaaggaaacccaatagtacacaaacaaaggcccaaagagaaaccttccaagtgctctatgcctcacggtttagcagaaaatatcaagcaactctcaacctagctggtctgtagcttccacaaatgaaatactgtattcattgcagcctttctggttgagatatttcaaatatttggtggagcttttaatgagacggagagacactctcgagtgtgaaagaaaaacatgagggggtgtgaggataaggcgactttaggacagaaaaaacaaagagacaaggaagccacgtaaacgttttcgggtaggcgtgaggcgatgtcagttttgaaccccgtttatgttaggtagagagcgcagccctcttctagcacaaacaccgtttcccacattgaagaaatcacagagatcagcaactctagagtgcgatgaagaagcttcactctgggagaacccccttcgtgaccacggtctctttcctgccaggtaagtgggaatgagcgcatgccctgcagggacagcacagcgtcctcgccctggtcggacgctcagggtcaccaccctacccactgcccccttcgccattcttccaaaccactctctgccaaagattccaccgacagtcaccccacacgacaacgcaggccgcctttcagcagtggctcccgccccgcaaccacgcgccctctcacccccgcggttctgcccgccgcctctgtccagtctgtgcacttcacctccctggctcccgctctcccctgagcttacagtggacgcggggttcttccaaacccctcttgggaatactgaatggaaaagggggagcgtgcgcaagtgcttggtagagtgtagacattgtgggatttgactgtggtaccatcgctttgacgtcctagtgctgatttttacacctgcattctgcttagggcactggcaacagttttccgtttgtgcctactccacctgctgtctttgttgggtcagcgaacatcgcctccctctaccgctcaatcagcaaaagggaccgcccttgaggacctcacccgccgctcactcccctcccaacttcgcgggcatcgcctccggtcgcctcttccgaaggcctaacgagcatgttagctgcgaacggaggtgaggaggctccgctgactgaccggtgcccacgtccagggcacgcacaaacgccatgacttggcttggcctctctcttagttattcacagctcagcccgataggcacctctggggcggcgacggcaaagagggtgcgcttattaagtgcagctccacggggactggcctctctgcacggctgtgtacacctgagcgagacgctcagtcgctctctaaagccgcttctgcggatgacagacacggagataaacgtgagaggtggcccaccacgacttgccctcctttgcccgggtttgcccctcgctgcggaggctgttctacatctggcccttggagcagggccggctgacagcgtggtaaaggaagatttctgcgggagggcggccagtgcaaaacaattccctgaccgggaatcgaaccggggccgtggcgctttcagcacgaaatcctagccactagacaccatgcagatgcggaaagctgctttctctcctttcttcgacctgaagcgacactttcctgtgctctagaagacttgggtcttgtgagagtcgccctttgctcctggagtcgtctcacaagggccgttcactccttgctttcttcaaaaaaagaacctgcaggcgacacaccaagggactccacgagggagtcctgagtactggagcgagttgcggccacgcggccgcagctcaccactggcctagagatgccctttgcgaggcggcagcaactgacaagatggtcgcgggtcgccgggtccggagccgcccaccaggttgccagaaggaggcgggagcggggaggcgcccgaggtgagacaggggcaccctctgcatcataaaggacccagaccccggcaccctcaacatcataaggaatcagacggatgcggaaaccgagacgggctggataggaaactctttccaggaaggctccggggcactcaactggtctccaaccttcccctgcaacctgtgacgcctgccattttcccattttaggcgatggcaacgcaacccctccgtttgctctgggcaaaacttcgagagttccctctgaagctggagctttttcctcagatccaagatccaattggtcaccaattcgtgatttccgtcggccaagtgcgtgggcattgatctacacgcgagtttctccacctctgccgaatggctacttcggggtgggggaggggccctcccgccgtggattgcaaggtgtttagcagcatctgtctcctccgctgactagacacatgccagggggataacattctccctcccgcttcccccagccgcggcctagtgtcccagcggggttgggagaggcatgtgagggcgaagttgccccctgttgagaaccattgctgcgcgtagtccttctctctgaacttgtgcagaggactctccaggtgaaggctcaagggtggatccagctcgagacaccctcgctccccctcacagtcggaccttaggatttaggctttaacatctccacatcatgagattcgaaacctttaggtcttgtcttccgttctgtcctccaaatcggcctcttccgagcctgttgaccagggccagccgggcagagggctgggctcgctcaacgaggctcctctcgcacctcctggagcttcaggcttctttccgttgcagagaagctttatgggccaattcgttcggcatccccgggggcaggtgcgcggtgcgcggggaagaagaggatttgactgcggttctccacccccggcgcccaacctccaccccggtgcgcgcgctcttccaggctcctgctggtcccacttgccaggagttaggtctcaggtcagcctgagctcctgagacgcccaggcccggaaagacacgtaggggaaaccatctgctcacttctgtcctgtccggaagggatccctttctgacgggaaagaaaggcggtgagtcctgtcctgttgagtaggcggaagagagatcaaagggaagacaagaaaaatcctgtgagttttcaggatctaaagttaccatgaggtcgacctaacctcctctggaggtcctcccggtcctcccgtggctgtcgaaggtgaatctagcttccgtctccagttcgccaaggcggacaaagccgacgacaatgggcctgtccactatcttctttcatatgcacaaaatgtcagctcttcttgtttctaacttgcaacatcccacctgatgaccagctcagcaaattagagaccctccatgggattccatctctgtcttagttcgggcttccataactatataccataaactgggtggctaattcacgacagaaatttatttctcacagttctggaggttggaagtccgagatcaaggtgccaacatggtagggttatgatgagagacttttttctggttgtagactgccaccttctcattgtatcctcagggggcagagagagctccctggggtcccttttatagtggcattagtcccactcagactaacgggactaaatccagacccagttattgcaatgtgtgcaaaagaacaaggacttgtactatctgacttcaaggcttactataagctattacagacaaggcatcaggagggacaaatagataaacagactgagttaagagacctgaaactgatccacagccatacagtcaataaatgagctttcaatgaaagcagttcaatagaagaaaataaatcatttcaattaatggactttcatatggaggtgggggagaccaacaatgttattctccctcacactacatacaaaagtaatttgaggtgcattatacaccaaaacttaaaagttaaagatataaagcatttcaaggatactctgtaggtaaagattagcctaccaacaagtaggacactgaaaaaatatatataaaagacatgataaattagacttcatcaacattagccataccttctcatcaaaagataccactaagaaagtgaaaaggcaagcaagccacagacagagagaaaatagtcacaaaacgtatctgacctccacatcctgtaattagaattattgtggtctggtacactgcacccagtttctgcaggagtactttctgggtgtctctaatgagtaagagagggccccatgggatattcctacagttcccagatgaacagtgggaaagactctacgttgacaaaccccggggacctgaaaactcaggtcctcaaggagggtagaggatacctggaccctgacccagacccctagatgggctgtgccaagagacccagcaagggaagggattccctcctgcctcaggttctctgttcttctgtggttagaagacctgaacccaactccctccccaagcactggagatagggcttttccaagggctggggatcttgctgtcctaaggacagctgagcaagggggtcgaggaggagcttgggtggtggaggagaggaaaccgggtaagatgtgtgaagcagtcggctataccaggcacagagaggacccactgggacacaagagcctgcatgtgaagccaggccttgggccaccttgttcctcaaaggggtgcttacttccatgggatcttcaaagggactgtggaaagagaagccttcagcccacacctctgaatgcttttccaccacagcatgccctgtggcctgtatcctgctggtgtggaacagtcagacccctgcagggctgcagagcctctgtactgggcggcatcccagcctgagtgccagagctcagtgggcaggcccccgagcaagcagagaggagggcaccttttggacagaacctgtgggacaagagcgacgtctcatccgttcaggttcctcacaaaatgagagtcaggaagatcagggtgcagacctgatttcccacgaagggctgaaagcagacaaccggagggagagcagcacctgggccaatgaggtagaagacagaagaccacagtgtacttctgccctcaacctcaccccctcccacctacatcctccacaccccctgaccaccttcttcagaaacgtaataggaatcaagatcccccctggcctggttgctatgggaggcacagtggcctgatggagcctgaggcaggtgtgggaagatgtggattgtctaactggaggttgggagtccagggtgcagaaggagaagcttggagtgcaggatttggtggtatgtgtgtggcagtaggcactatgttctaattgccagtttttttttcttcttcctttttttctctagctaaacaagcactggccttgagataagcaatgctgaagcacttgcagctcacctattaccataaactgactgagccctccctacacaagccgtaactactgctttgattggacaagagactgatttcagtagttttctcttgataagagaccactggccgtgggcgggttctggacagtttacagaagctatgcacttgattgcctttgtgtccctgcttcaccttttgaagcatagggcctaattataatgtatttaaatgttgtctccaccccaaagtgaacatgggttgcatgtaacaggcatgtttactcagcatgcatgcagcaggatcccttcacaaatattcagagctccccctattccctgttgaatatgtatatgtggccagccagatcaacgtaaatcactattcgccctcccctccctggaaacctacttttcgggtttcagcaggaagctatgcctcccagtctgtcagaatggccacttgcaggctgtaaccctttataaaaaaataaaatctcctttctaaatttataaatt

SEQ ID NO: 5875 - DNA, 502 bp, Homo sapiens
gaaaatagtcacaaaacgtatctgacctccacatcctgtaattagaattattgtggtctggtacactgcacccagtttctgcaggagtactttctgggtgtctctaatgagtaagagagggccccatgggatattcctacagttcccagatgaacagtgggaaagactctacgttgacaaaccccggggacctgaaaactcaggtcctcaaggagggtagaggatacctggaccctgacccagacccctagatgggctgtgccaagagacccagcaagggaagggattccctcctgcctcaggttctctgttcttctgtggttagaagacctgaacccaactccctctccaagcagtggagatagggcttttccaagggctggggatcttgctgtcctaaggacagctgagcaagggggtcgaggaggagcttgggtggtggaggagaggaaaccgggtaagatgtgtgaagcagtcggctataccaggcacagagaggacc

SEQ ID NO: 5876 - DNA, 6493 bp, Homo sapiens
atcgggggaccgggagcagtggctcacgcctgtaatcccagcactttgggaggccgaggtgggtggatcactcacttgaagtcaggagttcgagaccagccgggccaacatggtgaaagcccgtctctactaaaaatacaaaaattagctgggtgtggtggcgacgcttgtagtcccagctactcaggaggctgaggcaggagaatcgcttgaacctgagaggcagaggtggcagtgagccgagatcgcgccactgccctccagcctgggcgacaaagcgaaattctgtctctcaaaaaaatgcataaataaataaaagaggggtggggaagcaaaacgacgggcagtaggtgtggggcgcattgggattctatagtggttagtaccctgccttgtgcctgcagcaacctctgttctaatctgaatcctggtacagtcagactctatcttggacccactggggcgaacccacgtgtcttttggtttgcctttaattcctgcaccagctgcggcctttatctgcagccagaaagcaggttttaccgctggtcccacagcgccatacggtctggggaaaagaaggaaacccaatagtacacaaacaaaggccaaaagagaaaccttccaagtgctctatgccttacggtttagcagaaaatatcaaacaactctcaacctagctggtctgtagcttccacaaatgaaatactgtattcattgcagcctttctggttgagatatttcaaatatttggtggagcttttaatgagacggagagacactctcgagtgtggaagaaaaaaatgagggggtgtgaggataaggcgactttaggacagaaaaaacaaagagacaaggaagccacgtaaacgttttcgggtaggcgtgaggcgatgtcagttttgaaccccgtttatgttaggtagagagcgcagccctcttctagcacaaacaccgtttcccacattgaagaaatcacagagatcagcaactctagagtgcgatgaagaagcttcactctgggagaacccccttcgtgaccacggtctctttcctgccaggtaagtgggaatgagcgcatgccctacagggacagcacagcgtcctcgccctggccggacgctcagggtcaccaccctacccactgcccccctcgccattcttccaaaccactctctgccaaagattccaccgacagtcaccccacacgacaacccaggccgcctttcagcagcggctcccgccccgcaaccacgcgccctctcacccccgcggttctgcccgccgcctctatccagtctgtgcacttcacctccctggctcccgctctcccctgagcttacagtggacgcggggttcttccgaacccctcttgggaatactgaatggaaaagggggagcgtgcgcaagtgcttggtagagtgtagacattgtgggatttgactgtggtaccatcgctttgacgtcctagtgctgatttttacacctgcattctgcttagggcaccggcaacagttttccgtttgtgcctactccacctgctgtctttgttgggtcagcgaacatcgcctccctctaccgctcaatcagcaaaagggaccgcccttgaggacctcacccgccgctcactcccctcccaacttcgcgggcatcgcctccggtcgcctcttccgaaggcctaacgagcatgttagctgcgaacggaggtgaggaggctccgctgactgaccggtgcccatgtccagggcacgcacaaacgccatgacttggcttggcctctctcttagttattcacagctcagcccgataggcacctccggggcggcgacggcaaagagggtgcccttattaagtgcagctccacggggactggcctctctgcacggctgtgtacacctgagcgagacgctcagtcgctctctaaagccgcttctgcggatgacagacacggagataaacgtgagaggtggcccaccacgacttgccctcctttgcccgggtttgcccctagctgcggaggctgttctacatctgacccttggagcaggccggctgacagcgtagtaaaggaagatttctgcgggagggcggccagtgcaaaacaattccctgaccgggaatcgaacccgggccgtgacgctttcagcaccgaatcctagccactagacaaccatgcagatgcggaaagctgctttctctcccttcttcgacctgaagcgacactttcctgtgctctaggaggacttgggtcttgtgagagtcgctctttgctcctggagtcgtctcacaaggccgttcactccctgctttcttcaaaaaaagaacctgcaggcgacacaccaagggctccacgagggagtcctgagtactggagcgagttgcggccacgcggccgcagctcaccactggcctagagatgccctttgcgaggcggcagcaactgacaagatggtcgcgggtcgccgcgtccggagccgcccaccaggttgccaggaggaggcgggagcggggaggcgcccgaggtgagacgggggcaccctctgcatcataaaggacccagaccccggcaccctcaacatcataaggaatcagacggatgcggaaaccgagacgggctggataggaaactctttccaggaaggctccggggcactcaactggtctccaaccttcccctgcaacctgtgacgcctgccattttcccattttaggcgatggcaacgcaacccccccgtttgctctgggcaaaacttcgagagttccctctgaagctggagctttttcctcagatccaagatccaattggtcaccaattcgtgatttccgtcggccaagtgcgtgggcattgatctacacgtgagtttctccacctctgccgaatggctacttcggggtgggggaagggccctcccgccgtggattgcaaggtgtttagcagcatctgtctcctccgctgactagacacatgccagggggataacattctccctcccgcttcccccagccgcggcctagtgtcccagcggggttgggagaggcatgtgagggcgaagttgccccctgttgagaaccattgctgcgcgtagtccttctctctgaacttgtgcagaggactctccaggtgaaggctcaagggtggatccagctcgagacaccctcgctccccctcacagtcggaccttaggatttaggctttaacatctccacatcatgagattcgaaacctttaggtcttttcttccgttctgtcctccaaatcggcctcttccgagcctgttgaccagggccagccgggcagagggctgggctcgctcaacgaggctcctctcgcacctcctggagcttcaggcttctttccgttgcagagaagctttatgggccaattcgttcggcatccccgggggcagatgcgcggtgcgcggggaagaagaggatttgactgcggttctccacccccggcgcctaacctccaccccggtgcgcgcgctcttccaggctcctgctggtcccacttgccaggagttaggtctcaggtcagcctgagctcctgagacgcccaggcccggaaagacacgtaggggaaaccatctgctcacttctgtcctgtccggaagggatccctttctgacgggaaagaaaggcggtgagtcctgtcctgttgagtaggcggaagagagatcaaagggaagacaagaaaaatcctgtgagttttcaggatctaaagttaccatgaggtcgacctaacctcctctggaggtcctcccggtcctcccgtggctgtcgaaggtgaatctagcttccgtctccagttcgccaaggcggacaaagccgacgacaatgggcctgtccactatcttctttcatatgcacaaaatgtcagctcttcttgtttctaacttgcaacatcccacctgatgaccagctcagcaaattagagaccctccatgggattccatctctgtcttagttcgggcttccataactatgtaaactgggtggctaattcacaacagaaatttatttctcacagttctggaggttggaagtccgagatcaaggtgccaacatggtagggttatgatgagggacttttttctggttgtagactgccaccttctcattgtatcctcagggggcagagagagctccctggggtcccttttatagtggcattagtcccactcagactaatgggactaaatccagactcagttattgcaatgtgtgcaaaagaacaaggacttgtactatctgacttcaaggcttactataagctattatagacaaggcatcaggagggacaaatagataaacagactgagttaagagacctgaaactgatccacagccatacagtcaataaatgagctttcaatgaaagcagttcaatagaagaaaataaatcatttcaattaatggactttcatatggaggtgggggagaccaacaatgttattctccctcacactacatacaaaagtaatttgaggtgcattatacaccaaaacttaaaagttaaagatataaagcatttcaaggatactctgtaggtaaagattagcctaccaacaagtaggacactgaaaaaatatatataaaagacatgataaattagacttcatcaacattagccataccttctcatcaaaagataccactaagaaagtgaaaaggcaagcaagccacagacagagagaaaatagtcacaaaacgtatctgacctccacatcctgtaattagaattattgtggtctggtacactgcacccagtttctgcaggagtactttctgggtgtctctaatgagtaagagagggccccatgggatattcctacagttcccagatgaacagtgggaaagactctacgttgacaaaccccggggacctgaaaactcaggtcctcaaggagggtagaggatacctggaccctgacccagacccctagatgggctgtgccaagagacccagcaagggaagggattccctcctgcctcaggttctccgttcttctgtggttagaagacctgaacccaactccctccccaagcactggagatggggcttttccaagggctagggatcttgctgtcctaaggacagctgagcaagggggtcgaggaggagcttgggtggtggaggagaggaaaccgggtaagatgtgtgaagcagtcggctataccaggcacagagaggacccactgggacacaagagcctgcatgtgaagccaggccttgggccaccttgttcctcaaaggggtgcttacttccatggggtcttcaaagggactgtggaaagagaagcccttcagcccacacctctgaatgcttttgcaccacagcatgccctgtggcctgtatcctgctggtgtggaacagtcagacccctgcagggctgcagagcctctgtactgggcggcatcccagcctgagtgccagagctcagtgggcaggcccccgagcaagtagagaggagggcaccttttggacagaacctgtgggacaagagcgacgtctcatccgttcaggttcctcacaaaatgagagtcaggaagatcagggtgcagacctgatttcccacgaagggctgaaagcagacaaccagagggagagcagcacctgggccaatgaggtagaagacagaagaccacagtgtacttctgccctcaacctcaccccctcccacctacatcctccacaccccctgaccaccttcttcagaaacgtaataggaatcaagatcccccctggcctggttgctatgggaggcacagtggcctgatggagcctgaggcaggtgtgggaagatgtggattgtctaactggaggttgggagtccagggtgcagaaggagaagcttggagtgcaggatttggtggtatgtgtgtggcagtaggcactatgttctaattgccagttttttttttcttcttcctttttttctctagctaaacaagcactggccttgagataagcaatgctgaagcacttgcagctcacctattaccaaaaactgactgagccctccctacacaagccataactactgctttgattggacaagagactgatttcagtagttttctcttggtaagagaccactggccgtgggctggttctggacagtttacagaagctatgcacttgattgcctttgtgtccctgcttcaccttttgaagcatagggcctaattataatgtatttaaatgttgtctccaccccaaagtgaacatgggttgcatgtaacaggcgtgtttactcagcatgcatgcagcaggatcccttcacaaatattcagagctccccctattccctgttgaatatgtatatgtggccaaccagatcaacgtaaatcactattcgccctcccctccctggaaacttacttttcgggtttcagcaggaagctatgcctcccagtctgtcagaatggccacttgcaggctgtaaccctttataaaaaaataaaatctcctttctaaatttataaatt

SEQ ID NO: 5877 - DNA, 1194 bp, Homo sapiens
aaaatacccacaaaacgtatctgacctccacatcctgcaattataattatagtggtctggtacactgcacccagtttctgctggatggagtattttctgggtgtctctaatgagtaagagagggccccatgggatattccttcagttcccagatgaacagtgggaaagactccacattgaccaacctcgggggcctgaaaacccaggtcctcaaggagggtagagtatacctggaccctgacccagacccctggatgggctgtgccaagagacccagcaagggaagggatttcctcctgcctcaggttctctgttcttctgtggttagaccacctgaacccaactccctccccaagcactagagatgggcttttccaagggctggggatcttgctgtcctgaggacagctgagcaagggggtcgaggaggagcttgggttgtggaggagaggaaaccgggtaagatgcgtgaagcagttggctataccaggcacagagaggacccgctgggacccaagagcctgcatgtgaagccaggccttgggccaccttgtctgtcaagggggtgcctacttccatggtgtcttcaaagggactgtggaaagagaggccttcagcccacacctctgaatgcttttccaccacagcatgccctgtggcctttatcctgctggtgtggaacagtcagacccctgcagggctgcagagcctctgtactgggcggcatcccagcctgagtgccagagctcagagggcaggcccccgagcaagcagagaggagggcaccttttggacagaacgtgtgggacaagagcgatggctcatccgttcaggttcctcacaaaatgagagtcaggaagatcagggcgccggcctgatttcccaggcagggctgaaagcagacaaccggagggagagcagcacctgggccaatgaggtagaagacagaagaccacagtgtactcctgccctcaacctcaccccctcccacccacatcctccacactccctgaccaccttcctcagaagtgtaataggaatccagattccccctggcctggttgctgcaggaggcacagtagcctgatggagcctgaggcaggtgtgggaagatgtggattgtctaactggaggttgggagtccagggtgtagaagcagcttggagtgcaggatttggtggtacgtgtgtggca

SEQ ID NO: 5878 - DNA, 1194 bp, Homo sapiens; identical to SEQ ID NO: 5877

SEQ ID NO: 5879 - DNA, 1194 bp, Homo sapiens; identical to SEQ ID NO: 5877

SEQ ID NO: 5880 - DNA, 756 bp, Homo sapiens
cagagaggacccactgggacacaagagcctgcatgtgaagccaggccttgggccaccttgttcctcaaaggggtgcttacttccatggggtcttcaaagggactgtggaaagagaagccttcagcccacacctctgaatgcttttccaccacagcatgccctgtggcctgtatcctgctggtgtggaacagtcagacccctgcagggctgcagagcctctgtactgggcggcatcccagcctgagtgccagagctcagtgggcaggcccccgagcaagtagagaggagggcaccttttggacagaacctgtgggacaagagcgacgtctcatccgttcaggttcctcacaaaatgagagtcaggaagatcagggtgcagacctgatttcccacgaagggctgaaagcagacaaccagagggagagcagcacctgggccaatgaggtagaagacagaagaccacagtgtacttctgccctcaacctcaccccctcccacctacatcctccacaccccctgaccaccttcttcagaaacgtaataggaatcaagatcccccctggcctggttgctatgggaggcacagtggcctgatggagcctgaggcaggtgtgggaagatgtggattgtctaactggaggttgggagtccagggtgcagaaggagaagcttggagtgcaggatttggtggtatgtgtgtggcagtaggcactatgttctaattgccagttttttttttcttcttcctttttttct

SEQ ID NO: 5881 - DNA, 302 bp, Homo sapiens
gggaagacaagaaaaatcctgtgagttttcaggatctaaagttaccatgaggtcgacctaacctcctctggaggtcctcccggtcctcccgtggctgtcgaaggtgaatctagcttccgtctccagttcgccaaggcggacaaagccgacgacaatgggcctgtccactatcttctttcatatgcacaaaatgtcagctcttcttgtttctaacttgcaacatcccacctgatgaccagctcagcaaattagagaccctccatgggattccatctctgtcttagttcgggcttccataacta

SEQ ID NO: 5882 - DNA, 384 bp, Homo sapiens
tgagaggcggcatcttcacctatgggaattttttctgctccattgtgagacaaagagcatgtccgagttttcattttggccaggccgccccctagtttacgcactgtgggctaaactccagaagctggcgcccttccgggccagcggtttactccgctctctggaggctgctaggattaaaggcaaagcaaacgacaggtcttttagctacaatcgcaggagagaaaacactactgtgactcagattagaacccaggttgcggcaaccacagctgcaagtattgaccactacacgaccaaaaagcctgctgacaaccattgtacttcttatatttttttatgtaaaaacactcatactattttctctgctttattctcgaacgt

SEQ ID NO: 5883 - DNA, 850 bp, Homo sapiens
acacaagggaacaatctctcactttttaaatacagtgataggcctgaggagaaacaactgcaatttttttttttttttttttttttaatgagatgggattctcactggtcttgaactgagctcaggcgaggcttcccctacgtcggcctctcaaagtgttgggattaataggcgtgagccaccgcgcctgaccacaactaaccaacatttaaaagcacgtccctgggtaggctcgaaccaccaactttccggttaacagccgaacgcgctaaccaattgctccacggagataacctcagttggtcgctttcatctcaacatagattaagcaatcactaaactctaggggttgccattcgctttctgcaggacaactgtgcagactacaaagcttcggaaaaccggagaggctgagtcgactaatcgtgttgttgcacgttagaaacgcttgcattgcctgactctgaaaccagaagggcggccgaatggccttcaccctccattaaccctcgcctccttcagaagccagtgcctctggaaatgcctggatctgcgaccccagcctgagcctagtagggcccaagggaagctgaacgccccgacggctctcatggtaggtagctctttctgtttttttgcgccgccttcaggcaatcatctactccgcttgctatcccctcactcaactcggcttcagtagatggggttggtggggcgggagcgggaaagaggcaggggagtcaaaagggaaaacctgaaaagaaggagggagaagaagcaggggagaccaggacgagacaatgggacagcccaggatgccggtgcagagggcagcggctggatgcagaga

SEQ ID NO: 5884 - DNA, 321 bp, Homo sapiens
gggaagacaagaaaaatcctgtgagttttcaggatctaaagttaccatgaggtcgacctaacctcctctggaggtcctcccggtcctcccgtggctgtcgaaggtgaatctagcttccgtctccagttcgccaaggcggacaaagccgacgacaatgggcctgtccactatcttctttcatatgcacaaaatgtcagctcttcttgtttctaacttgcaacatcccacctgatgaccagctcagcaaattagagaccctccatgggattccatctctgtcttagttcgggcttccataactatataccataaactgggtgg

SEQ ID NO: 5885 - DNA, 415 bp, Homo sapiens
ctgctggtgtggaacagtcagacccctgcagggctgcagagcctctgtactgggcggcatcccagcctgagtgccagagctcagtgggcaggcccccgagcaagcagagaggagggcaccttttggacagaacctgtgggacaagagcgacgtctcatcctttcaggttcctcacaaaatgacagtcaggaagatcagggtgcagacctgatttcccacgaagggctgaaagcagacaaccggagggagagcagcacctgggccaatgaggtaaagacagaagacccacagtgtacttctgccctgaaccctgaccccttccacctacattctgcacaccccctgaccaccttttcagaaaccgtataagaacaagattccccctggcctggttctatgggaagcacaatggcct

SEQ ID NO: 5886 - DNA, 332 bp, Homo sapiens
taaaagcacgtccctgggtaggctcgaaccaccaactttccggttaacggccgaacgcgctaaccaattgctccacggagataacctcagttggtcgctttcatctcaacatagattaagcaatcactaaactctaggggttgccattcgctttctgcaggacaactgtgcagactacaaagcttcggaaaaccggagaggctgagtcgactaatcgtgttgttccacgttagaaacgcttgcattgcctgactctgaaaccagaagggcggccgaatggccttcaccctccgttaaccctcgcctgcttcagaagccagtgcctctggaaa

SEQ ID NO: 5887 - DNA, 1009 bp, Homo sapiens
ctctactaaaaatacaaaaaagtagccgggcgtggtggcgggtgcctgtagtcccagctactggggaggcagaggcaggagaatggcgtgaacccgggaggcggagcttgcagtgatctgagatcgcgccactgcactccagccactgcactccagcctgggtgacagagcaagactctgactcaaaaaaaaaaaaagaaaagaaaagaaaagaaaagaaaagaaagagacaactgagccacttgaaataccaagagaattcaaatttagaaaattcccagggaactatgcgtgcaggcactcaccagatccacaaaacagctgctgcataactgcatgttgcaagcaagccctaaattgctgattttgaaacagcctgatgggttcacaaagacaatttctgaatagtcgtaagagcagaggtgcactaaagccactgtgccccgcaggcccggatcccagtaagttctttaaggagtaagtcttacttccatttatggaagatttttggagttgtccttggtcacccccaggaatgttttggttaggagtagaattttagatgtcatcaatttaaaaattaaaactaaaacgctggaactcatagagagataaaattaagagaatacattcactatcctgagtagaaagatttcttatagaacataacaggctttaaaaataaagaaaaaaggccgggcgcggtggctcacgcctgtaatcccagcactttgggaggccgaggcgggtggatcctgaggtcaggagatcgagaccatcctggctaacaaggtgaaaccccgtctctactaaaaatacaaaaaattagccgggcgcggtggcgggcgcctgtagtcccagctactcgggaggctgaggcaggagaatggcgtgaacccgggaggcggagcttgcagtgagccgagattgcgccactgcagtccgcagtccggcctgggcgacagagcgagactccgtctcaaaaaaaaaaaaaaaagaaaaaatatgg

SEQ ID NO: 5888 - DNA, 1496 bp, Homo sapiens
tgagaggcggcatcttcacctatgggaattttttctgctccattgtgagacaaagagcatgtccgagttttcattttggccaggccgccccctagtttacgcactgtggactaaactccagaagctggcgcccttccgggccagcggtttactccgctctctggaggctgctaggattaaaggcaaagcaaacgacaggtcttttagctacaatcgcaggagagaaaacactactgtgactcagattagaacccaggttgcggcaaccacagctacaagtattgaccactacacgaccaaaaagcctgctgacaaccattgtacttcttatatttttttatgtaaaaacactcatactattttctctgctttattctcgaacgtctgcagattttcgtgcttttctctctttcatgcgcttctccgttactctctccccattccgctacataatttaaaaaacatctcatctctcaggacctggccactgcctctacaacaagcctcctgggaagtctcgttgtcccatcgacacctctcccttctttcgctccatttttttttttttttttttttttgacggagttgctctgtcgcccaggctggagtgcagtagcgcgatcttggctcactgcaacctccgcctcccgggttcaagcgattctcctgcctcagcctctcaagtagctggaatagcaggtgcacgccaccacattcggctgatttttgtatttttagtagagacgggatttcaccatgttagccaggctggtcttgaactcttgacctcaagcgatccatccgcctcggcctcacaaagtgctgggattacaggcgtgagccaccgtgcctggccaaatttcaggccaacacctgttgacacacattgccagacacacggaatccctcactgaacaccgatgggcccacaaaacacgcggaggccacggtggctgaagatgttagcaaattcggttcgcggtgtctggggtacagcctcgagggtccattggctacctctgtgcaaggaccactctgcgcaaggaccagtcaccgctgctctcctcatctccattgagattctcccgcacacacctcccctttctttgggccgctgaggcctcttggacctccgaggtgattgccccgcccgcagcttctctccctccgggagcttcatttcttgttcctctccgtagtggctcagcggtaagcccaaggtccagcacacgaatcaggaaactgatggttcttgggttagcaggaatccgcccagagaacagatgaaagtaacaggtaccaatatcaaaactgcagtgactcaccagaaacactacgtgcttgccactttgcttagcggtttgttgagtccaacaactgcgtgggtcccgggttagtctcctgaatatcttttgctgctactttggtcagcgttgttgtcagtttaccttgtggtggccaagcccttaaatgcactattaggttatgcagtgtaa

SEQ ID NO: 5889 - DNA, 266 bp, Homo sapiens
aaagggatgaagtgacagcatatcctgatgtgtgtgatggtttcatgagttattatctatttcaaaatttattgcaatgtgtggaaaagaacaaggacttgtactatctgactttaaggtttactataagctatcagacacaaggcatcaagagtgacaaacggataaacagcctgagttagaaaacctgaaattgatccacagctatacggtcaataaatgggttttcagtaaaagcagttcaataaaagaaaataaatcatttc

SEQ ID NO: 5890 - DNA, 130 bp, Homo sapiens
caaaaaagtagccgggcgtggtggcgggtgcctgtagtcccagctactggggaggcagaggcaggagaatggcgtgaacccgggaggcggagcttgcagtgatctgagatcgcgccactgcactccagcc

SEQ ID NO: 5891 - DNA, 266 bp, Homo sapiens
aaagggatgaagtgacagcatatcctgatgtgtgtgatggtttcatgagttattatctatttcaaaatttattgcaatgtgtggaaaagaacaaggacttgtactatctgactttaaggtttactataagctattagacacaaggcatcaagagtgacaaacggataaacagcctgagttagaaaacctgaaattgatccacagctatacggtcaataaatgggttttcagtaaaagcagttcaataaaagaaaataaatcatttc

SEQ ID NO: 5892 - DNA, 340 bp, Homo sapiens
aataaagaaaaaaggccgggcgcggtggctcacgcctgtaatcccagcactttgggaggccgaggcgggtggatcctgaggtcaggagatcgagaccatcctggctaacaaggtgaaaccccgtctctactaaaaatacaaaaaattagccgggcgcggtggcgggcgcctgtagtcccagctactcgggaggctgaggcaggagaatggcgtgaacccgggaggcggagcttgcagtgagccgagattgcgccactgcagtccgcagtccggcctgggcgacagagcgagactccgtctcaaaaaaaaaaaaaaaagaaaaaatatggcaaaatttcat

SEQ ID NO: 5893 - DNA, 798 bp, Homo sapiens
ttatcggcagcgcagccgaactgctttgagtaaaggaaaagattatcttgtgttagctcaaccacccttactacttcctgcggaatcagtagatgtttcagtattgcaacctctgagtggagaattggaaaatacgaatatagaaagggaagctgaaactgttgttctgggtgatttaagtagtagtatgcaccaggatgacttggtgaatcacactgtagatgcagttgaacttgaaccaagccattctcaaactctttctcagtctcttcttttagatattaccccagaaatcaatcccttgcctaaaatagaagtatctgagtctgttgaatatgaggcaggacatataccgtcaccagtgattccccaagagagttctgttgagatcgataatgaaacagaacaaaagtctgagagctttagttctatagagaaaccatctattacctatgaaacaaataaagttaatgagttaatggataatattataaaagaagatgtgaactccatgcaaattttcacaaagctgtctgaaacaatagtgccaccaataaatacagccactgtacccgacaatgaagatggggaagccaaaatgaatatagctgacacagcaaagcaaactttgatttctgttgtggattcttcttcattacctgaagtaaaagaagaagaacagtctccagaagatgcccttttgagagggttacagaggacagctacagatttttatgctgaattgcaaaattctacagatctaggatatgctaatggaaatcttgtacatggatcaaa

SEQ ID NO: 5894 - DNA, 4842 bp, Homo sapiens
tttgtttaattttttttttaattatacttttaagttctagggtacatgtgtacaacgtgcaagtttgttacatatgtatacaagtgccatgttggtgtgctgctgctgtacccattaactcgtcatttatattaggtatatctcctaatgctatccctcccccctccccccaccccacaacaggccctggtgtgtgatgttccccaccctgtgtccaagtattctcattgttcaattcccacctatgagtgagaatgtgcagtgtttggttttctgtccttgtgatagtttgctcagaatgatggtttccagcttcatccatgtccctgcaaaggacatgaactcatccttttttatggctgcatagtattccatggtgtatatgtgccacattttcttaatccagtctatcattgttggacatttgggttggttccaagtctttgctattgtgaatagtgccacagtaaacatacgtgtgcatgtgtctttatagcagcatgatttataatcctttgggtatatacccagtaatgggattgctgggtcaaatggtatttctagttctagatctctgaggaatcgccacactgtcttccaccatggttgaactagtttacagtccaaccagcaatgtaacagtgttcctatttctccacatcctctccagcacctgttgtttcctgactttttaatgattgccattttaactggtgtgagatggtatctcattgtggttttgaattgcatttctctgatgaccagtgatgatgagcattttctcatgtgtctgttggctgcataaatgtcttcttttgagaagtgtctgttcatatcctttccctactttttgatggggttgtttgattttttcttgtaaatttcagttcttcgtagattctggatattagccctttgtcagatgggtagattgcaaaaattttctcccattctgtaggttgcctgttcactctgatggtagtttcttttgctgtgcagaagctctttagtttaattagatctcatttgtcaatttcagcttttgttgccattgcttttggtgttttagtcatgatgtccttgcctatgcctatgtgctgaatggtattgcctaggttttcttctagggtttttatggttttaggtctaacatttaagtctttaatccatcttgaattaatttttgtataaggtgtaaggaagggatccagtttcagctttctacatatggctagccagttttcctagcaccatttattaaatagggaatcctttccccatttcttgttttggtcaggtttgtcaaagatcagatggttgtagatgtgtggtattatttctgagggttctgttctgttccattggtctatatctctgttttggtaccattaccatgctgtttttgttactgtagccttgtagtatagtttgaagtcaggtagcatgatgcctccagctttgttctttttgcttaggattgtcttggcaatgtgggctcttttttggttccttatgaactttaaagtagttttttccaattctgtaaagaaagtcattggtggcttgatggggatagcattgaatctataaattatcttgggcagtatggccattttcacgatattggttcttcctacccatgaacatgggatgttcttccatttgtttgtgtcttcctttatttccttcagcagtggtttgtagttcttgaagagttccttcacatcccttttaagttggattcctaggtattttattctctttgaagcaattgtgaatgagagttcactcatgatttggctctctgtttgtctgttattggtgtataggaatgcttgtgatttttgcacattgattttatatcctgagactttgctgaagttgcttatcagcttagggagattttgggctgagatgatggggttttctaaatatacagtcatgttatctgcaaacagggacaatttgacttcctcttttcctaattgaataccctttatttctttctcctgcctgattgccctgggcagaacttccagcactatgttgaataggagtggtgagagagggcatccttgtcttgtgccagttttcaaagggaatgcttccagtttttgtccattcagtatgatattggctgtgggtttgtcataaatagctcttattattttgagctacatcccatcaatacctagttaattgagagtttttagcatgaagggttgttgaattttgtcaaaggccttttctgcatctgttgagttaatcatgtgatttttgtctttggttctgtttatatgatggattacatttattgatttccatgtgttgaaccagccgtgcatcccagggatgaagccaacttgatcgtggtgggtaagctttttgatgtgctgctggattcggtttgccagtattttattgaggatttttgcatcaatgttcatcagggatattggtctaaaattctcttgttttgttgtgtctctgccaggctttggtatcagaatgatgctggcctcataaaatgagttagggaggattccctctttttctgttgattgggacagtttcagaaggaatggtaccagctcctctttgtacctctggtaaaattcatctgtgaatctgtctggtcctggactttttttggttggtaggctattaattattgcctcaatttcagagcctgttattggtctattcagagattcaacttcttcctggtttagtcttgggagggtgtatgtgtccaggaatttatccatttcttctggattttctagtttatttgcgtagaggtgtttatagtattctctgatggtagtttgtatttctgtgggattggtggtgatatcccctttatcaatttttttgcatctatttttttcttctctcttttcttctttattagtcttgctagtggtctatcaattttgttgatcttttcaaaaaaccagctcctgaatttattgattttttttttttgaagggttttttgtgtctctgtctccttcagttctgctctgattttagttatttcttgccttctgctagcttttgaatggtttgctcttgcttctctagttcttttaattgtgatgttagggtatcaattttagatctttcttactttttcttgtgggcatttagtgctataaatttccctgtacacactgctttaaatgtgtcccagagattctggtatgttgtgtctttgttctcattggtttcaaagaacatctttatttctgccttcatttcgttatgtacccagtagtcattcaggagcagattgttcagtttccatgtagttgagcagttttgagtgagtttcttaatcctgagttctaattcgattgcactgtggtctgagagccagtttgttataatttctgttcttttacatttgctgaggagtgctttacctccagctatgtggtcaattttggaataattttgtggtgccgaaaagaatgtatattttgttgatttagggtggagagttcagtagatgtctattaagttggctcagtgcagagctgagttcaagtcctggatatctttgttaactttctgtcttattgatctgtcgaatgttgacagtggggtgttaaagtctcccattattgtgtgggagtctgagtctcattgtacattgtaggtctctaaggacttgcttcatgaatctgggtgctcctgtattgggtgcatatatgtatttaggatggttagctcttcttgttgaattgatccctttaccattatgtaatggccttctttgtctcttttgatctttgttggtttaaagtctgttttatcagagactacgattgtaacccctgcttttttttgttttccatttgtttggtagatcttcctccatccctttattttgagcctgtgtgtgtctctgcacatgagatgggtctcctaaatacagcacactgatgggtcttgactatccaatttgccagtctgtgtcttttaattggagcttttagcccatttacatttaaggttaatattgttatatgtgaatgtgatcctgtcattatgatgttagctggttattttgctcgttagttcatgcagtttcttcctagccttgatggtctttacaatttggcatgtttttgcagtggctggtaccaatcgttcctttccacttttcgtgcttccttcaggagctcttgtaaggcaggcctggtggtgacaaaatctcacgtttgcttgtctgtaaagcagtttgtttctccttcacttatgaagcttagtttggctggatatgaagttctgggttgaaaattcctttctttaagaatgttgaatattggcccccactctcttctgacttgtagagtttctgccaagagatccactgttagtctgatgggcttccctttgtgggtaacccgacctttctctctggctgcccttaatattttttccttcatttcaactttggtgaatctgacaattatgtgtcttggagttgctcttctcgaggagtatctttgtggcgttctgtgtatttcctgaatttgaatgttggcctgccttgctaggttggggaagttctcgtggataataccctgcagcatgttttccaacttggttccattttccccgtcactttcaggtacaccattcaaatgtagatttggtcttttcacatagtcccatatttcttggagtccttgttcatttgtttttactctttttttctctaaacttctcttctcgcttcatttcgttcatttgatcttcaatcactgataccctttcctccacttgatcgaattgtctactgaagcttgtgcatgagtcacgtagttctcg

SEQ ID NO: 5895 - DNA, 15129 bp, Homo sapiens
cagctgattttgaggcaaaaattcttgaagccaaacagaaggtatgtactccgtggtgcatctgaactccagttttaaaataccttctttctgtcctagacaaaaacagtccttgataatatgagacaattttcttgtgcttctaaaattctattcttcaaatttgcttatttccaactagtaaaataatttggttttaaagctgtgtctacacaatatcagggtttttttaaaaaatgaaaaatttggtcattaaactatttgtcctatcttcattgtgccaagtgattggtttgatgttcttcaataaatcaaatccctgagcatcatgaagatatagcctaattgaactttttatttactacttgttgggtattatctcattttaacagatgccattttagcttaggattctgtttagcaaagtgcttccatgccctggcagatggcccatggtacttggcacatccagcctcaacaaactctattaaacaaaaaaactcacagaacagatgtatccacaagtcagtgccaggtagctgtcaggccacttaccaacacatggttgtttcagttacattcttatacctccttctctaattgtagttatttgctggggtcttggcacaggaagtggatctaagtgttgtaaagactgagcaaggagcagaggtggagctgagcttcacaaaagcctaagaggcagggcatgggggctcgcacctgtaatcccagcactttgggaggctgaggcaggaggatcccttgagcccaggaattcaagaccagcctgggcaacatagggtaacccacatctctgtaaaaaattttaaaaaatagccaggtgtggtggtgcacgcctatagtcccagccactcaggtgaggtaggaggattacttgagttggagaggtagaggctgaagtgagccatgatcgtgccaatgcactccagcctaggtgacagagcaagaacctgtctcagaaaaaaagaaaagcttaagattcacagatttccccaaacttgtcttagatctattactctactccttcgtttattttttgtttatgtcaacatttaaccacgtccactgttagtgagtgtatcagctttcacagtgtatagaccttttttaaataattgaaccccacaatgtttcagtataattattatatcaatacacttaaaacaacacagcctcttaaaagaatgatgcacaggtgatattcagaactatctgaccatcattccaaacacttattattactctttcctgctttattttttgccatagaaattattgctattaaacatactgtatattttgcttatttaatttagcttattatctgtcacctgccactaaaatgtaaactccgcaatgacagaattctttatctgttgtgctcactgctgagtccctagcatctatggcagggcctggcacataaaaggcaatcaaaaaatgtttgttgaataaatgaatgaatgagtgaatgagccaacaaaacactactagacatagtatctggtaatacataagttttgccatttactgttagaaataaatgttacacaattcttcttcctgtgaaaatcagcaaatgagaaaggttaaaaatactcatcagcctatatctgtcttaccttgtagggatatgttcccttttatgtcaatgcaactgctggcacgactgtttatggagcttttgatccgatacaagagattgcagatatatgtgagaaatataacctttggttgcatgtcgatgtaagtgctatataactcaggccagtccatgtggggggtggaggcacctcttttttatgacttgcctcaagcttctccccacgccccagccagccctctctccacaccacattagttccagttcttgtctggaccctagccagccattcacaactggtacacaccacagacctggaacatcctctgggactcatccacttccttactagtcgattgctgtcttctgtggttcatcctagaatatggtctcattgccttcccaggtagctttgttgggacaagtggctacagaataaaatataactgatttcagagggaaaaaatagaagacacaacatacagaaagtggccatgaatgtgaaccctcagctacctgccttcagtccagccgtctatgacacgtctcttaaaaaggttatatctggctgggcgcggtggctcacgcttgtaatgccagcactttgggcggccaaggcaggtggatcacctgaggtcaggagtttgagaccagccttgccaacatggtgaaaccccgtctctactaaaaatacaaaaattagctgggtgtggtggcatgtgcctataatcccagctactctggaggctgagacaggagaatcacttgaacctagggatggaggttgcagtgagctgggatcacgccacatcactccagcctgggcaaaagagcaaaactctgtctcaaaaaaaaaaaaaaaagaaaaaagaaaaagaatatctgctacatttaggaaaaataaggcagtatacggaaggcattatcaactaagagacttaatcccaaatcttcccaggaacacaaaagatgcattttcacatgtgtgactgggtgtatttttttttttctttctctctgcccattttcttagggatttaacttctcacaattggccaataggatcatctgccttgctactgaactaatgactaacaaaggctgtgtcacgtggcatcccaactattcagtaaacatgcatcatggtacccacaaaaatgtcttgttgttacataagttgttgtgagacctccaaacccagcaggaactgctgctttttgagtttttcaggagctgttagaattctactctgggaagaaccagacagcaggcctcagttttttgagcagcttccagagccacccggagggggactcactgtgttggctttccacaacacattgggctaatgggccattggacctttgggtcttggcagaacaggcacctcaggctcagacctggcctagctgtatcacttgtgcagctaaagtccagaggaactttgaaaaagaaatgacaagcaatgaagaatcacaactgattgaacaatcagtgtgggctgaacttttctgagaaacttatgtttttcaccttgtactttcttgctcatgttttagtagaagtgaggactgactagttttagattcttaaatgtcactgctcccctcttcctctcctttctctgtccccacaggctgcctggggaggtgggctgctcatgtccaggaagcaccgccataaactcaacggcatagaaaggtaacggccagaactcgccaggcctccttccacccagcacatcaaacagaccatgctctgatgtcagcctgcaccaccctgccctgatccccagcatcatatttcggtctaagtttgcttcagttcagcaggcatttgttgagcatttattggatgactgatttcccagtcaaatgagtcctgaaggagttcacaatttagaaagaaagaaagacaggccaggtgtggtggctcacgcctctaatcccaaaaatttaggaggccgaggtgagaggatcatttgagcccaagagttcgagaccagcctgggcaacacagtgagaccctgtctctaatagctatcaatcaatcaatcaatcaatgagaaagacaataaacaagtagttagaacacaatgtgataagtgtaacaggagacaattgcaggtacccaggtaggagataagagagactaaccagtgaggggaattggaggccatcagagtttgccaagggcacaggaagggccactggttcactttcctcttcttcctcattaagcttacttccagaaagggcaggacactcagctcctaacttattttctttttcactgttcaaattcagtggatgttctaggccaaatatgattttgacctgactcctaagtgttgacccataacaaagtcacaatgattcattgattcgttcagcatgtatttactgagcacctatcatgagccaggtaggagttgatgtgaatattcagttatgtgtcttccatccagccacctatggtgcttttctaataaaaatgcatatctgataaatgcagaaaaaataaggcagtatatgaaaggtgttatcaactaagagatttgtcctcctgaagtttacattccagtgggctagatgttcataacaaatatttaatctgtctcatagtaaagaaaaataaaacagggttaggtagcagtgagtgacaaggcatgctgtttcagacagggtagtcagaggccttcctgaggaggtaacatatcagcagatactgcgataaagggagacaggaagcaaggatatgaggaacagtattctaggcagtgcgagtggcaagtgcaaaggccctgaggcaggactgttcttggcaagtgggaggaggatcaaagaggccattggggctggagcaaggtgagagaggtagaagcagactaaggagggagaggcaaacatggagcaggcagggagagcccgcccagggcttctcccacagccaggactctggcttttgttacctctactgtgcctccccaaacttttgtctcagttttgaaagaccagtgtcaacgtgggtgagaccggctctgtgaagtggacaaccccgtaactcggaggataatgtaaaaaatctgggcagggtgtagtggcctgtaatcccagcactttggtaggccaaggagagcagattacttgagctcaggagttcgggaccagcctggccaacatggtgaaacccccgtctctactaaaaatacaaatattagctggcatggtggtgcacacctgtaattctagctacgcaggaggctgaggctggagaatcactagaacctgggaggcagaggtttcagtgaaccgagatcacgccgctgcactcccgcctgagtgacagagcaagactctgtcttaaaaaaaaaagaaaaaaaaaagaactgtggatgagccagcccaatttaactttagatttctcagacaattttaattttctgtctttgagtctaggaaaacttaaaacatttcacactagactttttcttttctaacattttaaatcacataagtcttctaaaggaaattgaattcatattatgtcttattactttccttttgtagcagcaaagaatcatttacttcagacctttaggatatgcagaaaaccatttaagacattttatgagacctaaatataattttttaatgacttggtaaatgatagcaatgagaaatttgattaaattcactaccatttaaatatgacctgacactgatgctttttagtgagctaagcacttagttaactttccttggaatttttcacaggtctctttcacaaaggttttattatacactgaagggaaaagttcttcagaccttcctctcttctccttgaaacagagtgcactaaattattttgttaggtcctttaactaaaggacctaagcacgatgaagaggttgaaagttcacaacaagggtttagctctagggagagcagaggcaggatgattctgagccaattgctctatctaggggaaaagatccttcacaggtattaaaatgcagcacctagctataggccaggcctttgggaaggagtctgcaaaccaatgaggcaagttacccatgttttcatcatcatacattagacttagttgtttctgtaatgccctagctagtgtgctccttaaccatctaattgtgtctgacagaatgatgcagttgctaggagaccatgcttgttaagctatcattgcagcccaaactggcaaaatcactctaatttagcatttaaataattctgctaggtagtcagagtctagagtagtccagtcgagccttgcttttaggtgccactcttgatactgccccataagtgggtagggcagcatcaccagcctataaatgagaagagaaaggcagaaagaagccactgtgtctcctagagagaagcagtctagtggagtggttacaaaaaagggctgtgcacttagaggccctggacttgaatccaggctccaacacttcccaactctgtgactttgggtaatatatttaaccttttggcatgttagtttccccatctaaaacagaggtaataatagtacctaccttatagggttgtggtaaggattatgtgtgccaggcactcttataagcattttatattaagttattttgtcctttattcaattctgtgaggcacacactccccatttaaaagaaactgaggcacataagagttatataatgtgcccaagctaacaaatattagagctaggactcagacttaaacagtttggctccaaagcctgaattcttaaccataccatattgatataatacctgaaagctctcaagacaataagacatataataagttattcataaatgttagctattgttaatagcagttacttctaagatatagtccgtaatgtaatactccgagactgcctgcaaaacatttgtttgctacttgattagtcaattcaggagaataggcatggataatatttactaacttgagttggaatgggtgttttcctcaagagaacagttgcgtctttccaactcctgcaccttctcgaagtctcatgtgcttctttcagggccaactcagtcacctggaaccctcacaagatgatgggcgtgctgttgcagtgctctgccattctcgtcaaggaaaaggtctgtactccctccaaagctacactggggcccgtacgttctttagaaagcacaaaaagacacacgtggggtctctttgcagtacttgttggctgactcacgagattggcagccccactgagagactactgctgctgtcctttcctgcccttgcagctaacctggtttcttctcttggctcttgctggctactgtgcttcttctttgatcagtactcagggtctgtcagcaactgaacctttaaggaaattatttaattgagtattccttcatgtttgcacaaaaaaagtgggagcaagtaggtgaggcatccaatcagttttgtcctcagtgaggacaaaagcactcactggagcatactcggagttcttagtataaacgtgtggtcccaagaactgaaataaatgagacagaacaacaactacaaatatcaacttagggccacaaggaatattgccccaaaagctgctgtaaatggttgagcctcatattcccttcttcacatgcctaatgttaggatcctgccctccaaggctttgttgctccagtaaaacttctgcacacagaagcattccaaaaagtctgtctccagcctgtaggagccagaatctgcacagcgtctttagtccactcatatgtggaatccatgttaatgtcataggaggtcctggaaaggttggaagacttttgccagagcgcttttggagagaaaaattcttcacagcatgaaactatcccacccactgaggaattttctatctctaaccctggcccactgaatgccgtagcacttcccaatcttgaaacaatcccagacacccatacacatttccccttagagggatggcatctgagacggaaagatcatcttctaatcagagagtcagagacaaaagggatggcagtttttccaagagtgattttagaaaagggcatcagaacaagtgtaaggcctcataaagacatcagaagaaagattgcatatgaccccaagcccctccttccaagcagcctagttttaaagccacccacatctctgatgtgtaaatgcagatgcacccatcttaatttccatgatagggtatactccaaggatgcaaccagatgtgtgcaggatacctcttccagccagacaagcagtatgatgtctcctacgacaccggggacaaggcaattcagtgtggccgccacgtggatatcttcaagttctggctgatgtggaaagcaaaggtatgaagggaatagttcaggaaatagagcagaaatgtaatttgcacagactggctggcaaaagaggggcaaagatatatcacagataattcactatatggggaatcaatatctagataattgaattaactgtgttttctttgtgaatgaaattactttattccttatgtcaaattctctctccttttgttcagtctcctcaatttgaactattatgaagtcttcttataacgttctcttataacaactaaaaattatgccaagataaggatttctgcagcaatccttggggatgctggaattatttagtgcaggcatagagaaagataaaaaaaaataaaattactgcattattctgagtagaaccttgaattctttttttttttttttttttttgagatggagtctcactctgtagcccaggctggagtgcagtggcgcgatctcggctcactgcaagctccgcctcccaggttcacgccattctcctgcctcagcctccagagtagctgggactacaggggcccgccactacgcccggctaattttttaaaaaatatttttggtagagacggggtttcaccgcgttagccaggatggtctcagtctcctgacctcatgatccgcccacctcggcctcccaaagtgttgggattacaggcgtgagccaccgcgcccggccccttgaattcttttatgaggcttctcaacatgggctatgtatgacagttttaacttcaacttcaataatgcctttcccattgtttgtagttaatacaccattctggaaaatgtatactttattgtgaaaaatcctacttttagatggtagcatgctgtgtctgcattcatcaaccttttgggtttcatttctgtacctaaggaaaaaagctaactattggaatttcccccaaaatatgagtgagggagaggattaccatttgattatttgtttcaaaaatatttgtatgcaatcaaggaaaagaaattttgatttcatagttttatattacataccttgtttttgttataaattaattttaataatttctatgtttaagattgagtctaactgtctaactaacactcaaacaacaagattttctggcaaaatttctagtcaaatatttcttctgtaggaaaaatttggtagattattagttttttcctcagtaagtcattttgtcttttttttttttttttttgagacagtttcattcctgttgcccaggctggagttcagaggcgcgatctctgctccctgcaacctccgtctcccagattcaagcagttctcctgcctcagccttccaagtagctgagattacaggcatgcgccaccatgcccatctaattttatatttttactagaggcggggcttcaccatgttggccaggctagacttgaactcctgaccccaagtgatccacccaccttggcctcccaaagtgctgggattacaggcgtgagccaccgcacccagctctattttgacttaatatagaaatagtctgaatttgatttctattacaaagtaatcataggaattttaaacatataaatagccataggctgggcacggtggctcacgcatgtaatcccagcactttaggaggccaaggcaggcggatcatttgagctcaggagttcgagacccatctgggcaacaaagtaagaccccatctctacaaaaaatacaagttagtcaggtgtgatgacgcatgcctgtggtcccagctacttaggaggctgaggtgggaggatcacttgagcccaggaggcggaggttgcagtaagccgagatcatgccactgcactccagcctgggcaacagagtgagactccatctcaaaaaaaaaaaaaaaaaaaaaaagccataaacggcaacaacaaaaaaggagtcgtgtcattttgaaatataatgaccacacaacctgtttcagtaatttgtgtcttcttttttgtttctaacaataacctcttgaaccatctgctgcaggttttgaccatagtgattggttgctgaaatgggaccctggtacaggcttcattcctaagtggactgactagggtgtacagtcagcagtgacactacctggggaggctgatgctttctcagtgctggactttgctcaggcccattagcaatccacagccagccttgtgcatctgctctccttgttaacaccgacccactcaacaaccctcatactgctgttattaatcagccatgctggcttttgaaactcatgctcaaccagtttgtcaatagttggaactattgcaatatcagggcatatactgagaccaatggcttccccatctacctgcctgcctgtcacctaaaaggcataacactgttatgtggaaggttgcctgcctgagagggcatgggacatgtttcacaaggacttactgctggggaagatgagttctacagcagtatctttcgaagtttttctgatgaagaaccagttatttgttgttgttgttgttgtttttcacctatcatggaccaataccctaaagattaattgttagaaaaatgaaatttaaaaacatacaaagaacaagccactgttttttattagagtcaacagacaaaatccctttgtccaattgccattaaagtttcctatgcttaatctcaatttctacactcatttgattgtagaccagttacagttgtggagtggcctcagttcatagatgacactttgagtagcaccatcctaaagcaaaccagaatcaggcataggtccagttgagaataactacccagagactggagtgcctttgaaagaggaagcaggcacacatcatttattgcatgcacatctgtgaaaaagctgacatatttgattagattgttcttcctaaccagctccaaaaatactttttttgtttatttcccatagacagggacagcatagccttcccaaatgctcatcacagggaaatgcaaccacaaacatgacttttctctttaaaacagggcacagtgggatttgaaaaccagatcaacaaatgcctggaactggctgaatacctctatgccaagattaaaaacagagaagaatttgagatggttttcaatggcgaggtaggtaatcatcatggaccaggtacacagtatttccagaaaaactgctgagggaagctcctgaagcttctggcaacatgggaaaatcaatcccatgttgccagaaactgcttcaaaatttttattcttatacactcttaattcctctctttaattccttccatgtctatgaacttttcttctggtagcactgggatgactttttcctttacatcttttaaaactgtgttgctcttggccagcttttggcagacaagaggtctttccttgacaggtctgaatccttcatcattcttgggtttgttttgtgttgaacctttatgaaaaagtgtttttcaggctgggcatggtggctcacacctgtaatcccagcatttcgggaggccaaggcaggaagattgcttgagtccaggagctcaagaccagcctgggcaacatagcaagaccctgtctctataagaaaaaatatatataatttatgaaaagaaattttacaaaacgataaagtggttttcatttccaggaagcttataggatgggtatattcttacctcccaagacttgttctaaaataaggttctacttaacatagactcataaggaagagagcaagataaaattgtctctgccctcagttcatgtgcatactgcacacagcaaagtatttgtcagtgtttactgagtacccactgtgtgccaggcctcctgctaggacctagattctagagtattgaacaaaacagatacattctctgacccaatggagcttacacttgaataaagaaagatagaataggagccagtgttgaataaaagaaaatccacttataagccagtataatataacactgcttacagtcaacattattctatttatcaggcaacctaaactactaggaacacatgtgaatcaccaaatgaacaaaaaagagccctgggcagtttaaaatcagtgacactgctctgatcatttacacactactttaaacactcttaatagcagattaaaaacaacaaatgtgatatctcaaaccaattagaggcaggcacagtaatggcaaacagcaaccagcgagaaaactttatagcaagaatagggaagaactcaaaaagcacaggaatctttagaggagggacactaaacagtttgaggcatctcaacaggccttgccttatgctgtagaaacagtcttttggttttttttaggagcaaccctattaattgatatatccagtcttaatgtttgttatgatagtcctgagtcatcaagaaaagattcaatatcaatataataaactcaataaaatattcatcagcatccataaactatgtttcaattatcttctatatgtgaggcactacaaaatgacaacatggacagacggataccttttttaaaaaattgcccaaatgtaattatttgtaacatttcaatgtttaaagtcggtaactttagttacctagaaaattggttgtagggaacagctctcttgccacatatgattggataaatgaggcattgttctccctggtgtggaagtaacattgcctttgagatgaacattcaacctctttctttggtccaagagacttccaccaaggatgcatattggtttgggaacagctttctctcaagttatcctaattttctttgtttgtcttttaaaatctctgcagcctgagcacacaaacgtctgtttttggtatattccacaaagcctcaggggtgtgccagacagccctcaacgacgggaaaagctacacaaggtatggacttgctttttgtctcatctaatcctctgcaatttctctggctggtcaggacatcctcattccaatgtgcctttctagtgggggaaatataaaaaataaagccttggggtgggtttctagtaatggggtggtggggagccatcctgttatattcctcttgagcctgcatcgcccccttactgtggttaccacgggaacttctaaaggatgcatcttgtctccttgtccttggttgatgttcttcattaaaggagccctatgcagggtaagggaataatgtgcatattcctagggacattctagattaaactgtgtctgttacaataacattttaagttcaggcccactgtaatgctgattcattctaactgttttctatatccagtttatatcttatccagggttcttaagattatatttaatttatataacatttcattcatccaaccattcaacaaatatttgttaaacacagtctgtgtgccaggcagtatcctgggctctgggttatacaaaaccctgaatttgtggtgttgtctataagagttttttggttttgtcttcattttttattttactatcattgttccatgactgactttcaaaattcggttgcacagtactttctgagggaacttgtgaccaggtagtcatttgatattagcccctgaagattcctggatatgaaatatttctttgcttttatgtcaatgtaaacacaaatagtaaaatgcaagttgggttgaattgttaaaaagagagggtgttcatatcaatcttgagttttgttttgtgttttccatcacaaggtggctccaaaaatcaaagccctgatgatggagtcaggtacgaccatggttggctaccagccccaaggggacaaggccaacttcttccggatggtcatctccaacccagccgctacccagtctgacattgacttcctcattgaggagatagaaagactgggccaggatctgtaatcatccttcgcagaacatgagtttatgggaatgccttttccctctggcactccagaacaaacctctatatgttgctgaaacacacaggccatttcattgagggaaaacataatatcttgaagaatattgttaaaaccttacttaaagcttgtttgttctagttagcaggaaatagtgttctttttaaaaagttgcacattaggaacagagtatatatgtacagttatacatacctctctctatatatacatgtatagtgagtgtggcttagtaatagatcacggcatgtttcccgctccaagagaattcactttaccttcagcagttaccgaggagctaaacatgctgccaaccagcttgtccaacaactccaggaaaactgtttttcaaaacgccatgtcctaggggccgagggaaatgctgttggtgagaatcgacctcactgtcagcgtttctccacctgaagtgatgatggatgagaaaaaacaccaccaaatgacaagtcacaccctccccattagtatcctgttaggggaaaatagtagcagagtcattgttacaggtgtactatggctgtatttttagagattaatttgtgtagattgtgtaaattcctgttgtctgaccttggtggtgggagggggagactatgtgtcatgatttcaatgattgtttaattgtaggtcaatgaaatatttgcttatttatattcagagatgtaccatgttaaagaggcgtcttgtattttcttcccatttgtaatgtatcttatttatatatgaagtaagttctgaaaactgtttatggtattttcgtgcatttgtgagccaaagagaaaagattaaaattagtgagatttgtatttatattagagtgcccttaaaataatgatttaagcattttactgtctgtaagagaattctaagattgtacataaagtcatatatatggaaatcctgttacttaaatagcatctgctcttctcttacgctctctgtctggctgtacgtctggtgttctcaatgcttttctagcaactgttggataataactagatctcctgtaattttgtagtagttgatgaccaatctctgtgactcgcttagctgaaacctaaggcaacatttccgaagaccttctgaagatctcagataaagtgaccaggctcacaactgtttttgaagaagggaaattcacactgtgcgttttagagtatgcaagaagaatataaataaataaaaatattctccatggagaatttgaacaaaa

SEQ ID NO: 5896 - DNA, 194 bp, Homo sapiens
gacccatctgtgcaacagggcgaaaccctgtctctgcaagaaatgtaaaaattagccagctgtggtgatgcgcacctgtggtcccaactatttgggaacctgaggtgcaaggatcacctgagcccaggagatcaaggctgcagtgagctgaaatcgtgccactgcactccagcctgggtgacagagtgagaccc

SEQ ID NO: 5897 - DNA, 2975 bp, Homo sapiens
gtttatttatttttattttatttatttattttttgagacggagtcttgctctgccgcccaggctggagtgcagtggcgtgatcttggctcactgcaagctccgcctcccgggttcacgccattctcctgcctcagcctcccgagtagctgggactacaggcgcccgccactacgcccggctaattttttgtatatttagtagaaatggggtttcaccgtgttagccaggatggtctcgatctcctgacctcgtgatccacccgcctcggcctcccaaagtgctgggattacaggcgtgagccaccgcgccgggcatatttattttttaaagaacaaatttgattcgacgcaatttaaaatgataacataataatgtattttgggggaagaactattatttaaagcctgtggatttcaatttctcattatatattacagctatctataattataattccacgctgccagctgggaaacaaacaaaacgacaacttctagggtggaataaaaaggaagatggaaggcagtttaggtcatcagcgcctacttcttaccagaaatcacctggagcctccattaaaccatactcccgaacttaccacacagctctaattaagtctagagtggggcatagttttagtttcaacaggtgctttatgtgactctgatagcaatgggcctgcagacagttctaaggttgagtgacgtgaaccaggaagcaaaaagacccgaattaaagctataacagcagaaataacgtaagagggcagattccagccatatctgcaagatagaatgaagagggcttagtgatttattggatatgaaagatgaggaagaatctaaaggcaaatgagataatagttgtgccattaaaaagagtctattaagaattcagaaataccagagcttttttaagacgggggttgagaggtaagtcctgttacaatgattacttcaacaccgattaaagtgaatttgagggtgcttatgtgacatttagaagaactgcccagaaagcattcacaaatacagtctagaattcaaacacgacgtccaggacatggagacacgggttaggaaatcactggtatcttagtggtaggtaaatcctagagaacgaattctttgaaaaaagccaaaaattactcatttgaattttgcaaactacagtttcgccgggcttcttagcgacaactgcagctaagtgtcggggacagaagagagactgaagtggccccgcaagccccctttggcaaagcccactccgagaccatccggatcccgacctacaccagagcaaatgtctaatggtgagaagccgcttcaccaccctacagatccgcggtgcagagatttccctgctaaggtcctaactcctgaatgggtacggcgagtacacccgaagaatcgaaaggtacttatcccccactcagttctagaggaagcagcgaggtgggccaagatgcgtggtaaggcccagggactctttgtcaacgaagtccgttaaactttccgccctcccgggggcctcagcgggccaattccactcacttctcggaggctccggcccagcatggtcctcgtgcccagcctgccaccacaggagccaggcaagggggaaaaagaggtcaccggtcgctagtgatgttacatgggcgcagccatctttaattgtcactgagcccttcaacaccgagtacttggattggttgaattgcagcccgaggaaatgatctttgtaggcgattggttggcgccgcaaagccatcccggcggctaaggagagcgggcaggcaaggagattccgggccagggtcgcggcggcagtcggcaagcgttcgattctctggcgttggatcgcgagcggtgtctgcttgtcccgccgagggctcccaggacagggcagggatctagggggtttgcgcacctgctttttaatgccccgcccccccttttttttttaaagtggagggggtgaaagtgagggaggagaatggacagaatactgactggaacgttaattcgagcatttcatatgcgaagagcggaataacagttccgtattcttctttcagtttctccattagattagcttcattttcgaatgctccgttttgcatgcttaattttgaaactagcccgtggtttggcagaatttgactgaattcaggggtgagagtttgatccagtccaagtgtatttgaatttgagcacgcagttcaaccagtgtttacaatggaatttctgaagacttgtgtacttagaagaaatgcatgcactgcggtttgcttctggagaagcaaagttgtccaaaagccttcagttagaaggattagtactacctctcctaggagcactgtcatgcctgcttgggtgatagataaatatgggaagaatgaagtgcttcgattcactcagaacatgatgatgcctatcatacactatccaaatgaagtcattgtcaaagttcacgctgccagtgtaaatcctatagacgttaatatgagaagtaagttttcaaaagacattgttaccttttttaaaaaaatcactttcataaggtatgccgttttaaaaaattgactacgcttctttggtttacataaatgaatcatttaggtttttaacaatacctctgcaaatatttccaaaatttttgaaattgcaatggccagggaatccttctggccatttgtattgacaaaatataagcttgattgttttcatgcgtccttaaatatgtaagttcagacttgagaactgtgtctgtagctaacttttttttttttgagactgagtctcactctgtcacccaggctagagtgcggtggcctgatctcagctcactgcaacctccgcatcctgggttcaagcaatttctcctgcctcagcctcccgagtagctgggattacaggcgcatgccaccacaccgggctaattttttgtatttttagtagagatggggtttcac

SEQ ID NO: 5898 - DNA, 312 bp, Homo sapiens
tcaaaagaaagacatataaatggcaaactggtatatgaaaatgtgctcaacatcactgatcatcagagaattgcaaatcaaaactacaatgagatatcatctcactccagttaaaatagcttctatccaaaagacaggcaataatgaatgctggtgaggatggagaaaagttggatgaaatgtaaattactacagccactatggagaatagtatggaggtgccttaaaaacctaaaaatagaactactggttgggcacagtggctcacacctgtaatcctagcactttgggaggctgagggaggaggattgc

SEQ ID NO: 5899 - DNA, 1691 bp, Homo sapiens
ctcaaattgggtaatttgagcagagcttaataaaggcagtatttacaaagtgtgggctaagcctcccatgagagtgcagaaccctggggctagcagtgtggggcgctattcccacccctgggcctgagtggggaaggagttatctttagcagacagaggattgctggaggagtgagaggggcacctgaaggagctgtgacctttgcttaaaggatgcagccagtcatggggaccctccagggaaattaatatcctgacctgctttcctgccccccagccccctcaatccattggctgaggccgctggaagccaccgggccaagggagcttgttgatgtgggtcacacgggcatgttcccaggtcagagaggagagtggagagtgaatctagggagactcaagagggagaagtgactccagctaccttcctttctgccgttttgtctcccagctggcattctcttttccagagcctcgagtttgggtttaatgtagttagtaaggagttacttccaaaggtagtgggcttagttgtcaccgtattcttaattttattaatgactgatgtgcctgggattggattaatacattaatccttaggacagccccatgaggcagcttggtggcagctcaggaagcatgtctaaggctcagaagttcataactcccttgaggccgcacagagggcggagctggaattctggtctcccactcgatcccttcgccactggtgcagagcttaatcacggccatgggctgcccttgttttgggttgtgggtttctgttcagtgagaacgcaactcaatccaaagtgaatgaaaccaagttggaaggcagggagggaactggctttgagatgacagggtccaggatgtgaatgcagctgagactggttcttgtccctccctcttgtccctcggattgataacttgtactcaactacatgcttttgtcagggaaccctggctgctggccttctgggtcccctaaccataagaaaaaggaccttccgttagtgtaaagcccaaggcaggattctgcttggctgggcttcgatctggtacccatagctggaccaatcatgacatcccagatggggtcacgtggccaacctgccgcaagggggtggggtctgtaccggaagacaggaggggaggggtgcagatcggacaggaagtaatggcatcccaggccccgaattgctgcaaccctggaggccagcccggagttgagactactggttttagagcagttcctctgcctccctaagctccacacctgtcaggattctgttacttcttggtaactgggacttgcccaactttaaaaacattatttaaaaaaatagtaatgtgcacatgtaaaagattcaaatagtatatatacaaggtgtacagtaaaaagtaaacttccctccatcccaggcctgccagcatccctgatgccgactttctgggtgtggcctagggcccctcagtgtaatgtaggggttgtgagcacagactttggtgccagtttgctaggttcgaatcctgactccctctttgtagctctgtgcttcaattgaaatactgtgcctcagtttctcctttataaaggcagggatcatgagagtgcctgtcccttgtgagcactatgaaagtgttagctgttctttaccagaataaatgcatttctatatcttcccata

SEQ ID NO: 5900 - DNA, 1691 bp, Homo sapiens; identical to SEQ ID NO: 5899

SEQ ID NO: 5901 - DNA, 3268 bp, Homo sapiens
taatgaggaatcaaaggaagaagaagaaagagagaggaaggaaggttggaaggaaggaaggagggaaaattagaaggggaaaccatgattgctggtgaggttttgagcacattttcctgcaggctggtatgggtgagaggtttggtcttgtttgcaaatcttctgaaggccattccagaggagcagttgccactgccccatcccctgagctctgagcgtgggggttcccctggggagactcctggtgagaggatgccgatttctgctgatctgtcactgggtaccgaggactgggtgtgtttaaggcagacagccaggtgaggatcccagctactggggcctgctgtcatctcctgggagtacccgggggtcaggagcctaggggactcttgcacttcacatccagccatgctaattacactttttggcaaaggaaacagctaggagcagtttctttcactcctacagccccgttttctcagtgtttagacctcgaattattactgggctagagggaaggcagcctctgaagtgtggcaggaggaggggaagtctgcctgcatcttggtgtgtctgtcagatgccagcactaataacctggcttctgtgaggcctgtcagtgctctcaggaatgaaaggggacccctgagaggtgctcagtaccagcaggctgtgaatgctctctacccaccaccctcacctcctcgttaaagatggtgctacctgccacacagcagacatctggtcgctgcacacccgaaagaccccaaggcagtctgccccttgtccagccacacgccagcacccaccctcctggcccctgcctcggcctccccagaccagctgcacccagcccccaacacgcaccccttctccagatgtgtgcagggcctcattttgcagagcaaagacagatgtttcagccacacgctttattaacttctaaaacctgtgctcaggacactcttcaacagtcatgaaaagtttgatcacttgccacagtcaggacctttgtgtggggctctgatctgatgttcggtctcatcatctcccaaaccagcagtcgtttgtaccccaaccctctgctcaggggctcatacccccaaatgattttcctgatttatgtatttccctacaaagggctttctatacctagcatctgcctccagcatgagaagggggaataggtgagacccatttgccagtagcagacggggaccctggggagaaaatggcagagcctgttggagactccctgtctccagctgaccagccaatgggattcctcttccctccactgtctcccacaaagtagaagaatcctggtacatttagcccatgagcctggcacagatccctatctagacatgaggccctttagacatgactttggcattgaccagcctgttggcaatgggtcggggaggcagaggggatgctcacaccagtaattctcatcccctgaatgcttgggatcacctggggagagttcacaaaatactggtgcaggggtcccacctctgatgatgctgagtggtgggtctggggtgtggcccaggcatcatgatgtttcaggcccccaggtgacttcttaggcagcccagctaagcccctagagccttgcaatttcccccaaatgacctcagagggcccgatttgagggaaatgcctaacttcaggggccgtaagaatcccccagggagcatgtgaaatgcagataccaggcccacccccagagatgagctgaggtgggtcaggggtgaagtgcagggatcagtgtttttcacaagctccatacctccaggaaatggtgttgtggttgggcccgtagaaaacattctgagagtcctgttgcctgtgccttggtgcacgtggggtggaatcccagtggccctgccttgaggaggatgtgcattaacgtggtaggggagacagagacagctccacctgccccctgccccaccggggacctccaaaaacttcatggatgttagagcaagcagccatgctgcagcagaggatgaggctggcggatttagtaagagccctctgtgtttgggctgagttctttctctagttgccctgtcatctggcctctggataacccacctctcctccctcatcctaaaattacagatggcgaaagatggccacatttagtgagacccctaaggtcctccaactagggtgggtccacagtggcccctggtgcatggaccacacactctcttccctcctctggctcaggactacggtctgaaattagggagatatgaatgtctttcttgaaaacttctcttcccagtcttcccactttgcttgggggtccttggtcaaggccagctttggggactagggcttgttgcgactaccagctgtctcattttgctgtactgcaaactcaggcttggttccaagcttatgggggccctgtccttcccctagtagggtttgttttggggtcacatctggtcatacccttcagagagctcttccccagcctctacatcagggagagaggtaggtagggaggagcattcaaggattagaagaaggactaaagtacaacagccttggaggaactgccaggaactaagggcgagcactggagaaggcaacctgggaccccctgcgcttctgagcaggaagaccaagaccttcaggggccctaagcactgaaaacatcattcctcatccccaagccctggcatccccctgttcttctaaaataattcttttctaggtatttctgattgcaaaattctggatgggttcatccaagctgacctttgctgttttttcccttcccaacaaggcctcactttttggagccaccttagctggtgcctaggcagaggggcagtcagcagtggttatcaggatcctggctctatgggttgccttcctcctggtctgtaaagcccctgcaggcagggacttcttagatagctgcttccttagggcatggcatgtagtgggtggttaatgaatggaagagagggaatgagtgatcaagggagggaggagggagtggagtggagatttctcatcctttcctgttaatttatgacatcctcctgcctatgagtccttgactctggagttttacaaagcagtcacatttcaaataaaagtctgggaaagcaacacatcatcgccaacttttaattttgctaaataaggatattagaaaaagaatagaaaattgcagtcccttactgtttaaagaaaaaccaaaagaagttaaaaagaaaaaaaaaacaacctc

SEQ ID NO: 5902 - DNA, 2379 bp, Homo sapiens
gaaaccactacttagatctcgccgggatagaaaactacacgtcccaatttgggcctggtaagggactcaagcaccctgcaatgggcgatgagggcagggcgtggctggacgggccaggcgggccgtgcgggtggtgttcactgctaccccaggcttcggtaagacaactattatgggacaggtcaaagacttcttggagaaagtgacgttaaaaatggtttcaaaattaaagtaatacatgcacgaaatcgaacaaaatccaatagtatctaaaggcttagcacccaatgacaaacaacagttttgtgccccatcccagcccacccaagccctgttcccggggcaaccactttgacctctcctggctgtttcttccagcaagaacctcggtttccctaagtacagcactactgtgtctttatcagccttgacatatgttgacctcttgctcaatttcactcccacaactcccttctcccctttctcttcatatgtttaattcctctatgagttacttctgtatgtttttagcaatatacttagagttctttcttgccccagtgaccttagatagttttcggggtctctgctgccatctgtctttctcggctccctctcggagagtatttttgaagacctaccaaagaaccagttcttcccacttagcagatgggaaagttccatttcagagagttttcctgcaaggcagtgaggggcagtcagggcattggggggtagctctggttttggagaactgggggcgggggtgatgtctggggtatagcgcaagccccagcacacagtaggtgctcattaaatgtctgttgaattggttcctaggctccccttccgtggcccagaagtcagaactgcccccccgcacctccaatcccactcgatctcgctcccatgagccggaagccatccacatcccacaccgaaagccccaaggcgtggacccggcctccttccacttccttgacaccccaatcgccaaggtctcagagctccagcaacggctccggggcacccaggacgggagcaagcactttgtgaggtcccccaaggcccagggcaagagtgtgggtgtgggccacgtggccagaggggcaagaaacaagccccctctgggacccgccatccctgcggtgtccccctccgcccacctggctgccagcccggccctcctcccctccctagcccccctcgggcacaagaagcacaagcaccgagccaaggagagccagcagggctgccggggcctgcaggcaccactggcctcaggtggccctgtcctggggcgggagcacctgcgggagctgcccgccttggtggtgtatgagagccaggccgggcagccggtccagagacatgagcaccaccaccaccatgaacatcaccaccattaccaccacttctaccagacatagagcccctccccagggccccaccctgccatatgaaggaccccacccccgacaccacaaggcattattattctattaattattgttattatgatgattattgttattaataattattgttactccactaatatttagctagcctacatgtagaagatctatggaaacacagaactaaacttttatttatatgttgtggggactgcataactagcccaggaaatgactctggttttgagtggcctgtaatgggcagaggctccctcggggctcgggatctgcagcatctatgtggatcagcccacacccttcccagagccagggagcccttagcctcaactctgccccaccccagcctcttccaggagagcacccttacttggcccggcttccagagaccctcgaaatctccgagaagataaacagctgctacctcttagtattattctgattttattttgcccttaactgattgttatatgctacaagggatttcagtggactgcagagtgcgaacgtcttgctgttgtgtttttatgtcccaacctagaaaccttagctgtcttttctggagttgtctttcatgcttttccagtgggatcaagcccttttccccaagagtcccatctcttctgccatgcacgacatgaaaatccacttctcttccttctccttcttctctctctactttacagtgatacacacacgtatttaaggactatccctgagaccatccttctcattttggaaactgctagggagggaaccaaccacttaaacaagcgtggttttccaagatccaggcaattgtgtgctgttggttgtggtggaggatgtggcacatatatacgtacctacacggttctctaacagagctttctgtatctatagatagatgccatctgtccatttctatgtatctttctataaatatacactctcaggtatcttt

SEQ ID NO: 5903 - DNA, 3268 bp, Homo sapiens; identical to SEQ ID NO: 5901

SEQ ID NO: 5904 - DNA, 2379 bp, Homo sapiens; identical to SEQ ID NO: 5902

SEQ ID NO: 5905 - DNA, 627 bp, Homo sapiens
  SITE (26): n equals a,t,g, or c
  SITE (33): n equals a,t,g, or c
  SITE (93): n equals a,t,g, or c
  SITE (113): n equals a,t,g, or c
gtttccagcagatgggggagttggcnaaggggnaagacttcaggaaaaagtcctgtcaggctacaagagagcccccaagacgttagcacatanctttgaatgaagaaggctgnaggttgttctaggctgaattttcttaaagattgtaactttatgttttacccacctctcatacacacataggaactccacttcaacctgtggtaggtaaggattgggtaattgtgtctataataagattgagcataaggaaagtcttcagtacataagggagcctggaaagggaggatgctgcctcctcctccctaggccaggtgagaaaggaggaccctaaagtgtgggaaactccccccaccccatgagaaagcatcccaattttgtcacaggggcctgggatgaagtctatattactgagaatgacagtctgggtggttcttgcgtctgtgtctctgtttatctaaatttgtaggtgcatatttgactgtatcttgtgtctgcttatttatatcaatgtacactgtgcatacatcctagtcatggtgatgaggtagggaaaaagtaggtcaagttaatattgatatgagattttctcacattaaaactaattttactgtcagatgttacttg

SEQ ID NO: 5906 - DNA, 6614 bp, Homo sapiens
gatcctcgtgaggtcttgggggtcccaccgccctgcgagccgcgcccgcgccccgccagacccggaactgcgtcgctaggtttgcgctggagctgctgggattgctgggcatgggtgggggggcgcagaggaggaggggggattggagggacctctgcggagctggcagaccccggtactactgtcctggcgcacccagcccttctctgtaccaggccgggagagggaggcggcgccgcagagcctcgggtgcagtctgagaagtttgggagtgacttgaagagtgactggaagcaccccagacccggtttgtccggtcacagccgggtccttacgtgagttaggagaggagtgggggtcggacgggagccccactgagagtaagggcgcgcgtttgttcacagaacgtcgggacctggttccctctttaatcacacccccgggggcgcttcgtgtgaggttccacgggggaaggcgagaggcgcaggctgccacacacgcactgtttggaagaggggaaggtagggaatagtggtccgggtgtgggtggtgggggatgcggctgcttagatctgtgcggtccaggtgattttggagggggtcttgaagtgcttgctcccgccctggcacctagggctgcacttcctgctttcatccagaccaagttcggatcaagtgggagttcttcaaagagagagtttggtaagaaactggggaggcaaggaaaacctcttaaggccataaatgccacaaggtttatagacatcgaatcgccatcccagtttaactcgagtctggatactttggcttgcatgattctgcacccttgaattccttatccacatcagcccttactggggaatcctgcctccaatccacttttcagatcttgttcaatttctccacttaactcctatttttgtgcaacaacacacatatacattcatacacagatacacacgtacacacagaccccttccttgaagaggaaagtctagcacaggagttcctgacagggtccccttagctagccacagctgtaaacgtttaatggggtctaccccaatcagagaaaaaagcatcacattgcagtagctgtgcattaccaatcagaggtcttggcaactccagccatgtcacccactccccacttgtggagaattagtggcccttactctatagtttccagcagatgggggaggtgggcaagggggaagacttcaggaaaaaagtcctgtcaggctacaagagaggccacaagacgttagcacataactttgaatgaagaaggctggaggttgttctaggctgaattttcttaaagattgtaactttatgttttacccacctctcatacacacataggaactccacttcaacctgtggtaggtaaggattgggtaattgtgtctataataagattgagcataaggaaagtcttcagtacataagggagcctggaaagggaggatgctgcctcctcctccctaggccaggtgagaaaggaggaccctaaagtgtgggaaactccccccaccccatgagaaagcatcccaattttgtcacaggggcctgggatgaagtctatattactgagaatgacagtctgggtggttcttgcgtctgtgtctctgtttatctaaatttgtaggtgcatatttgactgtatcttgtgtctgcttatttatatcaatgtacactgtgcatacatcctagtcatggtgatgaggtaggggaggagtgggtcaagttaatattgatatgagattttctcacattaaaactaattttactgtcagatgttacttgacgagccagaaagaaagatgttccccagggaaacacaagcgttgtaggaaaagcaggactgtggggtgtggggtcttctcatttctgtcccacctcttcatgcatgagccctgttagcttaataatgaaaacaaaattagggtcagggtcatgaaaaattaactttaaattaggcaatgcaaataaaggaagacctaagttatgaaatggaacaagaagaaattaagaaaggcaaatttcatttaccaactgtttttttgcttctgtcatctttaataaatatgacattttggagaactggaaataagttaacattgttctatacttaaaatacgaaaagccttttgttagtgtttcttttaagcacatgttaatagaaatgaaacattcttgtaaatttttttataacctccctttaaaataaatgcaggaataatatttacccctgaccaaaatacattatatttctcttattcacatatattaaaaatactcctttttgaactccagcgtatcacatgtgttcttgctgttagcctcgctttatcttctatcttattagccaagatattttacattttatagaccttcctcctatgaacttttatttaaaaatataatagcttcagtctacatgtcataaataaagaattcttacgtcagtaaacatctgctttaaaataaataccactatcacatattttataaaataatttaatacacgaattcttagttactcatttcagctaagattgagatgtatgtttctgattcaattaaacatgaaaattcatgtttgggtctttgttagtcttggagactctaactattggaagaggctttctgaaaattttgagaaattactaaaagttgacagggttagtcaaatccctttgtgcccagtccttagctctgtattggtgacactcagttaatattgaattattagcacagggcaataagggagcatagctcccccttgtgtgcaaaatcagaagccacctgtggggagaggaactcattcatatttattcatttgatccagagcctgattagtatactctacatccaggggatgcaaagatggaaagatgaaatctctgccctcaaggagattacagtctaattgggagacagatgttcagacaattagagtacaatgtaatcattgttatcatgaaggtatgttcaaaatgcaatcagaatgttcaaagtgggaacctctacattggcccagtggcatcagaggaaacttcacagaggagggaacacaaactgagacttgaagggtgaaaaggcatttgccaagagagtgagtgcattccaggcagaggaaatagcatatccaaaggtattgaaggcttgaaagagcgtgtcagattcagggagaggtcagtcattcagtatggctatagactaggctgggcaaaagatggagacagtataggtggaaccgggttataaagcactttatgtgggaaagtaagaagatgagattttagccagagcagagaagtgaaatgattatattggcttactagaaaaaaaattattttggaaccaggtaagagaggatgagcttgggttagggcagaggcagtacagaaggaaatgcatggatagtttcaagaaatatttaggaggtaagatggtccaggtgtctggcttatttgattgaccagtggtgatgttgccaaacatacaaagacaatagaataaaaagcagggcagagacaatgaattccatttgaggggttgttaaaatttcaggcatcaagggaacatccaagtgaaaatgtccacagggtggttggcccttttgagtttggagctcaggtaggaggactacctgaagacatttgagaaccatcagccatgggaatggatgagattgcccagggaatctggaatactgctaaaagaagagagccaccacagattcctggggagcatcaacatttaacagggaggaaaaagaactagtagaggagccacaaagagatggccaaaagcaggagcccctggagaacatggtgtgatggaagtgtaaggaggtaaagtttgaggaaagggggcatggtctgcagtgttaaataccacagagaggtcaagaagcatgaaaagtgaaaactgccctttggatttaacacttagtgacctaatggagaaggcagggatgaggaaaagtcagattgtggtaggttgaagagataaggcaatggaaatgccaatatacactgttttttcaaaagcctggctgtgacaggaatagagtaaaataggatggtagctggaggggaccaagaagatcaagggagaaggttctttttttgtgtgttcttaaggtgggaaaaatttcagtatacccttgagagaaggagccagcagagaaaaagaagctgggacgctatgatgggaagggggacaactgatgataaaggtggtggagaaggcaggcatgaatggctagagcccaggaggatggattcgcagaataggagagaagagagacgcctattcctcagggatgggagagttgagtagttaagaaaaagcaaaaaagttcatgttaaaactgacactcagggattaagtgacttgcccaaaatacaggattagaagttaaaactgtctgtctttctgtctctttgcctgacaccatgctactctcacagacaacacaagaaggtggccagcttagaaggagagaggaaggctgggagctagggcatattaggaggatcccagcattagaactaaaagggacctggggattatgaaatccatttacagatgaagaaaccaaggactcaagaggttgtcgcttacctgtccaatatgacaatattagtaaagaacagaaactagtcccagaatggattccagctcagggttctcttcaaaaaagattggagaggccgggcacggtggtttatgcctgtaatcccagcactttgggaggccaaggatggtggattgcttgagatcaggagctcaagaccagcctggccaacatggtgaaatcccgtctctgctaaaaaaaacttaaaaattagctgggtgtgatgacccgcacttgtaatcccagctactcaggtggctgaggcatgagaattgcttgattctgggaggcggaggttgcagtgaaccaagatggtgccactgcactccagcctgggtgacagagcaagactctgtctcaaacaaacaaacaaacaaaataatggaacataagaacttaataaaaaatttaaatgtactccattttttatttacttaaaataaaaaaagagattgaagaaagagataaatggagtaacaaaatgccccctctttcccaacttgatagcttatttgtttccagtactattctcagcactttatatacacaatctcatttcatgctcacaatgatgcttacaagatagacattactatctcaaatttttaataaaactggatgtctgtaaaggtcaagtaacttgcaagaggcagaggcagaattcaaaccctctggggctacttgactcccaagcttattctttcattataacgcttaataagacaatgtgtggtcagactaaattatggagccttctgggcaaactgaaaccccagtacagatcacactgcatgaaatgaggaaaactgggatcattgactctaagatgcattttttttttttcacattctgacatctctgaaattaggtacatctcaccagcaatggtggccatggtttaattggcaagactttttttcccctttatttgtgctaaaatagtagtgtgtcatgcaatccattctgtctgagatttaactaaacacattaagttcaggtaccattttcccaatatcctgtctgcaaaagaacaaataagagtcaaacaagttctcagatcaggggatgggcagagaagaccacagctagcgtttgagctgaaacttggcctgggaatttgaatcaaagagaagggccattgttggtaatgtgtggaatagaaggacatctggccccagcactgcctgatagagggcaggtgccccttcagtgcttatttaggtgaactcagtgaagctcaactgttctgcagttaccagaacaagagccagggtgcttgagaaagctggacagacctgtgtgggcagtgctaggtctggaattcagtcctctgatgatgtggctggattatatacttagcagagagctgcctggcctttgttcctttggggactgaggaagaaagccaatctttttgtaatctgtaccatctttcacctcatgccttcacctgataatatagctccttttatgttctgtgatctatctgtgctaggggcctgaaggagagagaagagaattttattttcttgagacagtcccagaagaaacagagaagcccccagggtggtggtagcactgacttatggaacctggagaaaaagagaggagaatggggcaacagagactgatggcaaagaccctcattctgtcacctaaaagatggggagatggatggctgaggggcagtggaacggtggtaatagcagagtctgatgatgcacaaaatgtgagctccagagaagaggaacctagtctggctcattctgtgctgtatctccagcactaaaaacagtgccaggtacattgagggcatgcaataaatgtctattgttgttgtacagcattgccccccctgcaccacctcaccaagatggctactttgggacacacattccccttctatgctggccccaagccaaccttcccgatggacaccactttggccagcatcatcatgatc

SEQ ID NO: 5907 - DNA, 322 bp, Homo sapiens
agatggtgccactgcactccagcctgggagacagagcaagactccgtctcaaagaaagtttttgttgaagctatctgcgtttgccttgcctggcatggttttggttcacgtttccttcccagctccctgagtgactctccctaaagcagggagaaagggagggaagaggtaaacagaatatggccaagggaaatcccacacatgtggttggcagacttaccatgagccagaccctggctagttaacgggtatccagttatgaccaaaacagacatggaccccttgtatttctccttctgactctaacctagtaatgcccagt

SEQ ID NO: 5908 - DNA, 309 bp, Homo sapiens
gacggcgagggctcccggggcgcaggtagagatgttccgtcggtgccgaaggcccggctagtgcggttgtgtggacggcgaaaaaagcaagtccgccttcacaagtcccatggggctggggagagggtgggaggcggagagggtatggggaggggagactctcctcagatcctctcgacaccgtcgggtctgggctccaagtccaaggccatcgatcacctgccacccacagaccaggccaggcgtcaaagcaagtcacccatccgacctaaacccctctaagaccctggagtcacgtctccctccggg

SEQ ID NO: 5909 - DNA, 1348 bp, Homo sapiens
gcagatgctgagaaaaaaaagcccaccagttttcatttccactaaaaaataaaaaaataaataaagactatatgcctttcaagactgcctagatgtagaatctatggcaaaggccattgcttctctcctgcctgtgcactagcccctgacctcccctagtccctctctccctatctctcctccccaactctgggataggatggctcaagggaggggacactaggagactccaaaataaaagcatcatcaacaccctcctctgagcccagaggcttctatgcttccagcctttgcctccttccaagtcggtttaggtctcttgcccaagcaaagtctagcctgaaggaaaaccaaaggatctcctaaaagaacaggcaggagaagcaagttcagcagagaagcttctcttgtgaggtatcctctccacttcccaccactctcccaccaggaagacaacaacagcctgacctagaaacttcctgatgatttttaacctcaagagccagctgaaccgagactcatctgtccatggccctgctgcaggtaccaccacctccagcccttgtctttgctcagccaaacctgggatcgggcagccagtggccctgtggggcccccacatggagcaggattgtttcaatttcctgggccacgccagttggtgctgtgaccatttggcccaggtctctccccggacctctttttttttttttcatgagacttaatttttcccaccctttccttcaccgtctgttttctttgatttcccccaaagcaaataagaaacaagaagttacaactgctagacttttctactgagacggggaaagtgctttccaaaagagaaaattattcctgaggaaaaaaaaattaacaaagcaattttaacaatattattctctaggttagaaacagaggtattcctgttgactgaggttccctgaggcaaaaaaaaaaaaatcactattttaatacagccttttaaaagtgtgccagaaaaataaagattcaaactaacataggattttgtgtatttgttctgaaacttctgactgcatttttttccctccatctctcccaactcttcaccatcacttttcataaaacctccatactgccatgtgtgtttggaaaactttaatctcattcagcctagctgttcaactccaaagaaaactaaacataggaaaataaaataaaaggagtgcaggtgaagaaaagtccctccctcacataaatccccttcttcatggcacagatttatactcaaaagggaatcagtgtaaccctgagttccgattggtttctggaaatacacatgggtctgcaaagcagcaggtccttccag

SEQ ID NO: 5910 - DNA, 517 bp, Homo sapiens
cccaaaccatcgcgggacggaggccaggcgagtgtggaaagcgaaggagccagagacgcgataggaaagaatggagactccgccggtggtgcagacagggctgggaaggtttgtgcacccgggtagtccctggctgctgctgccaggctgcctcagccggtcgctgctgccgcggcgactggcgacaagctaccagccacctacgatggcccaaggaggcgaagaagagcaagcgatcaggacaccaaaacggttatcggaggcaggttcccagcacaccagccggccgagggccgagccccgcgggcggcagcaagttttgggagctggaggtaaccgaattaaaaggcgccttagaaactccgcttcgggactttgctcagcagggctccgggttggagggcgccgaggcctggcggacgggacagtgggaagagagaaaggtgctaaggggacccaagatctgggatccagaacaagagggggtggggaacaactctaccaagccaaacagatc

SEQ ID NO: 5911 - DNA, 7911 bp, Homo sapiens
gcaacaagatgatcttggggcagctttccagacgtggatggacaccagtggagcactcaggccagaggtatctccaggggctctccccatgtgggatcccttcctgggagaaacgcaaatagataatggcccacatgtggtcagtgccttccatgtggcctgcatggagcatttcagagtcctggtcttggtggcatctcgcatccacaaatgggggtttgtactgaaactcagaatgggcagtgagtccaaggtcccatggccagtgcaggcagagcaaggccagaaacaggccctgaacccttgagctttctccggaggcctctcagagtctccaagctcttgctggctggagtcagggggagaagcttgcctgggcccagagcccgcagcagcttcccagagctcatccccacgtttcttcaggagtaagaagctcatggttagctcgtggggctctgctaagaacctgccctgtggttaactcagctgtaagactccaggctgagaagggagtcccatgtcctctagtccagcctcggtcaggagccccctttgcagccttgcctccttcacatgacagggaacttactgcccccagctcaaacctcctatgaacatttcggtttgttccctgtgctggatgctgagacagatggatggccagtcacagccttgactttcagagggctcacagtctagggtggaggacagcatggatgagccccttaccatctgtccggggaggtcagtggaaagagaggggaacactcaggatccagtgcggctggagaagggaagcgtttccttccatccctagaagccagtgatgccgcacaggagagcgctgacctgcaacatccttaacatgatgaaggaaagtggctccgtttatcaagcacctcctacccactctgcattggcggtagaatagaggcttatttctcgtgcacgtaaaagttaattggcttgttgatgagagaccttggctacctgccaggggctctgccctcttcctctcccacacgtggctcccaaggtcactccacaccagggggaggcaccaccggggaaagagagtgtagagaattgtgcaggagggtctctgggccaggcctctatggggctagcatcgctccacttccatcccgttggctagagcacaaataaggctgaagatgtagtctgtccaggcagaagaaatggattgggtgagcggctgctggtctctgacacacgttcacacatgcgtgcacacacacacgtgacctccgccacccccagtggaaggagggtttatttagctctgatttgtagctctggaagctgaggcttaagggagaattctggccagggtaaccctgaatggccggctgtttagcatctgtggtcccctcctgccccctagtggagatctgctccttctctgagctgaagtcctcctcccagcacttgtgcctgctggccccagtcccgtctcctggtgcctcacagagaccctggctcccaccctaggggagcccagtgggggctgtgtgacccccaagtcagctccccccagcacctccccttcctccacaggctctttgcagatagagattgggccgctgccgagtgtcccacgcaccctcgcctacctcattcacggggctctgcctgtcccatatcagagaacatggtctgaccctgagctcttttcaagcctctgagccattgtgatagcctctcctcctgcactttgtccctggcccgttttcttgtctgcaaaataaagagaaacccaacccgtgctctagccatgaccgtggaaccgagatacctcccaggttgtgagaactgggggctgtggaggcttgaaccccaggctggaccaggaccctaaggtcccaatgaccaccctctcctcgtgacagagttacagctatccagaccggctggtactggaccagggaggagagatctttaaaaccttacactacctcagcaacctcatccagagcattaagacgcccctgggcaccaaagagaaccccgcccgggtctgcagggacctcatggactgtgagcagaagatggtggatggtgagaaggcttcctgccgggggtgggtgcgcctggcggtggggagctggggcaggtggagtatttgatttccgccgcattttggctgagtttttgtcctcagcaagacagatacactggcagtcatttattcactcagcagtcacagagcctcacaatataccaagatccgcatgctggggatgaccatttcagtgcaaagagacaagagctctggcagaaaaagctcctgaggctgtaagagtccccacccccggggcccatcctgtcacaggctcccgggtgagccaggattttccccctttctgagcatgaggactctgctctctcatctgtgagctgatgtggtgctgtgaaggacaagctgcggagccagacagacctgagttccaatgtcagttctgcctcagacttggtctgtgagctggggcaagccacggccccatcccgagctgcccttgcctcctctgcacaagcggctgggactagatggctggttgttccactcttgagctgcaaaggttttggcttcctgagaagcccagtggggaagctagatgtaagcagcagcgctggctgatggggtgggagacctgactcctaccctcccccggcaggccctaggaggagccctaggcctcgaagaatccattcaactaggtgatcccccaaacccttgtgcaagtgacccagcctctctcaatgtcagttgtcttctctgtaaaatggatacatcccagtagcaacataggcaagtacttagccatgtgacccctcctctgggggctctgccagttgtgagctctgcccagaaggtttccttccatctcggttggaggaatcccttttctgctcacccaacctgacttcatgctcacctggggctcggcaggtcacaagatgcagggtccatctacagaaccaaggaatgggctcatcccccagatacatacatcacctccatcccacgctgcctgcaggtacctactgggtggatccaaaccttggctgctcctctgacaccatcgaggtctcctgcaacttcactcatggtggacagacgtgtctcaagcccatcacggcctccaaggtacccatcagctcccacactgcccaccaggctgtctgcctctatccccagcctgccctgggccacaaccaacccaggttctgttctgagctgtgcctgtcttactgcatgcccttgggaaagttatcgcctccttccgagactcagtttccttatctataaattgggagtgagtaggactaatttgtaaccacaaaccctttcgagtcatatgatgctgatgattctttcttcaaatagaatcttctgcctaatatctaaagcagagcagttggccaagctggcctggcttgtggaactatgaatcatcagcatgaaataaaagagaaaactagcatgatgctcatctgaagcatgttgtgtgaattatgtatgcgaatacttaactcatgttcaatgcctgcgtaccacgtgcctgtttctgggttgagcattttaggtggtacagggccactcaacaacaaaccaaggcaggtggcagcatgagacctgacagctccctcgcccagggatcctcagtggattgtgggtctgtagttccactaagccttccgaatttgggggcaatttatgccacagtgagaagctgctccgactgcgggggaaaggaaccctcccatttcatcagccacatcccctaggagatgccttgtgctgactgggtcagactggcagtttgagaatctctaggagaggcagccagccagtcgccaggtctttgttgggtccctatcatgtgccaggccctgagccaggacggggaggtcagactcgaaactcccctgcggccagagctcacagtccagcagggacttggtgacctccacaggctctcttccctggtgactcaaaggttttgggatcacgcagcaaacctgcctagcagaggggtgaggctggagttggcgcctgggttggtggcatgaatgcccaactgggtcaccttctccatcagaaacaatggcagggagaggccctggctctgtgtgggaaagtgctgaagccacaaatcctgccatgttgtttgctctcaggtctgccatttccggcagcaccccatcgcacctcacagggatcttgggacttaggaagggtctcgaaaacacctctcatttcctctgcattccataagcctcttagtcttgggcaaaaccctctccctcgctgagctcctggatcctagctcagcccaaagaccccccatacagtaagggagtggatcagatggcaccaagatctttgaagctctggctctggagtcaggcaggcccttcccacttacgcagccaagaacctgtaagaccagctcacgcagacctcagtttccccgtctatcaagtgggcacatgtctgggagcatatcaggaaatgcttgccaggaaggggcctatccctgttccctccatagagaggcagggaaccctcggtgtgggggggtgtggggggcagcctgagccgctcactgccgttgcttctctataggtcgagtttgccatcagccgggtccagatgaatttcctgcacctgctaagctccgaggtgacccagcacatcaccatccactgccttaacatgaccgtgtggcaggagggcactgggcagaccccagccaagcaggccgtacgcttccgggcctggaatggacagatttttgaagctgggggtcagttccggcccgaggtgtccatggatggctgcaaggtaactctcagagcccctcctaggcccttcatgtggggacaactggaaaaacacttgtttggaaaaatgtgtttctattataagattatatctaacattttaatagtatactatattaatgtgatagatatgatttcatctttgtgtaatataacagttttctaaaatcgtttttactcactttcctctctgggaagctatgaggggaggtctgggctggtaaaaattctttgggctagtagatgttgtacttacttgcaaggctctttcaaagaagatacatttcttcttcctgctcccaccctagtcaggctaatttcttctcattatattttttggtcattttcaaatgtcctgaacagggtgggttgtcaggggaggggaagacagaaagttgagaaaaggcaaaaatcagttttataagactaaacaaaactaataatactacacagtgttcatgaggatgtggggaaaccaacaatctcgcatgaagctgttggaagaaaataaattggtagaggctttctggatagcagctctaatatatatccaaaaccttagaaatgtacttattttcaggggagctaagctatgaagacacaaaggcataagaatggtacaacggaatttgaggacttagggaaaagggtgggagaggggtgagaggtaaaagactacacattgggtaccgtgtacactaaagaacttattcatgtacccaaaccccacctgttccccaaaaacttattgaaaaaataaattaaaaaatatatatatatgtatatgagatgtacttgttttttggtctagcaatctagaacaatccttctagaatttgttctagggaaataagaatgcacacaaaggtttagttacagtgatgttcatgacagcattacttacaagaataaaaagagtggaagcaatctaaatgtgccatataggtcattgctacaatgaaatacagtatagccattaaaaattgtgaggaaagatggaagggaaaatgctcatgatgtatgataagaatcacgatggatgtacgtgtgcacttttccttctgccttcaggtccaagatggccgctggcatcagacactcttcaccttccggacccaagacccccaacagctgcccatcatcagtgtggacaacctccctcctgcctcatcagggaagcagtaccgcctggaagttggacctgcgtgcttcctctgacctctgacctcgtggccactctaggcctcatggaggagggaagaggaagaggcaaggggagggtactgaggggcagatggctccaggagaggcagctcccctgcccaagggtccttgggcagaccccagctgttgtctgcccagtagaagtgggtgggggtaggaggggatagggtgtccttgggaacaatggatcccagcttagccccaaagaccaaccaaagagccagccagagtaagctggacctgcaacctgcctgagccccgtggcctctcagctctgcggccaccccgttccctccccagcttcctgcccaaagagccccacattcaagccaacttgagggaaaggggcgtctcgtcagctggtccctgctagggagctattgatgtgcaatattagaaaggagacatgaaaaaaggagaaaaggaaagacagaagtgtatatatatattatttaaacaaacaaaaagaaggtgcgttactatttttttttcacccgggaaagaggtgagaggatgggaaggagcagccaggcgtgggaagcggcgagatcctcgggctgggggtgcccacgtttgctacctcccactgtgaaatcgctggtgctcacaattgtctctcacagtgtatgtgatttttttaaggaaaaaaaaaaaatccctatttaagattctgaaggtgctaccattattttgccacagactttgaagaaacttttggatgtggggcatcatccgcatctttctctctcctccaaatgacaaagtttggggaatttttgaattttcctagcatcgcccttgtgctcatcaggtaatctgctaaggaggaaaaaagaaaagaaaaaaggaaaaaaaaaaaaaaaagcaaaacaaaaacaaaaacaaaaaccctaccagaaaccagaagtagagagatttaccatataacttatggactttgaaatgtctgtccttttaaggcagcagggaggcctgggtgcgaagcatgttggcttggcccttcacggtcctggagggaggtgaggctggccttggaaggcgtgccctggagaggtcttgggtgaaaacttgaccttgaagaaaccaatcacaaaagcggcgttgggtcagggctaggcttagaggtgaagcatcaacatggaaccatctcaggaagccgcatcgcctcttccgaggtcctcacttccaggagcctgtccttgcaagatgcaatcatcgttcctgctttttcattgtcattaaattctgtagaaacccattgtcattagctccaagtgtaaatttgggtcaaggagacagaataataatgggaatctcggagttcgacaccatagtgacgttcagcgtcctctgaattgtgctacatcagcgaacaagttggcgcttgaattggattttgaggttattttaaccatggaattatttttatagaaggggaaaatgtatgtgaaagtctctatttgtgtatttctctcctaaagttgtgtctctttgggaattggatttgatttttattatttaatacctcactttggcccgtcccccctcccaacacttctgtatcctcgccctgccgccccagcctggacgctctgcgtggaagtgcgtgtttgtagcagctcgggcctcatctcagcgctcggatccctcctgctgccagaatccactggcctctgtctcattcttgggttttcctgctgtcttcgtttacgtctctgtccacatgtcagtgtattaaaaccccaatgggttccgtttctccttttcccctctggattttaaataaatatttaaaactgaggcaatggaatgaca

SEQ ID NO: 5912 - DNA, 5628 bp, Homo sapiens
ctaaggtcccaatgaccaccctctcctcgtgacagagttacagctatccagaccggctggtgctggaccagggaggagagatctttaaaaccttacactacctcagcaacctcatccagagcattaagacgcccctgggcaccaaagagaaccccgcccgggtctgcagggacctcatggactgtgagcagaagatggtggatggtgagaaggcttcctgccgggggtgggtgcgcctggcggtggggagctggggcaggtggagtatttgatttccgccgcattttggctgagtttttgtcctcagcaagacagatacactggcagtcatttatttactcagcagttacagagcctcacaatataccaagatccgcatgctggggatgaccattgcagtgcaaagagacaagagctctggcataaaaagctcctgaggctgtaagagtccccacccctggggcccatcctgtcacaggctcccgggtgagccaggattttccccctttctgagcatgaggactctgctctctcatctgtgagctgatgtggtgctgtgaaggacaagctgcggagccagacagacctgagttccaatgtcagttctgcctcagacttggtctgtgagctggggcaagccacggccccatcccgagctgcccttgcctcctctgcacaagcggctgggactagatggctggttgttccactcttgagctgcaaaggttttggcttcctgagaagcccagtggggaagctagatgtaagcagcagcgctggctgatggggtgggagacctgactcctaccctcccccggcaggccctaggaggagccctaggcctcgaagaatccattcaactaggtgatcccccaaacccttgtgcaagtgacccagcctctctcaatgtcagttgtcttctctgtaaaatggatacatcccagtagcaacataggcaagtacttagccatgtgacccctcctctgggggctctgccagttgtgagctctgcccagaaggtttccttccatctcggttggaggaatcccttttctgctcacccaccctgacttcatgctcacctggggctcggcaggtcacaagatgcagggtccatctacagaaccaaggaatgggctcatcccccagatacatacatcacctccatcccacgctgcctgcaggtacctactgggtggatccaaaccttggctgctcctctgacaccatcgaggtctcctgcaacttcactcatggtggacagacgtgtctcaagcccatcacggcctccaaggtacccatcagctcccacactgcccaccaggctgtctgcctctatccccagcctgccctgggccacaaccaacccaggttctgttctgagctgtgcctgtcttactgcatgcccttgggaaagttatcgcctccttccgagactcagtttccttatctataaattgggagtgagtaggactaatttgtaaccacaaaccctttcgagtcatatgatgctgatgattctttcttcaaatagaatcttctgcctaatatctaaagcagagcagttggccaagctggcctggcttgtggaactatgaatcatcagcatgaaataaaagagaaaactagcatgatgctcatctgaagcatgttgtgtgaattatgtatgcgaatacttaactcatgttcaatgcctgcgtaccacgtgcctgtttctgggttgagcattttaggtggtacagggccactcaacaacaaaccaaggcaggtggcagcatgagacctgacagctccctcgcccagggatcctcagtggattgtgggtctgtagttccactaagccttccgaatttgggggcaatttatgccacagtgagaagctgctccgactgcgggggaaaggaaccctcccatttcatcagccacatcccctaggagatgccttgtgctgactgggtcagactggcagtttgagaatctctaggagaggcagccagccagtagccaggtctttgttgggtccctatcatgtgccaggccctgagccaggacggggaggtcagactcgaaactcccctgcggccagagctcacagtccagcagggacttggtgacctccacaggctctcttccctggtgactcgaaggttttgggatcacgcagcaaacctgcctagcagaggggtgaggctggagttggcgcctgggttggtggcatgaatgcccaactgggtcaccttctccatcagaaacaatggcagggagaggccctggctctgtgtgggaaagtgctgaagccacaaatcctgccgtgttgtttgctctcaggtctgccatttccggcagcaccccatcgcacctcacagggatcttgggacttaggaagggtctcgaaaacacctctcatttcctctgcattccatgagcctcttagtcttgggcaaaaccctctccctcgctgagctcctggatcctagctcagcccaaagaccccccatacagtaagggagtggatcagatggcaccaagatctttgaagctctggctctggagtcaggcaggcccttcccacttacgcagccaagaacctgtaagaccagctcacgcagacctcagtttccccgtctatcaagtgggcacatgtctgggagcatatcaggaaatgcttgccaggaaggggcctatccctgttccctccatagagaggcagggaaccctcggtgtggggggtgtggggggcagcctgagccgctcactgccgttgcttctctataggtcgagtttgccatcagccgggtccagatgaatttcctgcacctgctaagctccgaggtgacccagcacatcaccatccactgccttaacatgaccgtgtggcaggagggcactgggcagaccccagccaagcaggccgtacgcttccgggcctggaatggacagatttttgaagctgggggtcagttccggcccgaggtgtccatggatggctgcaaggtaactctcagagcccctcctaggcccttcatgtggggacaactggaaaaacacttgtttggaaaaatgtgtttctattataagattatatctaacattttaatagtatactatattaatgtgatagatatgatttcatctttgtgtaatataacagttttctaaaatcgtttttactcactttcctctctgggaagctatgaggggaggtctgggctggtaaaaattctttgggctagtagatgttgtacttacttgcaaggctctttcaaagaagatacatttcttcttcctgctcccaccctagtcaggctaatttcttctcattatattttttggtcattttcaaatgtcctgaacagggtgggttgtcaggggaggggaagacagaaagttgagaaaaggcaaaaatcagttttataagactaaacaaaactaataatactacacagtgttcatgaggatgtggggaaaccaacaatctcgcatgaagctgttggaagaaaataaattggtagaggctttctggatagcagctctaatatatatccaaaaccttagaaatgtacttattttcaggggagctaagctatgaagacacaaaggcataagaatggtacaacggaatttgaggacttagggaaaagggtgggagaggggtgagaggtaaaagactacacattgggtaccgtgtacactaaagaacttattcatgtacccaaaccccacctgttccccaaaaacttattgaaaaaataaattaaaaaatatatatatatgtatatgagatgtacttgttttttggtctagcaatctagaacaatccttctagaatttgttctagggaaataagaatgcacacaaaggtttagttacagtgatgttcatgacagcattccttacaagaataaaaagagtggaagcaatctaaatgtgccatataggtcattgctacaatgaaatacagtatagccattaaaaattgtgaggaaagatggaagggaaaatgctcatgatgtatgataagaatcacgatggatgtacgtgtgcacttttccttctgccttcaggtccaagatggccgctggcatcagacactcttcaccttccggacccaagacccccaacagctgcccatcatcagtgtggacaacctccctcctgcctcatcagggaagcagtaccgcctggaagttggacctgcgtgcttcctctgacctctgacctcgtggccactctaggcctcacggaggagggaagaggaagaggcaaggggagggtactgaggggcagatggctccaggagaggcagctcccctgcccaagggtccttgggcagaccccagctgttgtctgcccagtagaagtgggtgggggtaggaggggatagggtgtccttgggaacaatggatcccagcttagccccaaagaccaaccaaagagccagccagagtaagctggacctgcaacctgcctgagccccgtggcctctcagctctgcggccaccccgttccctccccagcttcctgcccaaagagccccacattcaagccaacttgagggaagggggcgtctcgtcagctggtccctgctagggagctattgatgtgcaatattagaaaggagacatgaaaaaaggagaaaaggaaagacagaagtgtatatatatattatttaaacaaacaaaaagaaggtgcgttactatttttttttcacccgggaaagaggtgagaggatgggaaggagcagccaggcgtgggaagcggcgagatcctcgggctgggggtgcccacgtttgctacctcccactgtgaaatcgctggtgctcacaattgtctctcacagtgtatgtgtttttttaaggaaaaaaaaaaatccctatttagattctgaaggtgctaccattattttgccacagactttgaagaaacttttggatgtggggcatcatccgcatctttctctctcctccaaatgacaaagtttggggaatttttgaattttcctagcatcgcccttgtgctcatcaggtaatctgctaaggaggaaaaaagaaaagaaaaaaggaaaaaaaaaaaaaaaaagcaaaacaaaaacaaaaacaaaaaccctaccagaaaccagaagtagagagatttaccatataacttatggactttgaaatgtctgtccttttaaggcagcagggaggcctgggtgcgaagcatgttggcttggcccttcacggtcctggagggaggtgaggctggccttggaaggcgtgccctggagaggtcttgggtgaaaacttgaccttgaagaaaccaatcacaaaagcggcgttgggtcagggctaggcttagaggtgaagcatcaacatggaaccatctcaggaagccgcatcgcctcttccgaggtcctcacttccaggagcctgtccttgcaagatgcaatcatcgttcctgctttttcattgtcattaaattctgtagaaacccattgtcattagctccaagtgtaaatttgggtcaaggagacagaataataatgggaatctcggagttggacaccatacgtgacgttcagcgtcctctccattgtgttacatcagcgaacaagtcggcgcttgaattgatttgaggtctatttgtacc

SEQ ID NO: 5913 - DNA, 493 bp, Homo sapiens
ggaagctgaggcttaagggagaattctggccagggtaaccctgaatggccggctgtttagcatctgtggtcccctcctgccccctagtggagatctgctccttctctgagctgaagtcctcctcccagcacttgtgcctgctggccccagtcccgtctcctggtgcctcacagagaccctggctcccaccctaggggagcccagtgggggctgtgtgacccccaagtcagctccccccagcacctccccttcctccacaggctctttgcagatagagattgggccgctgccgagtgtcccacgcaccctcgcctacctcattcacggggctctgcctgtcccatatcagagaacatggtctgaccctgagctcttttcaagcctctgagccattgtgatagcctctcctcctgcactttgtccctggcccgttttcttgtctgcaaaataaagagaaacccaacccgtgctctagccatgaccgtggaaccga

SEQ ID NO: 5914 - DNA, 611 bp, Homo sapiens
gactgatagcacttctaggttcctccctaataatcagacatccaaatctgtaccaatgaatgtctttgatctatcttaataaaagagttgggttgggtggggggaaggaataaattaggcattccttacgcagttggatagatcagtttccaatctatggaattcctgggggaaaagagggccttagggatagtaacagctaacaattgctaacagccttctatgttctaggtgttattctattttatatttattaactctgggttactttctaaaaccctacgggacaggttttattaatatacatatttaatggacgaggctacattgctggtaggtagcagagccaaggtttcaagcccaggcagtttgatttctgggttcataattactttattggtaataactattttgttaatagtagttaatacttatcaagtatttactatgtccaaggcacagcactatgtaacttaccttgtttaatgtttaaataaggtctatcaattagggttttcagataagtaaaatctgaccaatgacacccagttaataagagaagaagcagggattcaaatctgggcctatttgaccccaaagcttgtgtttta

SEQ ID NO: 5915 - DNA, 611 bp, Homo sapiens; identical to SEQ ID NO: 5914

SEQ ID NO: 5916 - DNA, 845 bp, Homo sapiens
cccgtcgttttacaacgtcgagactgggaaaaccctggcgttacccaacttaatcgccttgcagcacatccccctttcgccagctggcgtaatagcgaagaggcccgcaccgatcgcccttcccaacagttgcgcagcctgaatggcgaatggcgcctgatgcggtattttctccttacgcatctgtgcgggatttcacaccgcatatggtgcactctcagtacaatctgctctgatgccgcatagttaagccagccccgacacccgccaacacccgctgacgcgccctgacgggcttgtctgctcccggcatccgcttacagacaagctgtgaccgtctccgggagctgcatgtgtcagaggttttcaccgtcatcaccgaaacgcgcgagacgaaagggcctcgtgatacgcctatttttataggttaatgtcatgataataatgggttcttagacgtcaggtggcacttttcggggaaatgtgcgcggaacccctatttgtttatttttctaaatacattcaaatatgtatccgctcatgagacaataaccctgataaatgcttcaataatattgaaaaaggaagagtatgagtattcaacatttccgtgtcgcccttattcccttttttgcggcattttgccttcctgtttttgctcacccagaaacgctggtgaaagtaaaagatgctgaagatcagttgggtgcacgagtgggttacatcgaactggatctcaacagcggtaagatccttgagagttttcgccccgaagaacgttttccaatgatgagcacttttaaagttctgctatgtggcgcggtattatcccgtattgacgccgg

SEQ ID NO: 5917 - DNA, 776 bp, Homo sapiens
  SITE (709): n equals a,t,g, or c
  SITE (738): n equals a,t,g, or c
tacaacgtcgtgactgggaaaaccctggcgttacccaacttaatcgccttgcagcacatccccctttcgccagctggcgtaatagcgaagaggcccgcaccgatcgcccttcccaacagttgcgcagcctgaatggcgaatggcgcctgatgcggtattttctccttacgcatctgtgcggtatttcacaccgcatatggtgcactctcagtacaatctgctctgatgccgcatagttaagccagccccgacacccgccaacacccgctgacgcgccctgacgggcttgactgctcccggcatccgcttacagacaagctgtgaccgtctccgggagctgcatgtgtcagaggttttcaccgtcatcaccgaaacgcgcgagacgaaagggcctcgtgatacgcctatttttataggttaatgtcatgataataatggtttcttagacgtcaggtggcacttttcggggaaatgtgcgcggaacccctatttgtttatttttctaaatacattcaaatatgtatccgctcatgagacaataaccctgataaatgcttcaataatattgccaaaggaagagtatgagtattcaacatttccgtgtcgcccttattccctttattgcggcattgagcctgtctgtttttgctcacccagaaacgctggtgaaagtaaaagatgctgaagatcagttgggtgcacgagtggngtacatcgaactggatctcaacagcggtnagatcctcgagaggtttcgcccccgaagaacgtttttc

SEQ ID NO: 5918 - DNA, 150 bp, Homo sapiens
cgtcgtgactgggaaaaccctggcgttacccaacttaatcgccttgcagcacatccccctttcgccagctggcgtaatagcgaagaggcccgcaccgatcgcccttcccaacagttgcgcagcctgaatggcgaatggcgcctgatgcgg

SEQ ID NO: 5919 - DNA, 1824 bp, Homo sapiens
ctgaggcccacacgtcattctgatgcccctacaagaaaagaaacacagtgagaaaactaaaccacttcctggcatattggagtttaccatgatgtgtccctgggctttttctgatgcctaagcagggtttgttatccagatgatttctggcaagatttctggcaaaatgcagaggcccaaatggcaggcctctggatgccacgggctctgacttaagggtggctgaatattgttgccctaagacacgttctcttcactaggccttttcctctagaaagcctaagcaaccagacatggttctgagtgggcctatggccacgtggccctggcccggcagtgacctgtggctctccccctgccctttaccccaccaccgcctccccccctcccccgcccgctgtgccccacagatgtgtctgggaagctgaggatctgggataccacgcagaaggagcacctgttgaagtatgagtaccagcctttcgctgggaagatcaaagacattgcttggactgaagacagtaagaggatcgccgtggtcggggaaggaagggagaagtgagtcactcctctcagcccctccctgccctgttgctgtggctcatgcgtccatgtgctatgaccctgggagggggatgcgctgatgtctgtactaacttgcactcgtgagggttgagctcccagtaggtgccgggccccgtgagggctggctgcagccccaggtaaggtagaactccacatcacactgggtttgtcaccagggcccagcactcatgtatctcctctgacgtcctgagtgccttgcctgctagaaccccagctctcatgcccacctgcaggcagcaagaaggggacagagtgaaagagcaacagcacttctattcggggtccctcacagcagctgccccatgaagctgccagggaggctgaactgtttcttccagctgggcacctcccccaagggtctctgatggaggagggaggggcagtggatgctggctgggtggcactgggtggctactgacctcaggggcctagtgactggtgaggttggtgccgaaacccaggtttttttaattcaagagagtcagagtcccccctgcagcaccatggctggccataaccccttgaacttgacagtggcatgtctgttcttcactgaatggcactttctcgtacatgttctagtaggtgtttttccatggcttctcaagtcattcctgttggtcttaattccttcttttttcagtagcaaatagtaactaaaacagtgtttttgttgaatgtcagccaagagcagggcatctcattcctgtaggggatggtaactgttccctcccaatagaactgtaaggagaatggtgaagctgtaaagatagccctgggccctgtggcgtggggccccacagacacacacatgcatccccttcccgaaggcgccggcttgccccatcttgttcttgggtcctttggacaaatgccttgtggagccagaaccccagtgcttccctcatttgtccctgtggcgttctgagctgcctgctgacagtcactccatcctctgtgcactggcagctcagctatcagattgcttaccagccttctgggattgattttttttttttttttttgtcttccacctgtgtcattgggtcaaggtttggagcagtcttcctctgggatagtggctcttctgtgggcgagattacaggacacaacaaagtcatcaacagcgtggacatcaagcagagccggccataccggctggccacgggaagcgatgataactgcgcggcattctttgagggacccccattcaagttc

SEQ ID NO: 5920 - DNA, 316 bp, Homo sapiens
gtgggacgccctctgccttgtcctgagagcaatgtcttctccatggggcagcatgggccctggatgggcctgagcatagcagaccacgtggtcacatgtgcatgtgtggacatgtgtgcatgtgtggatatgtatgctcctgagtgtatctgcatgtccttcctgcacacacagtgctcccctccgatgctgccagcctgtggtgacttcctcttctgaccccttcttcccccccggcctgttttatcagtgaaaggacttaactaagcagatctccaggtcacctttggaactcagctcaggtagcacagcaggt

SEQ ID NO: 5921 - DNA, 726 bp, Homo sapiens
tgggtgccgggcaggtgaggaggggccctggctcttgcgagattccaccgcgggtacgcggcggcccccgatgtgacaccgacggtgctgggggtaaggggggtgttgggggtgcagagtgtggcccaaaagtgtgccctaaaggcagatcagatatggtgcccaagttaaagactctagtctgacctttctaccacctgcatgcctacctaggtatggcctaaaggcgggagaaatgtgtgcctttgcagaacaggtggctctgagacctctgaaagaggtgacttacacttaagattttcacaactcgtgggcgtgaattttcattaaaaagcctcacttactagtgaaggatcgtatatatgtaataaaacaggtctaagaggtatacaattctaaggtaaaaataattacatatatattaaaataccccatttctttttaaaggtcttataaaaatttagtaagttaatgttctatatttcactcacgcaacaactacaatatttattgagcacttactatgtgccaggcactgagctaggcacaaaaaatacctgggtgacttcatatttcttggtgggatccacaggaaaaaaaaatgtagagatttgttggggcctattacatctaaggctgtgtttaatattttaaaaatcagcttcccatttttgttacaatatttaataagtttaaatatataaccattcggcatattacagtaaa

SEQ ID NO: 5922 - DNA, 103 bp, Homo sapiens
tttttatggctgcatagtattccatggtgtatatgtactacattttctttatccagtctatcactgatgggcatttgggttggttccatgtcttcgctattgt

SEQ ID NO: 5923 - DNA, 675 bp, Homo sapiens
aattttttaaacttttttgtagagaagaggtctcacactattgcccaggctggtctcaaactcccgagctcaagcaatcctcctgcctcggtctcccaaagtgttaggattacaggcgtgagccactgcactcggcctccttcaagtatttttaaattaatgtctttttttctgttcaaatttagtgtacatgttccccccaagagttgtaatgaaactaaaactgtcttttgcttttgatgcctttgttcaatatgaaaagcctgaataaatggctggatgtcttcatcttcaaatttaaaaaatgattcaagtatatattattgagttttattagaatggaaagctcttaatttcttgattgtaatagcagtcatgcaagtcacaaatcatgataaaagttaattttgtcaagtgcttttctatatcttgtttgactttaatatttttgttttacataggtctctaattaacagaagatggcaaagcccagccacagcagctatgtccttcagcagctaaacaaccaaagagaatggggttttctctgtgactgctgtattgcaattgatgacatttactttcaagcacacaaggcagttctagctgcctgtagctcctattttagaatgtttttcatgaaccatcagcatagtactgcacaactgaatctca

SEQ ID NO: 5924 - DNA, 10901 bp, Homo sapiens
ttttagacttttaaaatactctgtaatcctcaaatccatatgcatacatacattcaacctataagacatagaaataggtaaaaggaaacatatatacataaatcttccttgagatccagaggtaattgtaagtcagagattggggtgctgaattgggactgtgatgctaggctctctagactttcactgaggctaagcgaatcatcttcaaatgcctcattggtgctgcaagtctgtgacacaatttagagggtgattatttgcctcacagaaacactttaaaattcctttaagttacttctttattcattggatatgcttatttatagacccttaaattatcatttaccaaggctggagcaagagaaacttccagcaaaactgttatttccaatttgagagatctagcaatggaggaaaaatatttctgaaatcttactatgtcagtgagaaatttactgaaatagcttacacagtataacttagggaacacatctattgaataagactagattgacatgtatggataaagccacattacagataaagaattcagattggggtaatcacttgctcaatagcatccaaccaacaaaccctgtattaaggactcatgccctgtccttgtttagtgttctttccggaagaccatactgtatagtaccaaggaagtgccatatatagaggttattactatctgggtggtcaggagtccttagtcctagtatgtgcttcagcacagttaactataccctgatacattaaaaaccatgtatctttgccttctatggaataagaatgttagactagattagatctctctaagctctaaaaatgtatgattaaattacttaatatgcttaatgtgcttggtgactgtttttaaacttgagatgagccgttaaactttttcagactaaaattttaaaaatccagtataaaactttttggatcacctaactccttaattcttgctagagttctgcacagtgggtatccttctagccttagtgtaactcttggcattatatagcttgttttccttatccaaatgacattaagtcctttgagtcacattggaggttctgctctcagacctgagcccttgacttctagttgtgctaaacttgtcctaccagtgatgcagctagtagtacaaacaaaagcaatcacagatttcagtcgtaaaaacaagaacagctgaaatacaagctgtccatttacttaaaaccttttataggctttactagaacataaagttcattaactttttttggcagcattaataaagaggtcaaaaaaatgaaaaaagagcaaactcctcttggaatttgagtgaaattataatttaatgaaagtgaatgcctcataattttttttttttttttttgagatggagtcttgctctgtcgcccaggctggagtgcagtggcacagtcttggctcactgtaagctccgcctcccgagttcccgccattctcccgcctcagcctcccaagtagctgggaatacaggtgcctgccaccacgcccggctaattttttgtatttttagtagagacagggtttcactgtgttagccaggatggctcgatttcctgaccttgtgatccacccgcctccgcctcccaaagtgctgggattacaggcgtgagccacggtgcccggcctcaaaaatttttaatgaaaaaattatcttcaagagataagctaaaagtctcacaggaatttagatccctcctcccctgccgcatactcctctacctgtttttggtgtagtaatccttcttaaagcttttctgggctaggcacagtggtttatacctgtaatctcagcactttgggaggctgaggtgggaggattgcttgagcccaggaattcgagaccagcctgggcaacatagcaagacctcatcactacaaaaaatatacaaaaattagccagtcatggtggcgtatgcctgtagtgctagctattcagaaggtgtgaggtggaaggattgcttggagaatgagtacccatattaaagcaggaacagaatgctattgaggacattctgagctatgatggcatgccagcctgggtaacagagtaagaccctgtctcaaaaaaataataattaaaatttaagaaaaaagcttttctgaatgaggtgtaacaaggacagagtttctggtactaatgtgtcaatgattgctattataagttactgtgcctaaaatcagttttactcagaacttggacatttgcataataatgttacttaaactacaattctaggtcagcctaaaaactgttgtgttaggattaaaaattagacacagcatttgttcagcttccatttgttcagcttccagctctatagggggaatataggagtataaacatggatgcagtgggattcacactgtgatccgtctgactgagagcacttgttctttctactacagcatgatgccttcttctgtagagtgggcgctttgcagaatacgtgttgaatgaaatcactgatctaggaaaagtaaaaattcctcaaatgaatacagaatacttgtgctactgctgatgatcaacactttatacagtgcctggtataccaaaggtagtcagtaaatgtttgttgaatgaataaatgtgcattaaaatgctataagtgctcttatttaaatgttttagtgttttatgttaataaaagaatatgtatttttactcagttgaattgtgactatagctatagatgtgcctatcatattgatcttctatgtagttgtattaattttggttgctgatgataaaactgctgctcatctagataagaaagggtctttggaacttctgtgctctttatatcattatttcaagcctggactatttaatacttgaaagtttttatagattaactactggctttctaatggactgttatttggaaggaaattttaaggttatcaactcaaacttacctgatgcttaaataagcatcaccaccattacaacatccactattactttcattattacatgccaagcacgatgcattttacacattgcctctgtgaatcctcatatatgatactgtatttgaggtattatccctaccttttcagttcaggaaacttagggtcaatgaggataagcaagttcccaaaagtggcaaagctagataagaagccaggtctgtctgatcctaggcccatgctcttttcacttattatactgtcctcaatagcattctgttcctgctttaatatgggtactcattctccaaacaagtttgtttcattcttgaattactcttattaatagaaagtttggttttttagaaataatacctatccctctgcctcttactctatagtttattatttattaaatgtctctctgaatcctagaaaaatgactatagacatagaaatttcatcctacttaaaacgggcttgggtcaacatttttgtgtatttttttcatcttttttccccccaccttttgaataaggttgtggcgtggatttgttttatataattctaacataattatgtatcctgtgtttatttatttggctctccatcttgaacatttttcccacttctgtagttgccatttagaaatatatatatatatatatatatatattttttttttttttttttttttgagacagtcttgctctgtcagccaggctggagtacagtggcatgatctcgactcactgcaacctccctcagccaggctggagtacagtggcatgatctcggctcactgcaacctccctctcccaggcgcaagcaattctcttgcctcagcctcccgagtagctgggtttacaggcatgtgccaccacgcccggctaatttttatatattttttagtagagatggggtttcaccatgttggccaggctgatcttgaactcctgacctcaggtaatccgcccaccttggcctcccaaagtgctgggattacaggcatgagccactgcgcctggcccagaaatacaatttttaattcactgccacatgacagtgaattctggggcgtagatttaccttaagactcctttttttactaggcattcaaatgagaagtaactcattaatgactatctttgtgcatacattgctttttgtatttagatacatactgaacatgattcctcacagctttttacagatacctgagttacagaggtttgaaatattgtacttacttgaaacttgatctggcttccagaaaaggtgcagtggttgcaattttaagaaggcagcaggtttcatcataagccatcttcatttcaccagtcctgtatctctggctatggaactttatgtcttagaggtggcaggatgggcatataggtagtaaaaggggcgtatgacccatatgtgatcgctgaggaatggataaaaagcaaatagaagtacgtaaacgtagatacccttaattactactacagagcttgaagagtgaacattttatttctctaaacagcttgttacatgttctttttaagttcagtcaaattgcataggaacttatttttaagtagaagatagattctgaagctttatgtatacggattaaaaattgaggctaaaatttgatcttattttaactttataatatgataggatttctagtgcttttaatacttcctctcctttcttccttatccaaagtcagctccctacactaaaaatacttaaatgcccactaatattgtctaatgttaaatgaagaaaactagttgcagagaggtatatatatatatatatatatatatatatatagtatgataccatttaggttaaaaaacacaacaaaagcaaaactatgtgcctggcatctcataggtactcaatatgctaactatgtacatgtgcatctcaacaaatctgaaggtatataatccagagtgtttggaggggttacctctgaaaagaggtgtgtgatctgaggtgtgtttttattctatatgcctctatgtttgaattttttgctacttttttttttttttttgagatggagtctcgttcttgtcacccaggctggagtgtagtggcacaatctctgctccctgcaacctccgccttctgggttcaagcgattctcccgcctcagcctcccgagtagctgggattacaggcgcccgctatcacgactggctaactttttttatttttagtagagacaggttttcaccgtgttggccaggctggtctcgaactcctgacctcagcctcacccttccaaagtgctgggattacaggcatgagccaccgcgctcagccttacttttttcttttaacaattaaaaaaaaaaaaaaatagaagaggccaggtgcagtggctcacacccacaatcccagcactttggaagcccgaggcaggaggatcgcttgaactcaggagttcaagaccagcctggacaacatagcaagaccttgtctttactaaaatattaaaaaaaaaaaaacaaaaaaaaactgaatgtggtggcatgtgcctacagtcccagctactctggatgctgtggcgggaggattgcttgagcatgggagattgaggctgcagttagctatgatcatgccactgcactccagcctaggtaacagagcgagaccctgcctcaaaaaaaaaaaaaggaagaaaactttacactctaaggataaataaaataccttctcaaataaacccactgcttctttataccctgaaatgcatgttgagcaacatgagacacattctaactctatagaattattgcttctttgataattcaagaaaagacaaaggcactgatcaaacttgtttggtgccatttctatataatctaataaggttgttgttgttgttgttgttgttgttgttttgaaacggagtctcgctctgtcgcccaggctggagtgcagtggtgcgatctcggctcactgcaagctccgcctcccaggttcatgccagtctcccgcctcagcctcctgagtagctgggaatacaggcgcccaccaccacgcctggctaattttttttgtatttttagtagagacaaggtttcactgtgttagccaggatggtttcgatctcctgacctcgtgatccgcccgcctcggcctcccaaagtgctgggattacaggtgtgagccaccacacccagccctaataaggtttttttaaatttttatttttgggatagagtctcactctgtcacacaagctagagtacagtggcgtgatcatggctcaccacaacctcaaaatcctgggctcaagccatcctcctgcatcagtctcccgagtagttgggactgcaggtgcatcatcatgcctggctaatgtttttttgttttgttttgttttgtttttaaggcgagatcttgctatgttgcccaggcttaatagggtttttaaaatagattattttaacaacacatggccaatcttgtatcatctattgctccccacacccaccccatttatttttaagcatatctcagatgtatcatttcatctgtaaatactaaagtatatatatccaaaagataaggattctttttaacacaatcaaaatacctttctcacacttaaaaaatgagcaatagctccttagtattaatcatttaataagtttttcatactttacaatctaattgttaactttcagtttaagttgctgttttatttactttcattactcatatccttcaagagttgttttctttttttttttttcttttgagacagagtcttgctctgtcatccagactggagtgcagtggcgtgacgcaactcactacagcctctacctgtcgggctcaagtgatccacccactttagcctcccaagtaactgggactacaggtgatgccaccacacctggttaattttttaaacttttttgtagagaagaggtctcacactattgcccaggctggtctcaaactcccgagctcaagcaatcctcctgcctcggtctcccaaagtgttaggattacaggcgtgagccactgcactcggcctccttcaagtatttttaaattaatgtctttttttctgttcaaatttagtgtacatgttccccccaagagttgtaatgaaactaaaactgtcttttgcttttgatgcctttgttcaatatgaaaagcctgaataaatggctggatgtcttcatcttcaaatttaaaaaatgattcaagtatatattattgagttttattagaatggaaagctcttaatttcttgattgtaatagcagtcatgcaagtcacaaatcatgataaaagttaattttgtcaagtgcttttctatatcttgtttgactttaatatttttgttttacataggtctctaattaacagaagatggcaaagcccagccacagcagctatgtccttcagcagctaaacaaccaaagagaatggggttttctctgtgactgctgtattgcaattgatgacatttactttcaagcacacaaggcagttctagctgcctgtagctcctattttagaatgtttttcatgaaccatcagcatagtactgcacaactgaatctcagcaacatgaaaattagtgcagaatgttttgatctcattttgcagtttatgtatttaggaaaaattatgacagctccctccagttttgagcagtttaaagtggcaatgaactacctacagctatacaatgttcctgactgtttagaagacatccaggatgcagattgttctagttcaaaatgttcctcttctgcttccagcaaacagaacagcaaaatgatatttggggtaagaatgtatgaagatactgtggctcgaaatggcaatgaagccaacaggtggtgtgcagagccaagttcaacggtaaatacaccacataatagagaggctgatgaagagtctttacaattaggtaattttcctgagccactatttgatgtatgtaaaaaaagttccgtgtccaaattatctactccaaaagaacgtgtgtcaagacgctttgggcggagttttacctgtgatagctgtggatttggctttagctgtgaaaaattattagatgagcatgtgctaacctgtactaacagacatttataccaaaacacaagatcttaccatagaatagtagatattagagatggaaaagacagtaacatcaaagctgaatttggtgaaaaagattcttccaaaacattttctgcacagacggacaaatacagaggagacacaagccaggctgctgatgattcagcttcaaccactggaagcagaaaaagtagcacagtggagtctgaaatagcaagcgaagagaaaagcagagctgctgagaggaaaaggattattattaagatggagccagaagatattcctacagatgaactgaaagactttaacattattaaagttactgataaagactgtaatgaatccactgacaatgatgaattagaagatgaacctgaagagccattttatagatactatgttgaagaagatgtcagcataaaaaaaagtggtaggaaaactctaaaacctcgaatgtcagtaagtgctgatgaaagaggtggtttagagaatatgaggccccctaacaacagcagtccagtacaagaggatgctgaaaatgcatcttgtgagctgtgtggacttacaataaccgaggaggacctgtcatctcattacttagccaaacacattgaaaatatctgtgcatgtggtaaatgtggacaaatacttgtaaagggtaggcagcttcaggaacatgctcaacgatgtggcgagccccaagatctgaccatgaatgggttaggaaatactgaggagaaaatggacttggaagagaatcctgatgagcagtccgaaataagagatatgtttgttgaaatgctggatgattttagggacaatcattaccagataaacagtatccaaaaaaagcagttatttaaacattctgcctgcccttttcgatgtcctaattgtggccagcgttttgaaactgaaaatctagtggttgaacatatgtctagctgcttagatcaagatatgtttaagagtgccatcatggaagaaaatgaaagagatcacagacgaaagcatttttgtaatctgtgtggaaaaggattttatcagcggtgtcacttaagagaacactatactgttcatactaaggaaaaacagtttgtttgtcaaacatgtggaaagcagtttttaagagagcgtcagttgcgactgcacaatgatatgcacaaaggcatggccaggtatgtctgttccatttgtgatcaaggaaacttcagaaaacatgaccatgtacggcatatgatttctcatttatctgctggtgagactatatgccaggtctgctttcagatattcccaaataatgaacagttggagcagcacatggatgttcatctgtatacatgtggaatatgtggagcaaaatttaatttgaggaaagatatgagatcacattataatgccaagcatttgaaaagaacctgagtgattttctactgtactaatgtttagatgatagcagataaaacaccaaagcaaaggatatgagctatttaggaattgattatataagatgatttgttagaaacaaatttcaaggcccttttaactttaatatttttgtttaggattttaagtatctacatttaggtattaaatgtttatcatttttgttgtttcttaatagaattatttgtttttagtttttcttagctatgattaaaatttttaaatgtagactacaagtggttgttacccattcaatgactattaaactttagtttttcatcaataaggtgatgacttcactatttctatgtgtttttttttttttaaggttatcctgtgaaattttaaacccagaatcattggccatttctgtttaaattttaaaaattccttaagtaattatttgaaactatcccgtttgcttttagtgagttaactactctttattcccccttattaatgaaattcatattcttaaattgacaagcttattaggcaagttaggtgcactgaatctaacctttaaggttgacatgggctcaaacttggcctaaaaagattgatgaacctgaggaaatttttataaatgaatatttcctataattgataaaatattatcatttaattatcacatttaaaacttatattaagtgtaaattccagtggctttacctcacttgaaaaattagtggggataagccattttgttttgtgatattaaatttaactatgatagttaattaaaaagacatatcttgtattcattaaaaatattttaatttaaaatattctgatttctaaagtgtgttagcttatcaattatttttgtttataaatagactttaatagctctctaagaatatgacctctaaaggaaaagatgattttttacaatacatacttctggaactttgagatttgagaaagcttccatgtatattgataaatctaataaaataaagagatcaattataaacctggttgttctataaaagtagagtgcacaaaaaaatgtcttgtgttttatactgtctaagatttggaggaaatgtggcaaattgcagtttatcgccatattttattatcatttttttctgtaaaagactataaaacttgaggattataaaataatcacagagtatatcaatggaaacagtttatcattttttcagttaaagtagtagtattgttagttgttgctgacacagggtctacataattacatgtgaattaaaacattggcaaaactgacccaccaataaacacatctattgaatagaatgccttttaatgtgaattacttgcaatgtagtacccttttcataatgaaagggattttaattaactcctaattttaaaaatataaatttgtgattctg

SEQ ID NO: 5925 - DNA, 3169 bp, Homo sapiens
gttcctcttctgcttccagcaaacagaacagcaaaatgatatttggggtaagaatgtatgaagatactgtggctcgaaatggcaatgaagccaacaggtggtgtgcagagccaagttcaacggtaaatacaccacataatagagaggctgatgaagagtctttacaattaggtaattttcctgagccactatttgatgtatgtaaaaaaagttccgtgtccaaattatctactccaaaagaacgtgtgtcaagacgctttgggcggagttttacctgtgatagctgtggatttggctttagctgtgaaaaattattagatgagcatgtgctaacctgtactaacagacatttataccaaaacacaagatcttaccatagaatagtagatattagagatggaaaagacagtaacatcaaagctgaatttggtgaaaaagattcttccaaaacattttctgcacagacggacaaatacagaggagacacaagccaggctgctgatgattcagcttcaaccactggaagcagaaaaagtagcacagtggagtctgaaatagcaagcgaagagaaaagcagagctgctgagaggaaaaggattattattaagatggagccagaagatattcctacagatgaactgaaagactttaacattattaaagttactgataaagactgtaatgaatccactgacaatgatgaattagaagatgaacctgaagagccattttatagatactatgttgaagaagatgtcagcataaaaaaaagtggtaggaaaactctaaaacctcgaatgtcagtaagtgctgatgaaagaggtggtttagagaatatgaggccccctaacaacagcagtccagtacaagaggatgctgaaaatgcatcttgtgagctgtgtggacttacaataaccgaggaggacctgtcatctcattacttagccaaacacattgaaaatatctgtgcatgtggtaaatgtggacaaatacttgtaaagggtaggcagcttcaggaacatgctcaacgatgtggcgagccccaagatctgaccatgaatgggttaggaaatactgaggagaaaatggacttggaagagaatcctgatgagcagtccgaaataagagatatgtttgttgaaatgctggatgattttagggacaatcattaccagataaacagtatccaaaaaaagcagttatttaaacattctgcctgcccttttcgatgtcctaattgtggccagcgttttgaaactgaaaatctagtggttgaacatatgtctagctgcttagatcaagatatgtttaagagtgccatcatggaagaaaatgaaagagatcacagacgaaagcatttttgtaatctgtgtggaaaaggattttatcagcggtgtcacttaagagaacactatactgttcatactaaggaaaaacagtttgtttgtcaaacatgtggaaagcagtttttaagagagcgtcagttgcgactgcacaatgatatgcacaaaggcatggccaggtatgtctgttccatttgtgatcaaggaaacttcagaaaacatgaccatgtacggcatatgatttctcatttatctgctggtgagactatatgccaggtctgctttcagatattcccaaataatgaacagttggagcagcacatggatgttcatctgtatacatgtggaatatgtggagcaaaatttaatttgaggaaagatatgagatcacattataatgccaagcatttgaaaagaacctgagtgattttctactgtactaatgtttagatgatagcagataaaacaccaaagcaaaggatatgagctatttaggaattgattatataagatgatttgttagaaacaaatttcaaggcccttttaactttaatatttttgtttaggattttaagtatctacatttaggtattaaatgtttatcatttttgttgtttcttaatagaattatttgtttttagtttttcttagctatgattaaaatttttaaatgtagactacaagtggttgttacccattcaatgactattaaactttagtttttcatcaataaggtgatgacttcactatttctatgtgtttttttttttttaaggttatcctgtgaaattttaaacccagaatcattggccatttctgtttaaattttaaaaattccttaagtaattatttgaaactatcccgtttgcttttagtgagttaactactctttattcccccttattaatgaaattcatattcttaaattgacaagcttattaggcaagttaggtgcactgaatctaacctttaaggttgacatgggctcaaacttggcctaaaaagattgatgaacctgaggaaatttttataaatgaatatttcctataattgataaaatattatcatttaattatcacatttaaaacttatattaagtgtaaattccagtggctttacctcacttgaaaaattagtggggataagccattttgttttgtgatattaaatttaactatgatagttaattaaaaagacatatcttgtattcattaaaaatattttaatttaaaatattctgatttctaaagtgtgttagcttatcaattatttttgtttataaatagactttaatagctctctaagaatatgacctctaaaggaaaagatgattttttacaatacatacttctggaactttgagatttgagaaagcttccatgtatattgataaatctaataaaataaagagatcaattataaacctggttgttctataaaagtagagtgcacaaaaaaatgtcttgtgttttatactgtctaagatttggaggaaatgtggcaaattgcagtttatcgccatattttattatcatttttttctgtaaaagactataaaacttgaggattataaaataatcacagagtatatcaatggaaacagtttatcattttttcagttaaagtagtagtattgttagttgttgctgacacagggtctacataattacatgtgaattaaaacattggcaaaactgacccaccaataaacacatctattgaatagaatgccttttaatgtgaattacttgcaatgtagtacccttttcataatgaaagggattttaattaactcctaattttaaaaatataaatttgtgattctg

SEQ ID NO: 5926 - DNA, 165 bp, Homo sapiens
tagctacagggaagcacaggcttctctagagtggaatgtacaattcttatcaaggcaaaaagttaaagactacttgctttttaaaattagggagaatgaaaaatatccagcacttttccccagcccagttccctaatatctccttcctctcctggggcagagctg

SEQ ID NO: 5927 - DNA, 1175 bp, Homo sapiens
tcgatttacaagcacttattttattttacttcatttcacatgcacgtctgttttacgcagttacttgtttacacgctcttcttctagactttgggattccagaagacagaggtttgagtgtaaaacacaaaataacaaaaccacaacaaaaacaactctgtattctcgtccccaccattaccatctctcctttgtgatgtcaaagagaccagaggaagtggacagactcggggaagaataggtaagtattagagacagaaaaagtatgaagtcccttctgtgaggactaacaatagtgatgccattttacaaccttgatgactgtgttctcaagaaacaaagcaaatgtcaaccccgtccatagcttcaacagagcataacagctctaaccgcaacagagcctaacggccctaaccacatctgtccccagttggaaagtgtccaaacagttccaactagccagcacttccccaacccctccccaacagaaactttattataaaagcctcagcttgtaagcgatcaggatctcagccagattcctaactggaactcttcgcaggcttttcctgtaaataaacctgtttggccgtggaattgcctcctgttactcgctctctacgtttatatcttcctaacaccttccggctctaatgttttgggtctcgatgaccatctaactcctaaatgctgggggccgctccccatagaaatgcctcgccggatttctccgcctcgcacccagtgggactgggatttttggccccggggtttgcaataagggagtcaccaagcagcagccacctctggaattcctagaaaggaaagagttgcctggcttcagccagtgggctcagaacggctgacgcatttccggcctttgcggttgatcggtcattggggtgctgcagccccgccacctgttccgtagcttgccggtgccccgaaggtgagtcttggccccttgtcgcgacccgccaggttcccagaagatttcaggtctgtgccttggagtaggcggggagggaacgtctgcgcaggcgtgacccccgcccctacacattcactggcctgaagcccccgtggagtaggtggaggtcccgccccttatcctgaagattaaacagcctttctttgtctgagataacgcccggagttctttgtcctgcctccaa

SEQ ID NO: 5928 - DNA, 1175 bp, Homo sapiens; identical to SEQ ID NO: 5927

SEQ ID NO: 5929 - DNA, 506 bp, Homo sapiens
ggtagaatgttggagtgcttgttcatgggcaccataatgctactatgatcagcatttggatgaagagggactatatagacatattagagttaatatttgattgatttataatagatagggtatagtatttgatcatctgatttttaccttgttctgaattatctacctgtagtcatctgacaatcaaataactccccatcaacttatcaatatttggctctatcctatctctgcagtttggtcctctgtcatagtctctaatgtcaagttacccatacactccatgattcaacaagccctgaaaatttatagaactctactttttagcacttgtgaccatttcaccttttcaaccaaagtgactgttcagtgttacaactttgtcattttgacatgtagcttgcaaaggcaatggattcccatcttggtttcttaaagtgtagatgttcaaaaatatgccagatactctaaattattggtgtctgttaaatgggaacttctcaaag

SEQ ID NO: 5930 - DNA, 562 bp, Homo sapiens
gccaacgtctaatccttttgtttgagaaagtatagtttcaaccaatatatttattagtctcttggggagaagccagatttatagcattccattttgttttactcacaataaatgcatgaacatgtactgttttatcaatcttttttttcgggcgcatggcctggacattgactcagtggactctcatttattagtgagaaaactaattggaggatatatggagatgcagaactcagtagaaagccagaacatttatttggatgggatcttattctaatctgaggtagcatcatcaagaagaaataaagatctacataagttgctccaggagggggctaaacctgtcatttggctattgtgatttcatcaaattgatcactgtaactgtcatctttgtcttgaaaagcatctgccactaacaaaggctgttccccttggaaaactattagctctcagtgaatgaaagttattcagcacactgaataaattgtctcctgcatgagacagcatttgataattcacacttttatggggaatattgaaaggaaatttctacatgaca

SEQ ID NO: 5931 - DNA, 562 bp, Homo sapiens
gccaaagtctaatccttttgtttgagaaagtatagtttcaaccaatatatttattagtctcttggggagaagccagatttatagcattccattttgttttactcacaataaatgcatgaacatgtactgttttatcaatcttttttttcgggcgcatggcctggacattgactcagtggactctcatttattagtgagaaaactaattggaggatatatggagatgcagaactcagtagaaagccagaacatttatttggatgggatcttattctaatctgaggtagcatcatcaagaagaaataaagatctacataagttgctccaggagggggctaaacctgtcatttggctattgtgatttcatcaaattgatcactgtaactgtcatctttgtcttgaaaagcatctgccactaacaaaggctgttccccttggaaaactattagctctcagtgaatgaaagttattcagcacactgaataaattgtctcctgcatgagacagcatttgataattcacacttttatggggaatattgaaaggaaatttctacatgaca

SEQ ID NO: 5932 - DNA, 469 bp, Homo sapiens
aaaggtgctgtggaattgacttctttggagtcctatgatgtgaacatttcatctgaaaagatatagtgtcagaatccttaaggtatccaccgagaataaattacttcctctacatcaagcatcttcttctcttccatattcaacacagtgaattcataatggagacaatacatccctaagttgctgatggtgttgcaagcaccattcatgttttggacattatggcagtgacgatcagaagagaatcctgtggacctacgtttctggtgtttgtagcaacaggatgagcatcagtgagccaggttctgggcagagacacccgaagcccaggaggcagagccagattcccctgacttccactaagtgacccactaagtcagctctcagcatgtcactcatagctgattttgagataggtttttaactggtaagcaatatgcttaggtgccctgccctgtctcagtaaaaa

SEQ ID NO: 5933 - DNA, 9821 bp, Homo sapiens
aagggaacagagtaaagaaaaccaaaccagcagctcattttctacccaagccattggaaggtgagtattatgcatgcattattattacatagacttattacatattttatttttcaaattgataggtctaccatggctctaagaaaccttcacaaagtgctggaaatgtcatttattttgatctaggtgatggttgcacaggtgcctacttaagttattgatttagaatttgtgccccttatacactttactatatttgtgtatgtatgtgtaccaggaaaaatttcttctctgccacctccaaaggctcaaatcctcactgctacaaccactctaacccttagataatttaaattaattaagttaaaacaattttaaatctgtaatgatacaaatctgcgatgataagtatattagaaaaagataataagtatattagaaaaaataagttttgagcgtggaatcaaaagtattttccattttgatattatctaggtgaaagtaattacctacttgtggattattataattacagaaaaataagagataatagcttgactcttaaagaacttgctgatattacacatctgctttcaaattgtgtaattcttcactgtatacatttgtagcattacttcttttactaaaataatttatccacattcatttgtgtgcaggaaggggtatatccagtcatccatgccggatgaatggaaatttcacatttactccaatcagatacccaaagagcaggctacaaagtttttttaattaatcaacaacatctgcacctctctcattaatgattctgccaaaagtgtcatttacttttatctatgtaacatttgagaattacaaaaatatttgattttaggatattcacatgtgtttctattcaagttcttttgtttactcttttgcagaagatcagatctacaataactcagtaaatattttaagctagcttggacagctcaattttctttttgtgttttattcctacaggaaaggcttagccatcacgagaaaatgcatattgttttcataatgcatattctctatattgaaataaaataatttaaaaatttgaacagtcaattcttcatcatctgtgagtgtataattttcaatttgcctaaattcagaaaatcgctcttgttggctaatactacttctgtaatttcaatgatgttgacttagtgtcactcttaattatatttttctgtagaacaatttattgaaacccaaacagttagctaccagggcctatacaggaaaagacagattattccagagtctgaaatatgagtgaattattctcagtatatggtggatcataaggatgattagagtagaaagaagttagaggatttccctgttcctcccaaaaaaaacacatccatgatacactttcattgttttaaataaattttgataacattggactcacctatatttaaatgcaaataaaaaattaaaaaataagcccacagaagctctaataagaccattgtttatttgccaccgtgctttatctcttttcactcattttatgttttgtaaatagttaagaattgactagatttttagaaccttaccctttagctgcataaatgtaacaaaacccaaaagggctgttatgtcatttaaccgaggtaaaatttgggaaccagttattttgcatatctcatagaaaatatctgagacaacaatgatgtggtatagaatgatacttggtatttcactcatgtatttgttatgtgtatatgagtgttttgtgtgtatatatacatatatatatatgagaaagagagaaataatactttttatgttttcaaaaaattagcagaagtactctaaaaacagttaagggggtaggtactataacgacagagattatcacattgtttacttgatagaggaaaattaatttcaaactttcaaaacccataccgaatataaataatgttattggaaatgtttgacaaattaagtacctggttaattattggtactctagggcattcatatctttgttttatatatatatatatatatatatatatatatatattttattattatactttaagttctagggtacatgtgcacaacgtgcaggtttgtgacatatgtatacatgtgccatgttggtgtgctgcacccagtaacttgtcatttacattaggtatatctcctaatgctatccctcccccatccccccaccccacaacaggcccgtgtgtgtgatgttccccttcctgtgtccaagtgttctcattgttcagttcccacctatgagtgagaacatgtggtgtttggttttttgtccttgagatagtttgctgagaatgatggtttccagcttcatccatgtccatgaactcatcattttttatggctgcatagtattccatggtgtatatgtgccacatttgcttaatccagtctatcattgttggacgatacaacttcactacatagaaaatcaaggtcaatgcttcatgcttttgtctgctaatttaattagtaataggagtgagggattggaatgtgctttcaggatacgcattagttccttttgctaccttagcaagtaatttaatagaaaccttatgtacatttgcactttcaagtatgtgtgctgatgaaaactcacgtgatgcattgatactaaaggccacattctacccccttgaacatagggaatgcatatggtagttcatcttaactaaatctaagggctcttcgtaaaataccttaaactttcaaaaacctaaaaagcagtttgggcagctctaatgcacttgtatttctgatggcagatgactttaatccctagttttccccaaccatcagtcactcttatatgtcctttctcaggacttccagaaatcattttctaaaaagccacgtgaactactatgattatgccaccagacactatttagataaatcctcagagtttattcaggtagtttcagttgctgtcttgccattctgttttctgcccctgtatcatgtcaattattagatttttaataacatagcagaaaatgagttgccttctgctgcccaagggtctttttccatgattgtaggaaatgaacattgaaatgataatctcctgaaggctctggcttatgggaagagagttatttgttattattttgtgtagctttgaagttgacactagtatgactatgttgcttttgaaccacatgaaagaaagtaatttaatgttctaggatgtaaataccgcagctcacaaagattgattgaagtgaatgagaagttcatgtgttgatattaatgtgcagtggaagggatgtctgagttttctttttttgagaattaagttaaatgcctgtcattctcctatagtgtgtgtgtgtgtgtgtgttttacatcatggacccacaaagaggccatagctcccatttaaacctgctgtcctagacaaaaatccatgcacactcatatacatattttaggtatacagaccagagaatgtgaagggagtaatgtcctctgtgggctggaaatgattgctttacaacaggaattctgtctcaatggaattgctttacttcagggaaaacagaaatgggcaaactgcagtggtctatgcaggtatggatggaccattctcacacctaaccaagcaatgtttgcttttcctcctcctttcttcccatcactagttgccatgtaccgagaaccatctttgcatgatgttggggaaacggtcccgaagcctggggtgacgccaagtaaaagcacaagtgcgtctgcaataatgaatggaggcaaaccagtcaacaagagtaagacaacatagccagatcctcacaggtgttgtgacttattcgtcctgagcacagttgagtgatttatcctcaccagacattcctgctccgtggctgaagagcagcaggaagtaagctaatgcttattctttgctgtctccgaacttctctgttgcaagtggataaatctcaacctgttgcaccccccacaacaagaagacacctggataaccagctaaactcagaccatggaatgccctaccagatatggaatgcctttttaatatcttttctgtgactgtgacacttcatgtgaatgacatacttcacaagtacactcgataccttgcctgctgacagctacccataatcctttttgagtcctgtttcagcgaaatctatgtgtttaagttcaattttgtagcacacaaataatattgagtaatttctagttagacgctgtaaacctgtgctattacggatttctcttcttcccatttttacagggctgctcgctccactgtctgtgaccttttgcagggattttgttcctctaaatcttaaatgttgcagttggcttaggtcggagagcaatcagggaatcaggaagccttctaaacctattattacaaattgcatctataaagaaagattaagaaagattgttgtctctggctcacactatcgattaaacacacatatacgctctgtccagtagcagatactgtgctcccaaggtcggcattgcctgggtgggaaatggctcaaacacaatccagggaagctctctatgatatgtgtttgacatccccctctagtttctttgtgtgtgtgtgttttatacatatcacaagcttactggtaatggtaacatttgccttgcccagcgagcaagacccactggtttttgagaaagtgggtccaaagatttctgtaggccttgtaggcctgattaaggttcatttttcatctattaattctcattatttggaaaaaaaaaaaaaggaaaatcagtaattataacctacaagaattgcgctacctaaatccatttcagatatactccgtcctgtttttaatgaaccaaacttaacgccatccccgtttctggctgcgttcccctcatactcagcagagcatgggcaagacggctgttgtgttctttcctgcagcagcaatgcaaacgttagttataaattaattagactttaatatttttggtgtttaatgacaagtttttaaactggacatattaggaaaaatattttttttagctcagcatgctgagtccggtactgtgtatttcaccagtacatgcctctagctcagcatctggggctcatgttgcccagtggctgggttagaggtgccttgccatgatctcagaatacagtctgttgaattatcctagatgaaaataaaggcaaaccaacacattcatccatgaggattttggtccattccatttattttcttttattttgcattcttaatttcctttttagtttaacactgtttgtttgagcttagggaagacaactaccaagaaaggccaggaacagttgactacacaatgaagattccatgcaaaatgttcaatattggatctaaaggggttcaaaatgtttcatactaaactgtttgggaatttatttgttaactctgtgtacacctaataaaattcaatgttttcttctcagaagagttcattgagaccaaactgaacctcatttattgaaaattatatgtgggatcaatgtactggcctcttgttattctttctatgtgggaggatgacccagtcatcattttccccatctgcactgtatttattgggaaattattttgtcactgctttcataaatcttcttcatgacagcccttgcccagcattaaaaaatctggcctgcttagctgattaaaggtttagtagaaatttaactgtttgtttatgcttatttcattttcatattggattctacttgaataaataaaaagttagcagaacgtttgagtagatttattgccaatgatgctaaattacaaatctaacaaacaaaatgattcctttggtcatttttgatttggtgttatgtcatcttgaagcctattgtttttaacaggaacagttaaaatatattagataacttccattaaccaattattttcagaaaacatagatcccataatatgtggccaactatatgagtaattaactaacttgtaatacagtcaaatgggcttatggacactacttacagcagcaacacttcacttcacacaaacacacacatatacacacacacacacacacacacacacacacacacagagcaaacacccccatctatttgttactgataattagccctacttgctggtttctttttcccctgcaagtctgtttattggtttaaattaagacaagatttatttttgtaaatgactgagatttatgtaaatgtgtatctctgttgtgttttatatatggggtgtctataagggcatttatccctatgaaggatgtcaaatactttcttctaatatatgtttagacatattgcagaggggtccttgttatttgtaattgagttaggtcatttactttgtgtctggtctcacctgtagcatgggaagaggacagcaatgatgagctgcatgtagtaggtacctgtgtatcaagaactgttggtatgtattgctaatttgcatacaaagagtttgtctgtctgcattgtagtttgtgtttaatatcatttgttaaattcacaaatacaacatattgaataaaatatttatatgaaggcatattaaaaaacatcaaacaactttatgtaacaaaatggcattgcattactcaccaatatagagaaatgtcatgtaaataagttggtaaactcaatttccccctttaccatgccaaagaaaattttagctctttgatgatacctctcttgctatttgtttgggataagacttcgccatttttttcccctcagaaattaagtttgctgttattaagtaagaagtgcaatctgtcactactgatgttccgtatagtaaatctgatggaattcatttgtatttagactgtgtgttttgtacctccatgtgcatatgtccattgtatcaagtctctataatactccattccttctgcatgcatatctggtgtgggagggttatttctactgatttgttatagtagctgattgctttgccagtccctcaacaacgctcagaaatgttgttttggtatttcaagtgacaacatttttgttttctaatataagattgctttttaaaacattttgctaccactttacttggaaaaattagagaagacatgacaattctccaccctatgtaaagagcaaaatggaactgaacatcatttcattacaaatcctgaagaatttggagattcttgctctaaatgtttgcttgtcctgaatgtttttgggtagcagtggcttaaagagatccacgatgggtccaaaggactcccgctccagttcttctaatagtttgcctcttggggagcaagcagaagttctttatcatacctagccacttgcttaattaatgctttaagcactaaaagttgttatttttatcaggatgaacaatatcagatttggttgtctttaaaagcaaaaaccaaaaacttattctttaagtaagttagacacgtatcacttcatttaaaattatctccctaatattatggatcattaatatttgatacatattcaaaaagagaccacattgactaacatccagttgagaacaagatgaaaataattgaaatattttttccattttaattcagaacaaggctatatcaagggaaagcgactgggctaaatcctcaatttttttttccaaaatgcaggcatatcaaaatccaggatgtacatggtcttactttgagtgaaatagtagtcatagctgaggtttcttagcctacaatgtgacatagggcctgttgactctcttgaatatggagtagggtttcaaagtgttgacagttgagtctgcaaactaaggctgagttatattttagttttttttttttttcctggttttcactaagtctaattccaatgtctactggcagagattgtgtttgcatttgaggtagtggagggcggtactttccaagtgctgttggaatccagataaactcaaggagcccagaaagacaacgggtataatggctctcctcttatgacttagcactttagttgacttttttgaaaaagtctctgggtggaatacctcagtgatgatgatttgccaaacaagcagcgttagtgccaacaccttctctaaacttgctgcatcccttccaattgacattaatcccactgcaacttcctaaaaacaggaatgagccaatgagatttgcttattttctctcacccattacaagtaagtttgttcttgccctgcttgttttttagagggagtttctatcatagagttgaaaatcacatttaagaaggaaagagtttatgtctttacatgtaactattttattttttccaatctaaattcaatcacttcttaatagatatattggtgtttgcattgctggcatcaaaaccacacatacacacacaaacacacacatacacacaaacatagtggacagaaataagtaaaaatatttctgttttcaaagaaaaagcattccttagagtttaggtaccattaacttctactataatacagttccggtactatggtttctaactaaatgaacactagaacagagctgactatattttcatctttgtccaaaattttagatgaatcacattttgaactttttatggtatgataatttctccaatatctaaattctttttctgagaaaacaaatgccgaggacatttttgacactcttcttacatgagactatgaaaaagagcagcacttttgttgtagttgttgttgttaataaaaaggataataacatacagaggattataagaaaaataagacatacctgaggttttgtgatgagctatagagaatcaagggcagttccagtggagctgaggctgacaaagtactgcccagctgccagccaaatccacccttaagttgcttttgtatggcctgggagctcagaaggaatttttaattttttttacagctttaaagtattaaacagaaaccaacaaagaagaatatgagacagggacgtacgtggtccgtaaagtttaactttctgatccttaataggaggataagcgccgtgatagagaaatccaaaggtcatttgtattacgatggctagataatgtaatgaattccaatgtctgtgcatcagcgaatacgtcatcaaaattgctacaaaacaataataataggttgttcacagcttaaaatgtttaggtagtgaagaggaaagaatataacctacattatttattgactacttatatttccctcattttacggaagagatctatcaatttacgtactcaataatagaactacaacatggttgcactccttaatctcaggatagagataacaatttttataaatctattacattatgagaacattgttagtactataaaaatcaggatcagttaaatgttctcttaaaataattttcaatattaaatttttaagtaactcagtggatgcatattttccttatttttggaaatttgacttataaagtttaagccatgactagaatatttacatcattaaaataaaatttccaagtaaaaattttcatcttaaagtaatacggaaatgattttgctacattattctaggattttacaaagtaattcacctttagaaaaaaagtggttttttttttagctctaaataattaaaggttgcctaaactaatgtgtataagtagatttacctgtaaatatgtaagggaagtcccaattattgtacactttcataattcaatgtgaatttcatacaaagcaaagtttcaccattaagaaaataaacattttgttcctatca

SEQ ID NO: 5934 - DNA, 9824 bp, Homo sapiens
aagggaacagagtaaagaaaaccaaaccagcagctcattttctacccaagccattggaaggtgagtattatgcatgcattattattacatagacttattacatattttatttttcaaattgataggtctaccatggctctaagaaaccttcacaaagtgctggaaatgtcatttattttgatctaggtgatggttgcacaggtgcctacttaagttattgatttagaatttgtgccccttatacactttactatatttgtgtatgtatgtgtaccaggaaaaatttcttctctgccacctccaaaggctcaaatcctcactgctacaaccactctaacccttagataatttaaattaattaagttaaaacaattttaaatctgtaatgatacaaatctgcgatgataagtatattagaaaaagataataagtatattagaaaaaataagttttgagcgtggaatcaaaagtattttccattttgatattatctaggtgaaagtaattacctacttgtggattattataattacagaaaaataagagataatagcttgactcttaaagaacttgctgatattacacatctgctttcaaattgtgtaattcttcactgtatacatttgtagcattacttcttttactaaaataatttatccacattcatttgtgtgcaggaaggggtatatccagtcatccatgccggatgaatggaaatttcacatttactccaatcagatacccaaagagcaggctacaaagtttttttaattaatcaacaacatctgcacctctctcattaatgattctgccaaaagtgtcatttacttttatctatgtaacatttgagaattacaaaaatatttgattttaggatattcacatgtgtttctattcaagttcttttgtttactcttttgcagaagatcagatctacaataactcagtaaatattttaagctagcttggacagctcaattttctttttgtgttttattcctacaggaaaggcttagccatcacgagaaaatgcatattgttttcataatgcatattctctatattgaaataaaataatttaaaaatttgaacagtcaattcttcatcatctgtgagtgtataattttcaatttgcctaaattcagaaaatcgctcttgttggctaatactacttctgtaatttcaatgatgttgacttagtgtcactcttaattatatttttctgtagaacaatttattgaaacccaaacagttagctaccagggcctatacaggaaaagacagattattccagagtctgaaatatgagtgaattattctcagtatatggtggatcataaggatgattagagtagaaagaagttagaggatttccctgttcctcccaaaaaaaacacatccatgatacactttcattgttttaaataaattttgataacattggactcacctatatttaaatgcaaataaaaaattaaaaaataagcccacagaagctctaataagaccattgtttatttgccaccgtgctttatctcttttcactcattttatgttttgtaaatagttaagaattgactagatttttagaaccttaccctttagctgcataaatgtaacaaaacccaaaagggctgttatgtcatttaaccgaggtaaaatttgggaaccagttattttgcatatctcatagaaaatatctgagacaacaatgatgtggtatagaatgatacttggtatttcactcatgtatttgttatgtgtatatgagtgttttgtgtgtatatatacatatatatatatgagaaagagagaaataatactttttatgttttcaaaaaattagcagaagtactctaaaaacagttaagggggtaggtactataacgacagagattatcacattgtttacttgatagaggaaaattaatttcaaactttcaaaacccataccgaatataaataatgttattggaaatgtttgacaaattaagtacctggttaattattggtactctagggcattcatatctttgttttatatatatatatatatatatatatatatatatattttattattatactttaagttctagggtacatgtgcacaacgtgcaggtttgtgacatatgtatacatgtgccatgttggtgtgctgcacccagtaacttgtcatttacattaggtatatctcctaatgctatccctcccccatccccccaccccacaacaggcccgtgtgtgtgatgttccccttcctgtgtccaagtgttctcattgttcagttcccacctatgagtgagaacatgtggtgtttggttttttgtccttgagatagtttgctgagaatgatggtttccagcttcatccatgtccatgaactcatcattttttatggctgcatagtattccatggtgtatatgtgccacatttgcttaatccagtctatcattgttggacgatacaacttcactacatagaaaatcaaggtcaatgcttcatgcttttgtctgctaatttaattagtaataggagtgagggattggaatgtgctttcaggatacgcattagttccttttgctaccttagcaagtaatttaatagaaaccttatgtacatttgcactttcaagtatgtgtgctgatgaaaactcacgtgatgcattgatactaaaggccacattctacccccttgaacatagggaatgcatatggtagttcatcttaactaaatctaagggctcttcgtaaaataccttaaactttcaaaaacctaaaaagcagtttgggcagctctaatgcacttgtatttctgatggcagatgactttaatccctagttttccccaaccatcagtcactcttatatgtcctttctcaggacttccagaaatcattttctaaaaagccacgtgaactactatgattatgccaccagacactatttagataaatcctcagagtttattcaggtagtttcagttgctgtcttgccattctgttttctgcccctgtatcatgtcaattattagatttttaataacatagcagaaaatgagttgccttctgctgcccaagggtctttttccatgattgtaggaaatgaacattgaaatgataatctcctgaaggctctggcttatgggaagagagttatttgttattattttgtgtagctttgaagttgacactagtatgactatgttgcttttgaaccacatgaaagaaagtaatttaatgttctaggatgtaaataccgcagctcacaaagattgattgaagtgaatgagaagttcatgtgttgatattaatgtgcagtggaagggatgtctgagttttctttttttgagaattaagttaaatgcctgtcattctcctatagtgtgtgtgtgtgtgtgtgttttacatcatggacccacaaagaggccatagctcccatttaaacctgctgtcctagacaaaaatccatgcacactcatatacatattttaggtatacagaccagagaatgtgaagggagtaatgtcctctgtgggctggaaatgattgctttacaacaggaattctgtctcaatggaattgctttacttcagggaaaacagaaatgggcaaactgcagtggtctatgcaggtatggatggaccattctcacacctaaccaagcaatgtttgcttttcctcctcctttcttcccatcactagttgccatgtaccgagaaccatctttgcatgatgttggggaaacggtcccgaagcctggggtgacgccaagtaaaagcacaagtgcgtctgcaataatgaatggaggcaaaccagtcaacaagagtaagacaacatagccagatcctcacaggtgttgtgacttattcgtcctgagcacagttgagtgatttatcctcaccagacattcctgctccgtggctgaagagcagcaggaagtaagctaatgcttattctttgctgtctccgaacttctctgttgcaagtggataaatctcaacctgttgcaccccccacaacaagaagacacctggataaccagctaaactcagaccatggaatgccctaccagatatggaatgcctttttaatatcttttctgtgactgtgacacttcatgtgaatgacatacttcacaagtacactcgataccttgcctgctgacagctacccataatcctttttgagtcctgtttcagcgaaatctatgtgtttaagttcaattttgtagcacacaaataatattgagtaatttctagttagacgctgtaaacctgtgctattacggatttctcttcttcccatttttacagggctgctcgctccactgtctgtgaccttttgcagggattttgttcctctaaatcttaaatgttgcagttggcttaggtcggagagcaatcagggaatcaggaagccttctaaacctattattacaaattgcatctataaagaaagattaagaaagattgttgtctctggctcacactatcgattaaacacacatatacgctctgtccagtagcagatactgtgctcccaaggtcggcattgcctgggtgggaaatggctcaaacacaatccagggaagctctctatgatatgtgtttgacatccccctctagtttctttgtgtgtgtgtgttttatacatatcacaagcttactggtaatggtaacatttgccttgcccagcgagcaagacccactggtttttgagaaagtgggtccaaagatttctgtaggccttgtaggcctgattaaggttcatttttcatctattaattctcattatttggaaaaaaaaaaaaaggaaaatcagtaattataacctacaagaattgcgctacctaaatccatttcagatatactccgtcctgtttttaatgaaccaaacttaacgccatccccgtttctggctgcgttcccctcatactcagcagagcatgggcaagacggctgttgtgttctttcctgcagcagcaatgcaaacgttagttataaattaattagactttaatatttttggtgtttaatgacaagtttttaaactggacatattaggaaaaatattttttttagctcagcatgctgagtccggtactgtgtatttcaccagtacatgcctctagctcagcatctggggctcatgttgcccagtggctgggttagaggtgccttgccatgatctcagaatacagtctgttgaattatcctagatgaaaataaaggcaaaccaacacattcatccatgaggattttggtccattccatttattttcttttattttgcattcttaatttcctttttagtttaacactgtttgtttgagcttagggaagacaactaccaagaaaggccaggaacagttgactacacaatgaagattccatgcaaaatgttcaatattggatctaaaggggttcaaaatgtttcatactaaactgtttgggaatttatttgttaactctgtgtacacctaataaaattcaatgttttcttctcagaagagttcattgagaccaaactgaacctcatttattgaaaattatatgtgggatcaatgtactggcctcttgttattctttctatgtgggaggatgacccagtcatcattttccccatctgcactgtatttattgggaaattattttgtcactgctttcataaatcttcttcatgacagcccttgcccagcattaaaaaattctggcctgcttagctgattaaaggtttagtagaaatttaactgtttgtttatgcttatttcattttcatattggattctacttgaataaataaaaagttagcagaacgtttgagtagatttattgccaatgatgctaaattacaaatctaacaaacaaaatgattcctttggtcatttttgatttggtgttatgtcatcttgaagcctattgtttttaacaggaacagttaaaatatattagataacttccattaaccaattattttcagaaaacatagatcccataatatgtggccaactatatgagtaattaactaacttgtaatacagtcaaatgggcttatggacactacttacagcagcaacacttcacttcacacaaacacacacatatacacacacacacacacacacacacacacacacacagagcaaacacccccatctatttgttactgataattagccctacttgctggtttctttttcccctgcaagtctgtttattggtttaaattaagacaagatttatttttgtaaatgactgagatttatgtaaatgtgtatctctgttgtgttttatatatggggtgtctataagggcatttatccctatgaaggatgtcaaatactttcttctaatatatgtttagacatattgcagaggggtccttgttatttgtaattgagttaggtcatttactttgtgtctggtctcacctgtagcatgggaagaggacagcaatgatgagctgcatgtagtaggtacctgtgtatcaagaactgttggtatgtattgctaatttgcatacaaagagtttgtctgtctgcattgtagtttgtgtttaatatcatttgttaaattcacaaatacaacatattgaataaaatatttatatgaaggcatattaaaaaacatcaaacaactttatgtaacaaaatggcattgcattactcaccaatatagagaaatgtcatgtaaataagttggtaaactcaatttccccctttaccatgccaaagaaaattttagctctttgatgatacctctcttgctatttgtttgggataagacttcgccatttttttcccctcagaaattaagtttgctgttattaagtaagaagtgcaatctgtcactactgatgttccgtatagtaaatctgatggaattcatttgtatttagactgtgtgttttgtacctccatgtgcatatgtccattgtatcaagtctctataatactccattccttctgcatgcatatctggtgtgggagggttatttctactgatttgttatagtagctgattgctttgccagtccctcaacaacgctcagaaatgttgttttggtatttcaagtgacaacatttttgttttctaatataagattgctttttaaaacattttgctaccactttacttggaaaaattagagaagacatgacaattctccaccctatgtaaagagcaaaatggaactgaacatcatttcattacaaatcctgaagaatttggagattcttgctctaaatgtttgcttgtcctgaatgtttttgggtagcagtggcttaaagagatccacgatgggtccaaaggactcccgctccagttcttctaatagtttgcctcttggggagcaagcagaagttctttatcatacctagccacttgcttaattaatgctttaagcactaaaagttgttatttttatcaggatgaacaatatcagatttggttgtctttaaaagcaaaaaccaaaaacttattctttaagtaagttagacacgtatcacttcatttaaaattatctccctaatattatggatcattaatatttgatacatattcaaaaagagaccacattgactaacatccagttgagaacaagatgaaaataattgaaatattttttccattttaattcagaacaaggctatatcaagggaaagcgactgggctaaatcctcaatttttttttccaaaatgcaggcatatcaaaatccaggatgtacatggtcttactttgagtgaaatagtagtcatagctgaggtttcttagcctacaatgtgacatagggcctgttgactctcttgaatatggagtagggtttcaaagtgttgacagttgagtctgcaaactaaggctgagttatattttagttttttttttttttcctggttttcactaagtctaattccaatgtctactggcagagattgtgtttgcatttgaggtagtggagggcggtactttccaagtgctgttggaatccagataaactcaaggagcccagaaagacaacgggtataatggctctcctcttatgacttagcactttagttgacttttttgaaaaagtctctgggtggaatacctcagtgatgatgatttgccaaacaagcagcgttagtgccaacaccttctctaaacttgctgcatcccttccaattgacattaatcccactgcaacttcctaaaaacaggaatgagccaatgagatttgcttattttctctcacccattacaagtaagtttgttcttgccctgcttgttttttagagggagtttctatcatagagttgaaaatcacatttaagaaggaaagagtttatgtctttacatgtaactattttattttttccaatctaaattcaatcacttcttaatagatatattggtgtttgcattgctggcatcaaaaccacacatacacacacaaacacacacatacacacaaacatagtggacagaaataagtaaaaatatttctgttttcaaagaaaaagcattccttagagtttaggtaccattaacttctactataatacagttccggtactatggtttctaactaaatgaacactagaacagagctgactatattttcatctttgtccaaaattttagatgaatcacattttgaactttttatggtatgataatttctccaatatctaaattctttttctgagaaaacaaatgccgaggacatttttgacactcttcttacatgagactatgaaaaagagcagcacttttgttgtagttgttgttgttaataaaaaggataataacatacagaggattataagaaaaataagacatacctgaggttttgtgatgagctatagagaatcaagggcagttccagtggagctgaggctgacaaagtactgcccagctgccagccaaatccacccttaagttgcttttgtatggcctgggagctcagaaggaattttttaaattttttttacagctttaaagtattaaacagaaaccaacaaagaagaatatgagacagggacgtacgtggtccgtaaagtttaactttctgatccttaataggaggataagcgccgtgatagagaaatccaaaggtcatttgtattacgatggctagataatgtaatgaattccaatgtctgtgcatcagcgaatacgtcatcaaaattgctacaaaacaataataataggttgttcacagcttaaaatgtttaggtagtgaagaggaaagaatataacctacattatttattgactacttatatttccctcattttacggaagagatctatcaatttacgtactcaataatagaactacaacatggttgcactccttaatctcaggatagagataacaatttttataaatctattacattatgagaacattgttagtactataaaaatcaggatcagttaaatgttctcttaaaataattttcaatattaaatttttaagtaactcagtggatgcatattttccttatttttggaaatttgacttataaagtttaagccatgactagaatatttacatcattaaaataaaatttccaagtaaaaattttcatcttaaagtaatacggaaatgattttgctacattattctaggattttacaaagtaattcacctttagaaaaaaagtggttttttttttagctctaaataattaaaggttgcctaaactaatgtgtataagtagatttacctgtaaatatgtaagggaagtcccaattattgtacactttcataattcaatgtgaatttcatacaaagcaaagtttcaccattaagaaaataaacattttgttcctatca

SEQ ID NO: 5935 - DNA, 469 bp, Homo sapiens; identical to SEQ ID NO: 5932

SEQ ID NO: 5936 - DNA, 1462 bp, Homo sapiens
ttgcctattttgattttcatatggcttttttttctgtaagttttcagaggattttttaaatcacagaatcatactaaatgatatttagcctatcaaaacttccaaaagcccacaccaccagttcctgactcaaatttgaagggtttttagacaggagggtaggattaagtaggtgagtttaattaaagcttaaccctaggtaagagtaaatgagaaatattacggcaataatggaactgcttcactgtttcttggtgacttcctcactctaatgttttaaagaggcaacaaaagcttgtggtgccatttcagtaaccacggtgttgttttagatgcctttataagctcagtttcccctgttcttaagtgttgaatactgtctttaaactagaaaaatgcaaaatattgaactgatatttttgtgtgtagttgattactcttccattgagtgaatgatgaatacctgtgaggataggaaattagttctgagatctagtccctctctgattcacttagtaatctatcctcttttcagtattacatgtgcttaatctcagatgaaccatttcaccatggcagtgttatctcatctctgggcttttctgggaattgaagtatctctccttaaccccaattgtcaagggtagtagctgtatactaccactttgaattattgaaacgggtcaatttacgaagtctgcattggctatggagatatggtttatagtacagcctagagaatgaaactcaccgtccagataaccatgcatgcacccagattttttccaccttggatacctgtcactagggaataataaaggcctgattttttgtcttattccaactaagtagatcattatctctttccttttttatgttaatgagagaatttagcctccactcaacaatgttcaattcagcaaggctttcatatccttgctgtgggtcgtggataaggagcttattcaggtttcctgccctagctattagctccacttcacatgctggagaccggcgtagggacagatgtattcatcctggtgttactgaaaaacaggtgtgatcctgttactgatactataagtgacctaaaatgtcactgttcaaattagccagtgttctaacaaactaaactcttcaaatgcttggaaagatactacaaagccaatctttatagaattgggccaagataaatctatgttgttttgcatggctattgttaagctccaaaggttcactgtgtttctgccgctgtcctggagttgtcaccactgactgggcaaggcttcttgggcatggatgtagaactgttgtccttttcccactaacagttatctttgactctcttgcctgttatgcttacaaaatggtgatggcttatggaaggctgttaaattaatattcctgttaaaggaaattaaagtttgtctatttttgacaataaaacattatatatttttaa

SEQ ID NO: 5937 - DNA, 2739 bp, Homo sapiens
gagccggcgcagggtggcccgggaggggtgagcagggtgccgctggctgctggggtctgcaggtcaccgagtccccaggagaggggactcctaagaagccacctgcctgtgtttacccggcagcgagcgcgcaggcccccgcgaactcctggcaggtgagcgaagctgcggccttggtgggggcagcggggccggggggcgctccgcggggcaggtcgcttccaagttttgcgaactgttgagttagtttcaggttgcggctccgctcccagggctttgtcaaattgagttgcagaggccggttccacccctttggcaaaggagttcctccgctagttcgctcccgggacgccgggcattttaggagcctctgcacgactcgcctgcttttgcaaatccgtctcttctcgcctcattttttccagcgctcaggaaaggccgttgcgcctcgcgaaggaaacagagccgttgaccatggttgcaactggcagtttgagcagcaagaacccggccagcatttcagaattgctggactgtggctatcacccagagagcctgctaagtggtgagtgtccccgctgtccacccttctcccctcccaaggtcggtgcctctggatctattgggtgggcgggctttcgacttcctcccctacctctatgtaggaggtgccacaaaatccatctgaggagactcctttccaaattttctaacatcttctctccatgatagaaacaaaagtagcaaaagtagaatacccgagggctgcatctttctagtctggtgccagtaggccccttgggattaagttccttatcttacatgattgtgaagaacacagttatgtgtgttttagcaaatgtatttaccctgtaatcaatatcgcccctccccctgaattccgacgcacctatttgccaggtattcctcactctcccctgactccagggaactactgatctgatttttatcattccaagttagttttgcctttaggtaagtggaaccatacagtaggtattcttttgtgtctggtttctttcccgcagcctaatgtttttgagattcttttatgtccgttgcttaaatcagtgtgttcgtgtttattgtttattactgagtaggattttcagtcgtggatatatccattattccatttttaatgtgagaaggaaactgttgaacagcagcggtgcttgacttgctgtcatttggaattttaacagcagtttctaggtgaacacactgctctgacactaaagagctgtaagagcatagataaactgcttaagctcttcgtgtttttctcctttcaaggtgaagtggttgatgacctaatttacaggccagaactccaaacttacacgaagtggagaggaaaagccagtggctgatgaaggtggagtaggcttagagagaggagctgggagggcatctgcctgcaccttgttcatttgactccgtgtggtgtggcatcctgccaaggggtaggattaatttgaggtgtaggtgaccaaatgcagagctatctcttttcctttgagcccagctaattttatttccctaggactattttgttttgcttggctaagaaaaaccacccagccggttacaaatatcctcatgaacctcaaaggtcttctctgcacaatttttaattaaagaggctaaagctaaaattgggacctacaggccactccagtaaagacttaaagacacaaatttgatagatctttaatataactcttaaagctttaatacaactcttcaaacataatagtaaaaattctttattttacaatacatgtattcctacagttagaaagtaacaaccccttagtccaaaaaacaaagttataactttttattccagaagtaatgcatgttttctgtaaaacaaaattagaaaacccccataagcaagtaggagaaaagaaaagaaaatcaccaataatctgggataatcacaagtagatttttgatgcatagtcttcacggttgtgtgtgtgttttgtgtacacacataaatttaaagaaaagtggttacatcctatctactctatttatctaaacctttatttcatacatgaactttcattcatgagagcttaaattattcgctatattacctagctagttaacagttaattgaggtcagctgactctgaaacaaatacaagaaaaaggcagacatggtagatagaggtaaccaatgttgatatcttggtgttttttttctactcttaaattttttcttctgtatctaaaaagaaaactccatttcttacagattttgactactgggattatgttgttcctgaacccaacctcaacgaggtaatatttgaggaatcaacttgccagaatttggttaaaatgctggagaactgtctgtccaaatcaaagcaaactaaacttggttgctcaaaggtccttgtccctgagaaactgacccagagaattgctcaagatgtcctgcggctttcctcaacggagccctgcggcttgcgaggttgtgttatgcacgtgaacttggaaattgaaaatgtatgtaaaaagctggataggattgtgtgtgattctagcgtcgtacctacttttgagcttacacttgtgtttaagcaggagaactgctcatggactagcttcagggactttttctttagtagaggtcgcttctcctctggtttcaggagaactctgatcctcagctcaggatttcgacttgttaagaaaaaa

SEQ ID NO: 5938 - DNA, 13046 bp, Homo sapiens
gaaggagtgccatcagctggcctatgctgatgaagccaagaagcgctctaacccgtgagtgcttctggaacctgactgatgctctgagaccagagaccagaccccggcatctgtccgggcactcttgaacagagcttatctgtttctgggggagcagggaggtgtaatgtaggaaaagaaccaggattgggaaaaagcaagaatggcatgtctaagagggcttgaggtgacatttttgacatcacatgtcaccatggcatatctatatggagaggaggaaagtgaaaagcaggcttgagaaaggccagcaaattactcagtgctgtctttggtttctagatatgtgaagacttaccttctgcctgacaagtcccgccaaggaaaaagaaaaaccagcatcaagcgggacactattaatccactatatgatgagacgctgagggtaagtatctagacctcaagggtaggagaacttgttctgtcttgtgccctaagctgtagctattcctctgcaacatgaccaggtgacacgggcttcagtgggccatgtctgtgtctgaggatacattgggtatctgttcacatcctgatctcccagtgaagagaacaaaggtgatctgcctttcctggattgatgtgaagtttgagattcacatggccacaaatctcatgtaaaaaagacatttgagataaggagtctccttggcagttctttttggacaatccagtgttatctcatccacttaagaaaaaatgaattttccaggtcctcctatggaatatggtaggtttttataaaatgagttaagttgaggctttgagtgaggaaactcaaagtgctcagggaacataaagtaatttggtattcaggactagtgacttcaggaatggttgctcaggttttggaataatcttgtctgaagaattacccttaactaatcatcttgggcttttactttcccttcacagtatgagatcccagaatctctcctggcccagaggaccctgcagttctcagtttggcatcatggtcgttttggcagaaacactttccttggagaggcagagatccagatggattcctggaagcttgataagaaactggatcattgcctccctttacatggaaaggtagtctgctttaacaactcctgcagtttggatctgaggtagaattgtctgcagtagcctctgctggtctatgttggtagcgtctttgaatgtagtcttctctggagttctagtgccccctgctggtgtttctgagtttgacagcaatttcagaggcatttgtctatcaagtgtgagttctgtgtaaaccaggcaaagtgtgaagccatggttttgctttgaaaaaattttcatatgtgtaccaaactttgtctcctaaccttccagaatctgggtgtatcctaacatcctaactcgcacctcttctccgagctaaccttctgtgtatatcctaatctgtacccttttgccaagccactgctttacttccaagtgggaagtaaagcaattcatggagctccaattgctatgctcttggttacagaggccagggaaatattactttggagatggcacctcgggccacagtgtagcagtatggcataatcatgcctgggatctgagtgcagacctgtgttggaatcctggttctgtcacttgccaactagatgagtcacttaactacaaaataatgtagggaaatcatctggctaagaagaaatagctaaaacagaggacttattcagcaacttcttgattatcagaactacacaatgacatgacaaagttcatcttatttttttttacactagcgttttaaatgtgggatggttttacatggtccatagactttgggaagttagatgagaaactagtcatggtggctgcctctaggaatggagactgaggtagaaggaatatttagttttctctatatcccctttttaagcatttgaactttttaccatattaagaaaattaagcaaaaatggacttatgtacacatgattcaaaattaaaacaacataaagtatattaaaaggaaagtaggttccattccttagaaataaccagtgttaacactacttgtgtatccttctagaaattttttatggctaggtatggtggctcacgcctgtaatcccagcacattgggaggcggaggcaggcagatcacctgaggtcaggagttcgagaccaccctgaccaacatggtgaaaccccgtctctactaaatacaaaaaaattagctgggcatggtggcgcaagcctgtaatcccagctacttgggaggctgaggcaggagaatcgcttgaacccatgaggcggaggttgcagtgagccgagattgcgcctttgcactccagcctgggcaaaagagtgaaactctgtctcaaaaaaaaaaaaaaaaaaaagaaagaaagaaattttgtattaagcagcacagatatgcatccatgtatttatatgtatttttttctttttttacacaaatgggttcacatggacctcattgtacacatttttttttttcatttatcatgggcatccttttgtgccatcacttacagatctatctcattttaattgctgctgcatagtattttttcatgtgcctgtattataatttatttaccattcccccactaataggcctttaagttgtttgaattcttttttgctcttaaaactatgctgtaatatatcttggtcttcttttgtgaatgtaactgtcagagaagttcctgttggtggaattgctgagtgaaaggaaatataaatccaatattttgatagctgttgcccttgcaaaaaaaaatagtgacaacattaaatttgtccctttaaatactaataaaaacaggaatttgttcaacagcacagtaggatgactatagtcaacaaaaatatttgtatttcaaaatagctagaagatttgaaatgtttccagtgcaaaaaaatgataaatgttcaaaatgatggatgtaacaaaatatcacatgtaccccataaatatatacaaatattatatgtcaataaaaagacaggaaagaaattattaccaaagtataacatattattacaaatttagaattttttaaccatttggcacccaagtcattctctacggtcaatataattatattggaaatgtcactgtaaaccatcatgaactactgccaataaaacttttatataaagagaagaaaccacattaacatggaggtctttgctctttgtaaatatttggagccagaataagaatgtgctactaaaacaaatatgccagtttctagctaatgctaaactccaatttttaagagtccactgaagttcacagaacttttctaaaaaataattttctagaaattaataaattgtgtagacattttataaacaacagaaagaccattcccatattatatatcgattttaacttctacatttgttgtttctggttttgtttttgttttttgttttttccctagcaatccatttgctcctattcagttttcccttgcctgcatctacctcccgattcttttgtctctctcacatatattaaactgtgtgttctgggtatgtggtatgttgatccaaacttatggggattatgccttcctagcattggtaaggacctaagttagaggaaccccaattaacacaggcaaggccaagtgcagtggctcctgcttgtaatcccagcactttgggaggctgaggtgggtggatcgcttcagctcaggagttctggaccagcctgggcaacatggcaaaaccccacctctacaaaaattagctgggtgtggtggtgtgcgcctgtagtcccagctactcgggaggctgacgctggagaatcacttgagcttgggaggcagaggttgctgtgagccgagattgcgccattgcattctagcctgcctgggctctgggaatgaaaccctgtctcaaaaaaaaaaaaaaaaaaaaaaaaaatacaggcaggtgaaagggcacctctagtctgcaccagctcatgctctggatactaaagcacaaggaacaaagtcatgccgagagagccaatcgagtgaagcagttctgccaatcaaagccaaagacaataggccacctgctgctcatctcagacattcattcgttcactcttaccttcattcagtaaatatttgtggagcacctactatgtgccagatactttgctaagtgttgggcatactaggatgaacaaaaataggcttgatttctgtctcttggcacttcggctgcagtgttagagacagacattgatcaaagataacttaaatgcaaaatttataattgtggcaaatccaaattcgtgtaacagagtttcacctagccctcaaatctttgcaagccctccttttttctttttttggggggagggacagggtctggctctgtcgcccaggctggagtgcggtggtgcgatcttggctcactgcaacctccgcctcctgggttcaagtgattctcatgcctcagcctcccaagtagctgggattataggcccacaccaccccgtcggctgatttctgtgttttttgttgagacaaggttttgctgtgttgtccagactggtctcgaactcctggactcaagcatttgcccacctcagcctcccaaaatgctgggattacaaatgtgagccactgcacctgactgaaagccctctttttttttttcccctgcaagccttctttttaaaaataccttgtaaaaatactttgtatttttaaaaaccatacaaatgatatatactattctcattaaaaggacactaaaagttaatatggagtaaaaaagggaaagttgtctttcatttccctattctgttgccctccctagaggaaacgaggataagtttgttcgtatcctgggtttttctatgcagtgtagtataatgtttaaaagcacggactctggaaccagtctgtctgaatttgaatcctagctctgccaattactaactgtgtgaccttgggcaagttacttagcttctctgttcctctcttccatcagttgtaaaatggagttaatagtacctgtctcatagagacagtcatcaaacaaaatgatacacctaaagtacttataacagtgcctagtacatagtaagggctaacataagtgataatggcaatcgttatttacatacatttatattcacatgtacaactatgaatatattttaatataagtggaacatttttctgcatcttgctttgttgacttaaccctatgtcttggatatctttccatgtcagcatgtacagattcactgaattcttttttgatgactgcatgccatatgccataccaggacactacaattattcatttaactctttctatagtgattgacatttaggtcgtttccactttttggctattactaacaatgctggtagcaagattctctgtcatgctgtcagtccttcgtgagtttgtatggcaaccttgcttgaagatctttgagagtatttggaatctagtaactatgcccccaaagtggcataatagtgggtattgcagaagactctttgttggttctgccctatttccttctaaagaaactgccatagaaacctgtggctgccatggcctagggacggtggattatattcatatgaagaaggatcctcttttgccctgatgctgttcttggggggtaattttagaatttttttcagagagaagtcccaacaattcttgagaagcccagcttgacctgttgggtttccctgtgtttcagatcagtgctgagtccccgactggcttgccatcacacaaaggcgagttggtggtttcattgaaatacatcccagcctccaaaacccctgttggaggtgaccggaaaaagagtgagttttctttggggtcctggatgtagcttagtcttctgcataggatctgtgcaaggccggtgctggctactggttagcactgttggagagaccaaattgggatgctccctggatctgctagggagattcctttactaaggaagcctctctgcgttttttcaaacagaagggaatgccttagggttggcattcttttctttttttaggctattaaatggacttggtcttggtccagctgtggcaagctactaagagggcagaagagaacagaaactttggggctgagaagggtggctgggagaggtggtaaagtatgaaggacaggaagttgaaagctggggaagagtaattcaacatgccagctgctgtgttagtgactacggttgtgtagatgagtaaaacatatttgctttcccttgaggagcttaagtttttgcaagaaagacagtcatgtgctaaaaggacacagatataggagtggtgaattatgtctggttacatttgggagagctttgaagaagtaacattaaaactggatcttaaaactttaccagacagaaaaggagcaggatgaggagagaagagcattttcagaagaggggataacatgcgcaaaggttttaaaaaggcatggtaatgtggggttgtatgtgagtgtgtcccttattttagtgggactggagttctggtacactagatgtaggtgtggggctggagttggacatgaggtgggagcctgactgaagagggccttgaacttaatgataaagagtttcacttgatcccttggcaatgtgtggcctacgttctttgaaaaaatatacctttggcagagtcacatctagaaggtttgggggaatcaatgaaatccccaatgagggtatgtagcatgactagagaagagaggcaagtatagaaccagagagatcagcaacattttaaaggatgaagagagaaagaaacaccagtgaagtaaaaggttatcaggagagagcttcaagaagaaggggcggaggttatcaacagtattgaaatactacagggaggtcagaccagatgaggtctgagaagacatggccaattggcattagattgcattttcagtggatcagtgaaagcagaaaccagatttcactagaaactaggctgagtgaatgggcaaagaagtagaggtggtaagtgtggactttttttcctcaggataattgatggtgaaagaaagtagagacatggagaatagcttgaagaagagataaggttaaagggagcttttcttttagaagtactttttcaaagagatgagattagtatatatttagactgaggggaagggacaagtggagaaagagatatttaaattgggaggtgaggattgaaattgatgatgtctgaagagtcctgtgaagtaggggtggaatcgagaactcagatggaggagttccctcttttttaaatcattgaacaaatatcaggcaactttatgtctctaagcctcaattttctcatgtacaaaatgaggacaaaaatagtgtgactctcctagggttgttttgagaattaaatgcttaacatggtatctggcacatagccagttttcaataggcatttattaatattgtggttgttattaatacagcacctattgcttactggcaggcactgtgctaggcactgaggagacaggacaggcacggttctgttatggagctcgctgcctttaggagcaagcaaagaaagtgctgcataaacaaagctcaagataaatctagaggtggaaggggctcacttgctatggctgacatcccttacaggtaaaggtggggaagggggagagctccaggtgtggatcaaagaagccaagaacttgacggctgccaaagcaggagggacttcagacagctttgtcaaggggtgagtccctagaccagccccaaattaaccagtttcagaacaagagagctaagagaagaatttaactttctctgtggatattatccagtgtgtcttaccactcccggcaaccaaatttgttcctgaaattaggtaatgacaaaaccttcaccacctttgcactggtctgggctgtagacttgataatccaaagaggagggctgcagacaggttctgacttttgtctgactcatgttcttaattaattctgggtgaaaatctgtgtcttctgactgtctagattttgggaactcagggctttgtttcccacagtttttaagctttccgaaaattacagagtacctactgacttaatttatctagaaatcatgtttggctaagtttatagatattactattggttttatttaaagagatgaattgtctagtagaaacacaagcccacaatatttaaacccattttcagtggagcacagaatagcctcactaatactattatattcattttctctctaggttaaaggaattgaatcaggtgaatgatctagtagaggtagtgggaactctgcttcagcagattcaaggaggggcgtgtgtagtaggatctggatgtgggttcatcttcttgggctaggcctgtggtaggggaaaggggaatttagagagataactgtccgctttgagtaggctgttgattactccccgccctctgccagatacctccttcccatgaggaacaaggccagtaaacgtaaaactcctgtgatgaagaagaccctgaatcctcactacaaccatacatttgtctacaatggtgtgaggctggaagatctacagcatatgtgcctggaactgactgtgtgggaccgggagcccctggccagcaatgacttcctgggaggggtcaggctgggtgttggcactggtgagatcccctcccccatcctcacttgtttgaaggcttcttgtctattttactcctattaccattcccgccccccaacacaaagctcctctgtgatgacagttgtcttctttcctttcagttaacattcagccaatacttattgagtgcctactatgtgccaggactaggggaaggctgagctcatgcactgatatgtgcacagataaatgtgaccctgattgccaggaacttcataatcttcccaccaaaaaaatctacaaacctacctatatgtatgtacctatacattccatcttccatgctgttaataatgaaagaagggtcattgctagcaaaagccaagctctctccaagtgctctgggccacctccccctacccttctcgatgacctcacttctataatcgtcatctctcagtttcatcctccctacctaccaggggtgaatacagatatgctctggtatttccaatcttatgaaacaaaaacaaacctttccttgactacacgttccccttctagtttcttagaaagaattgtctccacttctcacctctccttcagctctccttcactgtgatctggcttttgtcccaccactctgctgagcagttgctcttgccaaagtgttgttctcatctcactagaattttcagcactatttaacatgctagatcactccttttcgcttgaaacgctgaacttctattgacactgcattctgattcccttttaagtcactgctcaccccttctcagttttctttgtaggtgctgcattctatacccaaactctaaatgttggtgcttggcagagcttagtctcggatcctcttctttgccctctccctagtctctgcacttgtctattaatatacttatatattaataatcacacagaatatttaacatgaagcatatagactgatgtttttacacatgtaagccaattcatgtcagtcccctgttaaaacccctcagtggctttctgttgtgcttagaaaacaatccaaagttcttaacatgcctacaggcccctgtgtaacctgggtcctctgttcctttctgatccgtcttgtatcactcttccccttgctcactatgcttcaaccaaaatgactttctgctctccaaatataccaagctcattcccacttcagaacctttgcaattattgttttctctgaatggaaagtctggttctttcttatccttcaggtcttggctcaaatgtcaccttctcagagagtcctcagaccactccatctgcacagtagttcctgagtcagtcactatacatcaccctgtttatttacatcataatgttaacctcactgtctgaaatactcttattggtttgcttgtatattttctgtcttccctattcaaatgaaagttgcctgaggacagagactttttctgctttgtttactagtgtctctagagcctagaagagtacctggcacacagtaggcactcaataaatgtttgctgaattaatggatgaatatataagagaatatgaatggggccacatacgatcctcacttctgacctggagtctgcagctagaggagaggtgtttagctttaaaagaaaaaagttggccgggcacggtggctcacacctgtaatcccagcactttgggaggctgaggcaggcagatcacgaggtcaagagatcgagaccatcctagccaacatggtgaaaccccgtctctactaaaaatacaaaaaaattagctgggcgtggtggcgcaggcctgtagtcccaggtactctggaggctgaggcgggagaatcgcttgaacccaggaagcagaagttgcagtgagccaagattgtgccactgcactccagcctggcgacagagcgaggctccgtctcaaattaataataataataaaagaaaaatgtttaagtacagttggcaatagctctggcatgagttgtcaggcactagaactctgtaacagcctcagaataagaagtctctagtgactgtgtgccatttggagtctgatttcatcaacccagagtctcttgacagagtctcaggaatacaggtgagggagcacttcccagactgctgtggccattagcccatcttcgtaggaaactgttatggggtggctaatcttgctgtacaacccatcttccctggtgggctgagagtggggcccctctttagcctcttctggtgtttctcctcagggatcagtaatggggaagtggtggactggatggactcgactggggaagaagtgagcctgtggcagaagatgcgacagtacccagggtcttgggcagaagggactctgcagctccgttcctcaatggccaagcagaagctgggtttatgagtccctgtcctcttctgcaggtccagccctggcgagggcaggtcagaggaagtgaagaaatcaagagcaaagatttataatttaatgtgtatgtgtgtatgtgtgtatgtgtgtgtgtgtgtgtgtgtgtgtatgtgtacaaacatgtattttctgcaaatctcattatgctggctagagtgatgcagacttgttcttctttttaaagcagtctcaagaataagcatttctttaaaatgtttctgtgtataatctagtttattttcagagtccattttttcttatgtctttataaggttcacttaacttaaaaacagcttttaaaacaactttttatcttctgtcttgctatcattgttcctacttccctaggaagccctggctacctttcgcattaggaccagtctgggttttaaggctctgggaagcagggttggttagtaaagacaggaatgttggggagaggtgagtagttccttcctctttctcctctccaatttatgcttttaacttattttctacctggataaacttctggaacttggcttttaaatttaacttttctagtttttaagcagtttccaccttgctttggtctaatgcttttctttgaaatgctaacagaattcccaagctttttccagttctagatatctttactagacctttgggggactcttataatggagctgcttttgaaaagcactttaattagataatgtattttgactaaatcacgaggatgcccagtgagagcttctagctgatctcagaggaccagagtgactgagggtaaagtgtctcacagcccatgctgaattttctgcattttaaactgatactgcagtcattggagagagagctcctcatttctcgaatgaaagatgagatatattcatcctcatgtaccacatctgtcttagtgtttgcgtctggggtgtgttatcaaacagagcatggtctacatcccactgtgtcaaccagaagagccaagtgttatctcaattggcccagtgtttctccaggctggggactgttaagggctctaagggaatgtagacagagtctccctgttattctgacttcctgcttgatgagctttcagttcctgtttttgctattgtttcctaaatttgacctacatattacatgggtgtagtgtgtgaggcttttcaaagaagggtctagtgagctaagtttcatcttctggtactcattgatcaaactgacctttctattctcataagcgtttctacccaaagttgtgtgtggaaggagtgtatagcagagaggaaatccctttcaacagagtcagctgctaactgatttcctataagcacactggattaagggcacgccacagtggtttctactgtatgtatgaaccgaatggaggaatgttttcaaagattgatttggtgtggattgcacattgtaatggaaggcataacttgggatcccgggctgtaacttgctcttttgtttcccacccccctgacatgtatgtgtgctttaataaagctttctcacttgtcaaacgtttgtgtttgttagttctataaatgcttttgtctctgatgtcctcactgttgcttttcccctggcttgaaggataagaaccaaagtgataaatgctcttccctaaccatcctatgctgattgaagaaaattcacctttccccgcattgctgcctgataccttaaatgcctgatactttcgctgagcttgatccctcgtcctttgtatttggtatctaaggagaacactgagaaatcatctttaaagtggcaccacttttctatcttgtaacaaaggaactcttcctttagctttgcagaccctcctatactggaggaaggagagagatgttcatacaggaggtgaggggagacattccctgctataagcacttctttctggatccttcaatttctctgggaggcggggac

SEQ ID NO: 5939 - DNA, 994 bp, Homo sapiens
tagaacccaagcaattcttgacctcttgtgcaaaagggcattaatatatatcaaatgctttttatgtgcaaggcttcatatactatttctttaatttctccaaccactttatgaagtaggaaatcttccctttttacagatgaggaaactcaagcctactgtcacgtgacagagttgggctttgaatcaaagtctgactctactgcaccatgtggcctcctgtgagaatggtatgtgtgttatgggtgaagggtcaaaggaagacgtgactcatctcttctaaaatatcttaaataagttcaatttacaaaaagtaggacaatcagaatgctttggatattacctagccaacttagtgactgtactgcttgtgagtgagtgtgtgtgtatgtgagagagagagagacagagaaataggggagaggaataggcaggataagagagaatggggcagtggggagaagtgggggagaggtgggcagagagagaggtacaatatatacaggggtcgggctagcccctttgggtctggctgtgggtcatattctgctgctgtctctcccctactttaggagttgggatttctcaaatcctcatcttcaaaggactacaaaggaggttactgtaaaactttacctaaagaaagcaagactgacttgactattcaaaatgaaatgaaacaaaagctcctcagttgcatataaatgttccttgagtcaggtccaggtggagctctgttcaggaggtagtaggcctccgctgtttgggcctttgacctgctagtatgtcctggcttgccccatttgaagtgttagtgataaagacaacgaagggcattcatctcgcccaaggtgcagtctttgcctttggaaccacagagctagtctgaccagaaatttcccacatgaactcattgtatctgcctctgcccataacttgcctgctgcctctcacagttcccatatttccctggagggaagagggagaagggacc

SEQ ID NO: 5940 - DNA, 112 bp, Homo sapiens
cccaggttcaagtgattctcctgcctcagcctcccaagtagctgggattacaggcatgtgccaccatgcccagctaattctttgtatttttagtagagatggggtttcacca

SEQ ID NO: 5941 - DNA, 3729 bp, Homo sapiens
gatctaatgccttgaatcatactgaacagtacactgaagctgctggtaagtgttgttggatgtgactgttttggcacacacactcttcttctggtagtagctgcctttctgtttaacctactatttcactacataacatcacctcagtaaatactgcactgtggtgggcagttggagagccagttgagatacgggtagctaacctgtgaaattaaatacagcttaaataagtaaggaggtattttattttctctaccttttagggtcacaggaagctcagttctacactctgcggacggccaaagctctggcaatgacggcactggatgttatttttaaaccagagttactggaaggaatcagagaggactttaaactgaaacttcaagaagaacagtttgtaaatgcagtagaataaaagacttaggggccacttataaatcaagaagacgtgatgatttttttcttttaatctcttttaatgaaggcatgcttgttttttaatcttaaaggagtaaaattctttttacctgataagtgaggacagggtgtggagaaaacatattaattacctcatatctaaagtgaaaatttttgcaaatccgtacttgataggattatgatattacaggagctggtatgtgatgccattctttctttttttttaccccgcaaccactcaccttcacagtagtgataccatttcttaacctggaggatacatggcatcatttttataaaatatgttagtaaacctttttgtaagccttaaatgttatgtgtatttttaaaagcttaagagatttcaaaccttatattcagaattgacacccatgagagtgttttgtggtatagggtggtaaacttgttctctaatcgtatattaattcctctaccagattgtatatttgaagccagtgtctttcctttttttgttttaagatagagcctcgctctgttgcccaggctgaagtgtagtggcacaatctcggctcactgcaacctctgcctcccaggttcaagtgattctcctgcctcagcctaccaagtagctgggattacaggtgtgtggcaccatgcccagctaatttttgtatttttagtagagacggcatttcaccatgttggccaggctggtctcgaactcctgacctcaagtgatgcacctgcctcggcctcctaaagtgctgggattacaggcatgagccaccgcacccggcctgccagtgtctttttaatacacatgtgtgttggtatttttaaattgttacagtatctagcatattgcttactctgaatattcagtactttttgaataagcaaatattgcttccttgcttggaatcatcagagtttaaagtagcttcgtggatggaccatgatcctaagatgagttttaattttgtgtttacagtcatctcttgtacaacgtggaaaaaaaaagatatacttactactttgcttcaggtacacataagaaaacctcttttttaaaaaaatttttatttttttacataatagagacaggggctcgctgtagcttccaggctggcctcaaactcctgggctcaagcaatcctcctgtcttggcctcccaaagtgttgggatttcaggtatgagacaccacacctgcccatttttgtttggttttttaatgggcaggttcttgctctcccaggctggagtgcagtggtgtaatcacagctcactgcagtctcgaactcctggactcaagcagtcctcccacctcaacctcctaaagcactgggattacaggcttgaggcactgcacctggccctgaccatttttttaaaaggttaggcttagtacaaagtttaaattatacgattcttaagatactgcattagtttctaccataaactaaaggtataggtggacccgcttgaggtatctttgtttttatggaacatttttattacaagcctttataatttttcattgttcacaaccctgtactgaaacctttttctcaaataccaactcttggctatgttaaatttgtagactttaaaagatgttatctaaattaatggtttaaatatacaaattgaaaatattttctttttagtggcaattttaaaagcaggccttaatatgggacctgcttttaaagtaaaatatgtggtactatgaattactaaattgctatataccatgtaatagtgagtatagctaatatttagtatgccttttaaaaattttggactgcttttcggttttaacaaattctccacatgtgaactactcaagaaattttccctttgtaattgcctctatagcactcataagagctagggcattaggataaactagaatattttatgtttatgaatacttgtataaacttaaaagtgttttgatttcccacaatttcccaaaggaatgtttatttattcagagttgtgttgataatttaactgttacaatttcagcagttgcactcagtaaacactggttgaggagtgcctatttctaagcactgggtgtaagaagaaaagacacttgcaaaggaagagctaagattaacataatttctttggtttttctattgcttgttattattatgtaaaaactgggtggcagttcacaaggaagattgttgtaacagaagagtgacaaccaatagttttttgatcattaaatcaaattttgtaaacagtggcaggagcgtggacttaaaacaaggcttgcttatttggttttgtcaaagttttacgaaaatatatgatatatatttatactaaaactatataatccttagatttaggaaagcaatcagttaatgtctttagcacactaaagcagtattaaacacaggtacaagttggaaattgtagaaaactgaaagaaaacaagacaaaatgtctatggtagggaataaaagagtttaagatattatgtaaaattatgtgtattttcttctcttttacataaattgtttgtgaaaagtgtgctcaacttttttacaagagtgatattaacttggatttatttttcaatataatttggagaccctttgttatccaaataaaattgatgagtttctgtgcctgtaaaaaaaaaaaaaaaaaaagaaaagaaaagaaaagacactgttgcatgccccagaaagcttgtggtgggtggtaagttctcacgagatttatttatctgagcaacattgggactgagggaacatctgaaagctaccatcttgaaaatttttgaggaagtgtttctgaaatatttaaaaatacttaagtcagtcattttgaacaaaagaaattgatacaataagtttttttttttaaggatgattgtctaattttgtaatatgttgttttttaaaaacctgtctgatggtgttttatacatttctaactttttactgagttatctctttagtcttttggaaaataccctacccaacactaacctttaaaactatcaaatttttgttataagataaatgttatctttgtactagatagcaaccctttataaggttgtaaggtataataaactgcttatttttttacatccttcaaatcaagcattaaacagtccaattatatagttgagcccctggtgtattttaatatgtatgaagttaatattttcaagaaaacaatcagtctactaccatcagattataagcttttttgtaataataggtacataaaatgtgtatgaaaaatctacaataaacatgttaatctgatagcaa

SEQ ID NO: 5942 - DNA, 732 bp, Homo sapiens
gaaagtctaggcttatctctgcttgcattaattttcattaaggaaagactccatactgaatgaatgaatgcttttcacaacaaagggaggtatggatgtattcccaaaggaatattccttgtgtgtgtgtgtttgtgtgtgtgtgagacaaatttccctctctatttctctcactatcttcagagctgaaaaatacagccttttcatctctctcatgatttggacattgtatttgtttttcttttaattattcttagtttataatttctgtgccaatagtactttcttttttggtttctttgtggatatttgtgttttaaaatcctgatttgctttggaagattattttaatcaggaaggcttttcaaaatagctggttcaataccattttgccagaactgatatcaacctgctttcaggtattgcataatcaatgctggctgataattttagatctgatttattcttctttggaagaggtaatttattcttctttggaagaggtaatcaagagaggaggtgaagattaggagggtgaagacccagtggagtctttccttaacgaaaattaatgcaagcagagctaagcctagactttcttcaacttgtatgttaaagatcaatacctctctcccatgctttatgcccccattctgatgtgtgaataaatatattatattatatattatatatgttttattttcactctttgaatatgttaatctggtagtt

SEQ ID NO: 5943 - DNA, 726 bp, Homo sapiens; identical to SEQ ID NO: 5921

SEQ ID NO: 5944 - DNA, 103 bp, Homo sapiens; identical to SEQ ID NO: 5922

SEQ ID NO: 5945 - DNA, 3955 bp, Homo sapiens
gacctgccgaggtcggcagcacagagctctggagatgaagaccctgttcctgggtgtcacgctcggcctggccgctgccctgtccttcaccctggaggaggaggatgtgagctgggttggcgtgggcggatggaggagccaggcggactcctgggcagggggcagtgccaggggccctgctttaggaggtgtcactgaaggctggcttctgaccccgtgctcccagcctggggtggtggtggaggggtcctattgttcctccagcagacacggccccccgaggcccagggccggagcaggctcgtctcaggggttcctgctgcactgacgcctgaagcccgaaggtctcgcagggttgggccctgtggagggagggctcacctggtgctggggcccgggggtccatggggtgcagacatgccctccttccactgggggctgggagccctgagcagggggctggctctaactcactccagctgagctctaactaaggtgcaggaacacagcctgcctttaagggcagcagccgggcaccatgggtgtctggttatagctgcaggcctgagtgccagggtcagagtagaatctgggccacccatggtgggctcacggccttggcctgctccagatcacagggacctggtacgtgaaggccatggtggtcgataaggactttccggaggacaggaggcccaggaaggtgtccccagtgaaggtgacagccctgggcggtgggaagttggaagccacgttcaccttcatgtgagtgttgcccactgcagggcccctcaggccactttcgctcccctccccagacccacctggtgcccattgccccatccacgtttcgggtgttgggaagagtcaccccctgccttggagggaaacagcctgggcatcctgaagctcggtggggtgggggacagtggaattttcaggttgccgggtcagggccatgcaccaggtgagctgaggatgggccatgggtgtcctgggagccgctgcccgcgtgtctcctgttttccaggagggaggatcggtgcatccagaagaaaatcctgatgcggaagacggaggagcctggcaaatacagcgcctgtgagcccctcccccactcccacccccaccctcccccaccgccaaccccagtgcaccagcctccacaggtagagagtgcccaggctgcccttttgccagggccccagctctgcccacctccaaggaggggctggcctctccttcctggggggctggtggccctgacatcagacaccgggtgtgacaggcttgtccgcagtcgagatggaccagatcacgcctgccctctgggaggccctagccattgacacattgaggaagctgaggattgggacaaggaggccaaggattaggtacggggaggctgagggttagggatggggaagctgagggttaaggatggggaagctgagggttaaggatggggaggctgagggttagggacgggggccaagggttagggatcgggaagctgagggttagggatgaggaggccgagggttagggatggggaggccgagggttagtgctgcggaagctgaggattagagatggggaggctgagggggaagatgagggttagggacagggaagtggggcaggagcagctgctggagctgggaaggccggactctagtcctggacgtgctctggccttgtggctccattacttgcattgggaccttcctgagaggaggctcctgcctccgtgtccgggtccacactgtgcggagcagccaggcctggctcaggctgtccagggcacctgggtgaccgctgaaacattcccgagtgtttcttcatgtggccccgagtgttctctctgggaatgacccattttctctgtcatctacagatgggggcaggaagctcatgtacctgcaggagctgcccaggagggaccactacatcttttactgcaaagaccagcaccatgggggcctgctccacatgggaaagcttgtgggtgaggggcttgctggggtctgcgtgtcctgccccacggtctctgcctctggaagccggtggaaccagcaccaccatgccctggcatgggggaaaaggaagccccctgtgccggctttcatgtgccgggcaccgctgggcagccggtccaagtacctgaagtgggaatgggatgggccaggcagggacagacatggccctcagtgacatgaacctgccaagggccacttctggggtctcgggtgtaggagggtcaccttaagggggagggtcaccttaagcgtcctaagagagctcttcatggggcagggaccctccagggcaggagggtggccggtgcctctgggagacaaggtccctccaggtgagggctgtgaccctgcagggtggcattgggagctgcccaggtcccctggggttgccgagtggcttggagagtccccgccactgtcccccttcctggggacctctcatctgggcagtgactgtctcctctgtccccagtcccacccctgagctctcatccattctcaagtctcctctcctgcttgtccggtgctgggctatggccatctcttctgtccccggccccaccccagagctctggtccactcttgggtctctccccttgtcctggtgctgggcagtggccatctcctctgtccccagccccacccccgagctctgatccactctcaggcctctccccctgtcctggtgctgggccgtggtcgtctcctttcggcatctgctccctgcagggccgtgccgctgtccccacgtcggctcacctggccacctcacctgcaggtaggaattctgataccaaccgggaggccctggaagaatttaagaaattggtgcagcgcaagggactctcggaggaggacattttcacgcccctgcagacgggtgaggatggctgtgcccagtcccctgtgtccctctgctgtgtctgtctgctatctccagtgtcccatgacccccatgtcctcccatgtcccccgcattccccatgtgccccgagtctcctcgcaggggctcccgggccctgtttagcgtcctcctcattggaggctctgtgctctgggctgcgatggggtctggggctccgcgctctgggctgcgatggggtctggggctccgcactctgggctgcgatggggtctggggctccgcgctctgggctgcgatgggctctggggctctgagctctgggctgtgatggggtctgggccctggtctagggcgccttctaatccctgggtttttcttggtctctgcaggaagctgcgttcccgaacactagggtgagtgagcctttaggagggcactggacaagcccagagtcctgggttcccggggttcgagggtacatctgctctggcccctcccatcccacacagccagggagacccccccagggtcaggcacgaggttggcacctcagagtctgcccacccacagttcctgggacattcgggaagtcctttgttttatcattcctgcacctgccagcccgagtgagggtcctcctcggcctttccacagcgaggcctccctccggctccctcaggtgtcagctcagcccatcgccccctgcacctgtccccacgcggtccactccccaccatccacccaccaaggatgctcagaggcctgcccagtcattggaggagctgaggtcgctctggagccccgaggttgcccagcagtggccgatgtgggggctgcagagcctggggagggagctctggccctggcctctgccctaccctgcagcctccctgacctctgctcctcttcccagcacagcagcccccgggtctgcacctccagagcccaccctaccaccagacacagagcccggaccacctggacctaccctccagccatgacccttccctgctcccacccacctgactccaaataaagtccttctccccca

SEQ ID NO: 5946 - DNA, 3952 bp, Homo sapiens
ctgccgaggtcggcagcacagagctctggagatgaagaccctgttcctgggtgtcacgctcggcctggccgctgccctgtccttcaccctggaggaggaggatgtgagctgggttggcgtgggcggatggaggagccaggcggactcctgggcagggggcagtgccaggggccctgctttaggaggtgtcactgaaggctggcttctgaccccgtgctcccagcctggggtggtggtggaggggtcctattgttcctccagcagacacggccccccgaggcccagggccggagcaggctcgtctcaggggttcctgctgcactgacgcctgaagcccgaaggtctcgcagggttgggccctgtggagggagggctcacctggtgctggggcccgggggtccatggggtgcagacatgccctccttccactgggggctgggagccctgagcagggggctggctctaactcactccagctgagctctaactaaggtgcaggaacacagcctgcctttaagggcagcagccgggcaccatgggtgtctggttatagctgcaggcctgagtgccagggtcagagtagaatctgggccacccatggtgggctcacggccttggcctgctccagatcacagggacctggtacgtgaaggccatggtggtcgataaggactttccggaggacaggaggcccaggaaggtgtccccagtgaaggtgacagccctgggcggtgggaagttggaagccacgttcaccttcatgtgagtgttgcccactgcagggcccctcaggccactttcgctcccctccccagacccacctggtgcccattgccccatccacgtttcgggtgttgggaagagtcaccccctgccttggagggaaacagcctgggcatcctgaagctcggtggggtgggggacagtggaattttcaggttgccgggtcagggccatgcaccaggtgagctgaggatgggccatgggtgtcctgggagccgctgcccgcgtgtctcctgttttccaggagggaggatcggtgcatccagaagaaaatcctgatgcggaagacggaggagcctggcaaatacagcgcctgtgagcccctcccccactcccacccccaccctcccccaccgccaaccccagtgcaccagcctccacaggtagagagtgcccaggctgcccttttgccagggccccagctctgcccacctccaaggaggggctggcctctccttcctggggggctggtggccctgacatcagacaccgggtgtgacaggcttgtccgcagtcgagatggaccagatcacgcctgccctctgggaggccctagccattgacacattgaggaagctgaggattgggacaaggaggccaaggattaggtacggggaggctgagggttagggatggggaagctgagggttaaggatggggaagctgagggttaaggatggggaggctgagggttagggacgggggccaagggttagggatcgggaagctgagggttagggatgaggaggccgagggttagggatggggaggccgagggttagtgctgcggaagctgaggattagagatggggaggctgagggggaagatgagggttagggacagggaagtggggcaggagcagctgctggagctgggaaggccggactctagtcctggacgtgctctggccttgtggctccattacttgcattgggaccttcctgagaggaggctcctgcctccgtgtccgggtccacactgtgcggagcagccaggcctggctcaggctgtccagggcacctgggtgaccgctgaaacattcccgagtgtttcttcatgtggccccgagtgttctctctgggaatgacccattttctctgtcatctacagatgggggcaggaagctcatgtacctgcaggagctgcccaggagggaccactacatcttttactgcaaagaccagcaccatgggggcctgctccacatgggaaagcttgtgggtgaggggcttgctggggtctgcgtgtcctgccccacggtctctgcctctggaagccggtggaaccagcaccaccatgccctggcatgggggaaaaggaagccccctgtgccggctttcatgtgccgggcaccgctgggcagccggtccaagtacctgaagtgggaatgggatgggccaggcagggacagacatggccctcagtgacatgaacctgccaagggccacttctggggtctcgggtgtaggagggtcaccttaagggggagggtcaccttaagcgtcctaagagagctcttcatggggcagggaccctccagggcaggagggtggccggtgcctctgggagacaaggtccctccaggtgagggctgtgaccctgcagggtggcattgggagctgcccaggtcccctggggttgccgagtggcttggagagtccccgccactgtcccccttcctggggacctctcatctgggcagtgactgtctcctctgtccccagtcccacccctgagctctcatccattctcaagtctcctctcctgcttgtccggtgctgggctatggccatctcttctgtccccggccccaccccagagctctggtccactcttgggtctctccccttgtcctggtgctgggcagtggccatctcctctgtccccagccccacccccgagctctgatccactctcaggcctctccccctgtcctggtgctgggccgtggtcgtctcctttcggcatctgctccctgcagggccgtgccgctgtccccacgtcggctcacctggccacctcacctgcaggtaggaattctgataccaaccgggaggccctggaagaatttaagaaattggtgcagcgcaagggactctcggaggaggacattttcacgcccctgcagacgggtgaggatggctgtgcccagtcccctgtgtccctctgctgtgtctgtctgctatctccagtgtcccatgacccccatgtcctcccatgtcccccgcattccccatgtgccccgagtctcctcgcaggggctcccgggccctgtttagcgtcctcctcattggaggctctgtgctctgggctgcgatggggtctggggctccgcgctctgggctgcgatggggtctggggctccgcactctgggctgcgatggggtctggggctccgcgctctgggctgcgatgggctctggggctctgagctctgggctgtgatggggtctgggccctggtctagggcgccttctaatccctgggtttttcttggtctctgcaggaagctgcgttcccgaacactagggtgagtgagcctttaggagggcactggacaagcccagagtcctgggttcccggggttcgagggtacatctgctctggcccctcccatcccacacagccagggagacccccccagggtcaggcacgaggttggcacctcagagtctgcccacccacagttcctgggacattcgggaagtcctttgttttatcattcctgcacctgccagcccgagtgagggtcctcctcggcctttccacagcgaggcctccctccggctccctcaggtgtcagctcagcccatcgccccctgcacctgtccccacgcggtccactccccaccatccacccaccaaggatgctcagaggcctgcccagtcattggaggagctgaggtcgctctggagccccgaggttgcccagcagtggccgatgtgggggctgcagagcctggggagggagctctggccctggcctctgccctaccctgcagcctccctgacctctgctcctcttcccagcacagcagcccccgggtctgcacctccagagcccaccctaccaccagacacagagcccggaccacctggacctaccctccagccatgacccttccctgctcccacccacctgactccaaataaagtccttctccccca

SEQ ID NO: 5947 - DNA, 641 bp, Homo sapiens
aactgcttggttcaggactgctgcttcagatgatctggctcttgtagtttgagtaatgctagctcctataatcaatgaactgcatatcagtggtggcttaatccagaagaaatttctttctttctcacatgatgtttttggtcagtaggtgactctcctgtcatgtgccaaggttcccttcctctcaggctctaccatattcaacttggatcttaaaaagtcacacttgagatcatctctattcttttcatactgaagtggaaaaaacatggaagattgtgcatgggagattttagtgcttgcctgaatgtggtgcacataacttctatttacattactctggctagaaatcagtcacatgtccacacctagcttcaaagaaagatctaagctgtgtgcccaggaatgagagtcaatgagtttgctaaatagctatccaggcttcgacatatctctcaactctgtatactgcaactagacaggagacaccacattgccacgacccacccagacatctgggatacaacctgtcagctgggctcatagagcctccacctcccacttccttcatgtattcctgggccaagataactttccttcagtgttttccaatatttcattatacaaactgtgcatgtgtg

SEQ ID NO: 5948 - DNA, 641 bp, Homo sapiens; identical to SEQ ID NO: 5947

SEQ ID NO: 5949 - DNA, 641 bp, Homo sapiens; identical to SEQ ID NO: 5947

SEQ ID NO: 5950 - DNA, 24983 bp, Homo sapiens
gagcgacgcccacggcctgtctcggccaccagcgtgttccagcgagcgcccagccacctcgctcgcagcctccccagcgcagcagcccggctgtgggcctgcggcagccgggtcttcctggtccccacctcctggggccgacgggcggcaggaaggggctcggcgggacgcgccatcagggacctgaggaggaacaacggaacgcgttcggaacggcctggactcccgagactcacccgactcgtggccacaccgggagaactgaagcggcagtagccggcggagacgcccgacccgaaggccggctgctagggagcagacagctgaaccgcttgccagacgccgaaacccagtgacgccctccaccgctccaccgtgctcccggctcctcgcccccgccgcccgcgggccccaaggcgcatgcgccgcctgtcctggaggggcccatttccgtccgtcgtggggggaggcacagtgagtccactggggcacggcagcgtctaagccacaagccgagcacataagccaggtcctaacggagcctatgtgtaagtccactactggtgcaaggttgcacacttctaagaagagcggcgtggggggctcggcgaccttcgcttcagtcgctcccccgtgcagtcccctgtgcccaagacacagcctgatgcttgtgctccggtgggcggagcttggaggcggcgggaactgcaattggtggctttgaaggcgcggcgagcgggaacagctcttgaggagtgagactgcaggagatgtgggccggtaagagagccccgggcggcactggatcgggccccggagggtgtggggccttgaggaagccagatcccaggcctcgggggtggctttttcgcaattgtcgcacgttgtgaggcgcaggattggcgctgggtctcgggctcggggcgaggaactacggttcgggccgaggtgagggggcggtggcgctgtgccggctgtgacgtcacctcgcccgcggtggggcgggtggagcctttcgtaggctcgcgactgcgtcaggggagggccgtgtggtcatgtgaccaggggctccgctctacgatcctggggttgcttcctttcccagagttggggttttgcttttctgtcacctcggcttccgtcgtcttttgtccctgtaccctcttgcgttgctcctcgcattgcctgttggagcgcagcagaggtgtgtggctacgggaacgttacttaaaatggatctttttgatcatgcgttccacagatcttgagcatctactgtatgtcagacactaaaacgctaggaagtataaagaaagttttaaaatggggccaggcgcggtagtttacgcctgtaatcccaacactttgggagaccgacgtgggcggatcaccttaggtcaggagttcgagaccagcctggccaacatggtgaaaccccgtctctactaaaaatacaaaaattaaccggacgtggtatcgggtgcctgtaatcccagctatttgggaggctgaggcaggagaagcgcatgaacccgggaggcggaggttgcagtgacccgagatcgcgccactgcactgcaccctgggcgacaaagcgagactgtgtctccgaaacaacaaaaaaaggaaagtttaaaaatggtcacggggtaaacgtttactaaagggatttccgtcttaattggtgagactgagggcgctctaccaaatttctttagactggcgttctgcaaactttacccggaataaatcatctgacgtactttttaaaagatgctaaatctcaagccctccgtgcgccctcctcacagtttaatttgatagggcccaggaatcttcattttaacgggtagcctcgtctgtgggtttttttgtttgttttttgtttttttgagacggagtcttgctttgtcgcccatgttggagggcagtggcacgttctcggctcactgcaacctcctcctcccggattcaggctgttctcttgcctcagcctcccgagtagctgggactagaggtgtgcgtcacgacacccggctaatttttgtatttctagtagagacggagtttcaccatgttggcctgggtggtcttgaacgactgacctcaagtgatacaccacgcccggcgcgctcccggcccctcgcccgtgttcttaatgggagaggtgttgatttgatgtttcactgactgttgaaccccaaaccacccaggttgtctcctcaggcattcattccacaagtatttatcaaagacacattagactgttcttggcctgattagacttactgactatagtgaggcagttctggtctaggagtatagctgtgaataaaaacatcgtcctgccctggagctcaattttagaaacaagaaaagttaaaaagataatttcagatagttctgtaaagacaattagcagtggttggctgggcgcagtggctcatgcctgtaatcccagcactttgggaggttgaggcgggtggatcacttgaagccaagagttcaagaccagccaggccaacacagcaaaacgctgtctctactgaaaatacaaattagttgggtatggtggtgcctgtctgtaatcccagatactcgggaggctgaggcaggagaatcatttgaatctgggaggcagaggctgcaggaggctgcagtgagcagaaatcccactactacactctaatgtgggtgacccagcaagattccgtctaaaaaaaaggaaaaaaacaattagcagtggagagtggggaagtaacttttggttgggtggtcaggataagtctgaggagaaaccatctaagctaacaccagaattgcaagaagtcactggagagaacatgtgcaggaagaaccttctaggcagttgtaactgcaggcacaatggtccttctctagagattatttaagagactagtgtagttggagctcagaaaaccaaggagagggaagcaggggccacgcaacacggggccttgtagaccatggtgaaggctttagatggtccagtaactacacaaagaaacaaatccgactcctgtttcatgatcctgattctgttcctacgaccttaattcagttatttttctatttctaaatgactcctaatccttcctctttatctttgtcttactatcattttcagtatattgttaaaatacagtcaactatttcttttcagaagtggacaaggataatttttcagtgttcaacaaataagtcacagccaggactcttgtaggaagatacttctttgtccctggaattcccacagttgtgaaggaaacagatgactgacaggcttgtcttaaacacagatgccaaggtctgtgtgtgccttcctagaagacacactgttaagggacattaaagtatgcgggtggtaccctgcattgtataaaaatcatgtttgcagaccacgcgcggtggctcacacctgtaatcccagcacttcaggaggccgaggagggcagatcacttgaggtcaggagttcgagaccagcctgggcaacatggtgaaaccatgtctctactaaagatacaaaaattagccaggcgtggtggtgcacgcctgcagtcctagctacctgggaggctgaggcaggagaatcacttgaaccaggcaggggaggttgcagtgagccgaggttgcaccactgcactccagcccgggcgacagagtgagactctatctcaaatgaaaaaaataaataaatatcatgtttgcttgcttttttgttctgtatttgaagagagagagagagatgctcactggtgtccccaaataaagtagcagacgtgagatcagctgtcaccattggctcacaacttctgccaaaggaaaatgataaaagagctcagaatcttccttccttattcctgcagccgctaggtcattcttctggagattatatcccttgcctattgataagggaggcacaccagatttggggctcaggaccttatagacaattaaggaatctcaccctcaggcatgggcaggagaagtgagggaggaaagagctctttgttcacaggcggtgcattaaaggactaagagacagcaatccactgcaccactagctcttagcatgtcctgtggagtcacagatccagctgtttattcggtatctccatttggactctcatctttatcttaatattaacagattcagaacagaattacagaattcttgagctttctcctgcctctctcgcagtcttggccgtctcagctaatagtaactttgtcttttagttccctggtaaaaaccttggtttcatctttggttcttttcttgatctaacaccccacatgtaatccatctggaaaccccgtgagttccctcttaaaagtgtatccagaacctgacctcttcccctgcctcactaacctccaacctctgccctcgcctccttacactgcgttctcagtacagtagcgagattgatcctggtagaaaagctaaacaagagcatgtcctgcctgtgctcagcaccttgcagagtgaaaacagcagtgatccccgcagtgcctttcaaggccctccatgatgactgacctcacctccttctctatgcctccttcctgtctctgctgtcccctgactggaggccacccttccctgttcctcgaaggccccaagcaggctcttgcctcaggacttttgcacatgctgttccttctgcctggaaagctcttccaccacatgactccttctcctacaaggattgcccccaagtcatgttctctatgatgcctactctctccagcactcccacgctcaactcagcctgccaaaattattccattttctccggcactcctcacttttaacatagtttgtgatttccctgttgtttctctctccccactagaatggatgtgccatactggaacagatgtttgtctttttggccaaagacatatgtatccccagtgcctagaaaagggcctggcatgcacagatcctcagtaaggggttacatgaatcagtaaatgaatgaatgatttatatatcatcaccatcaaaacatcaaaatactctagccagaaaaggagagatagcactaatttttaaactctaaaacatttaaatatacattaaggagaaaataattaaatgctcatgctaaaacactgcaaaatagctgaaaaagtgtaaacatttaggtgttggacctacaaatcaaaatcccagctaaatatgatgccgatggccaggcgcagtagctcacgcctgtaatcccagcactttggcaggttgaggcgggtggattgcttgagcctaagagttcaagaccaacgtgggcaatctagtgagaccctgtctctatttttcatatgtgtatgtgtatgtgtaaataaagacagacaagtattgtatttggttaatactttgttgtgctgtttttgttttgtaaaagtgccaaagagatggatgagactgttgctgagttcatcaagaggaccatcttgaaaatccccatgaatgaactgacaacaatcctgaaggcctgggattttttgtctgaaaatcaactgcagactgtaaatttccgacagagaaaggaatctgtagttcagcacttgatccatctgtgtgaggtaacagtgttaaaaatgatgagccttgaacagagtgctacccccttgggtttttctttcttctattccttactccaaaagagatgtaaggtagctgctaaactactagtgaagtgatgagggctatatacaactgcagtggaaaaaaacctaatttttaattgaccttttcatcttaaaagaatgcttaaaaatcaataagatggaaaaagtaaatatagtagaaaaaacagtacaaattaaaataacgagcagtatttttcgcagtatttttttaaacctatcaaattatcaaggatgaaaagacaacaacacccagatgtattggcaaacttgtaaggaaagagactctgtctttcatgtgtatttatctctttaattgcttattgttttaaaatgttttcagactatcagaaaagttgcaaatttagttcaaataattttcttattccaatatacccgtctctccttcacttttatttatttattttttatttatttttgagacagagtcttgctctgtcatccatgctggagtgcagtggcacaaactcagcttactgcaacctctgcctcccaggttctagcgattctagtgcctcagcctgctgagtagctgcgactacaggcacgcaccaccacactggctaatttttgtattttcagtagagacgaggttttgccatgttggccaggttggtgtcaaactcctgacctcaggtgatctgctcactttggcctcccaaagtgctgggattacaggtgtgagccaccatgcctggcctcctttgcttttaaataaatatactttttgacctagcaattctacttacagaaatttatgatgagaaaataataaaaaataggaggtatgtataaatattgataaatatttagttatataaatgaagatgcattgtagcattgttttaaaaacaaaacacgttcacataaagacgtgtgtactaatgttcacagcaacattattcataaaagccacaaactggaaacaacccaaatgtccatcagcaggtaaacagatgaacagattgtgatgtttccatacagtggatatactcagcagtaaaaaggaatgaagtattcatagatgctaacatatggatggatatcaaaataattgtgctgagtaaaagccagaccaaaaaaatgagtacacacttatgttaacattcatataaacctctagaaaatgcaaacaaatctgtaatgacagaaagcagatcagcgtttgccttaggactaaggcttgggaggtagagacatgggaaccaagaagagtggaaggaagtgggcggtgataagaaagggacacaagactggactcagtggctcctgcctggaatcccagcactttggaaggccaaggcaggcagatcatttgggttaggagaccagcctggccaacatggtgaaaccccttccctactaaaaatacaaaaatcagctaggcatggtggtgcacacctgtaatcccaactccttgggaggctgaggcaggagtatcacttgaaactgggagacaaaggttgcagtgagctaagattgcgcgtttgcactcctgcttgggcaatagagcaagactctgtctccaaaaaaaaaaagagacacgagaaaatctgggaggcagtgctggtggatattgtcactgtcttgattgtggtagtggttttgtgtgtatattcataagtcaaaatgtatcaaattgtatactttaaaaatatacagtttaatggatgataattatacttcaataaagttaatttttaaaaaatcaaaaagttaaaagtgataaatgaggaataaattgtgagagaaggttgtggactaagacatgaatcagaaagaatgtccattggttaacaggagaagagattggagatgggttgtcagtaaagtactgagaatgtgctaatagtctgttctaaccaatcctaaaatgtgttttaaacgggatagaaccaaacctataaccacagttactaaataatttgttttctcttttaggaaaagcgtgcaagtatcagtgatgctgccctgttagacatcatttgtaagtgtcagtgatttgtatttatacttaaccaatcagtttattagaggcaattttgtttctttctttgtgagacagggtctccctctgtcgcccaggctggagtgcagtaacgccatctcagctcaccgcgacctctgcctcctggattcaagtgattctccaacctcagcctcccgagtagctgggactatagcagtgcaccaccatgtatggctaattttttgtattttttgccacaaggttttgccgtgttgcccaggctggtctccagctcctgggctaaagtgttcctcctaccaaagtgctgggattataggtgtgaaccgctgtacttgtcccagaagcaattttgtatataacgcctcagagtctagagttcaggagaccttgtttcaaatcccagtatgtcactcagccgtatgttctttgacaagttgcatcacctttctgagcctcagacttcaagcagagataatagtacattatctacttcacggtattcttgttaggattaaatgaggtagtgcccgagaagctgttagcatggtaactggcacatcagaaacacaaagtaaatgtttggctttgtattactcaggttgccaacttacaacagctcaacttaaaaattttcaactagtatgaaagcagcagacattcaacagaaaccatactttgagttcctatacaaccattcttttctcactttcagtacagcatttagtaagttacatgaggtatgcaacagtttatgatagaagactctgttggatgattttgctcaactgtaggctaatgtaagtgctctgagcacacataaggtaggctgggctaagctaagatatatgaaggttaggtgaattattttcacctcaaggtggatttatcaggcatagcccatcataagtcaagaagcatctgtattattattaaaggatttgaaaatatctttctgaaaatttgttcctattacagtgtagcttctcacctctcctcccttccatttcattgatttttgtctagctttcctgtctgtactttttcaagatgtctgttttttttatcagaaggcagcataatataggggctgagaacacaggccctggggccagacctcttgggttcatttcatggctccgttactgcctccctgtgagccctggaggaagttggttaacatctctgtggcataccgacatctctggtattatcatttgaccaatctgtataatagtgataatatcacataaggttatggtgaggattaaataagagtacatgttaaatacttaaagcctggtattaactaattgcaatcattatgtattagctgttttctgtaagtgtaacaaaaattatctttattaatactttgctccaactcatggcatgctccaattcagctattgctgaatttggagcatctgcctctgatttagtttgtctcattttcagtggttggattctctcaagcataaaaggtggatccacaccattcccatttctcatacattgattcaaaaattcattaagcacctggctggacgcagtggctcacacctgtaatcccagcactttgggagaccaaggcaggtggatcacctgaggtcaggagttggagaccagcctggccactatggtgaaaccccatctctactaaaaatacaaaaaattagccgggcatgatggcaggtacctgtaatctgctattcgggaggctgaggcaggagaatcatttgaacccaggagacagagattgcagtcagccaagatcacaccactgcactccagcctggcgacaccgtgagactctgtctcaaaaaaaaaaaggaaaaagaaaagaaaacctggtctgaagtccagaggcacagacagaggtcagtgcagagacaattttaagccagaaggatgaagggatatggttgaacttgctaacttcctaggtccatttctactccaagacactccaagtttgtaactcctgaaaggtgttttctgtcatatacttattcattcattcgttcatcaaacatatactgaagcctggtgtggtggtgtgggacacttgggaggctgaggcaggaggattgcttgagcccgcgagttcaagtctagcccagttaacatagtgagaccctgtctcttagaaaaacaaaacaaatattgagtgcttgctttatgccacgcagttaagtttagacctgggactacaacagtgaacaggtccctcatttccatcagagtctaactggaaagacaggcagtgtacaaatgaacatctaaataaataatgtggctgggcacgatggctcacgcctgtaatcccagcactttgggaggccaaggtaggtggatcacccgaggtcaggagttcgacactaacctggccaacatggtgaaacctcatgtctactaaaaatacaaaaaattagccaggcgttgtggcaggcatgtgtaattccagtactcgggaggctgaagcaggagaatcggttgaacccgggaggcacaggttgcagtgagctgagattgcactattgcactccagcctgggcaacaagggtgaaactccatctcaaaaaataataataataaatacacacatacatacatacatacataatgtgacatcaggtagtgatgagtcctccgacaggaactgggaactaacgcagggtgtttggggtagggtgatccgggcggggactactctgagtagagagcagaatgaggtggggagtagggtgtgtaaggagctaggagaagaggctccaggcagaggaacagctggctcaaatgtgggtcctgtggggcacagcattccctgtcgtgccagattaatgtggcattctgtggaatggaataaatggaatgtggaaatggaataaatgggctaacatagaataaataccaaaactcaactgtattatctaagtcagttgaattaagtaattatgatttgctttatttatatgaagtactttaatccatataaagtttatattttgaatacaaatctgtataactcaatttgtgaattactgttactttccccagttttaaagtatagaaatatctataagcatattacttcaaagttctatgatatgctagtaataaagctttcttccctctctcagatatgcaatttcatcagcaccagaaagtttgggaagtttttcagatgagtaaaggaccaggtaatattttctgtttacaattgaatatttgatagtttggcttggactcaggaagcagaggttacagcgagctgagattgcaccactgcactccagcctgggtaacagagcaagactctatatccaaaaaaaaaaaatagcagtatgttcctcatttctttcaaaatgaggtgattatttattactcacttttggaaaatgagaaacatacttcttggtgccatgtcagaagtactagcaccatttgtgtgatttgatcattattactctggaattatacaaaatgcttagtttcatggtactttacgaatgtatttactgaagacattgtagctcccttgatttttctttatttttttttcactttggcaggtgaagatgttgacctttttgatatgaaacaatttaaaaattcgttcaagaaaattcttcagagagcattaaaaaatgtaagaataaaattcatcttttacataaaattcaatgtcatgacgtctgtgcacttaaaatttgctactatcatagtttttttttaatttgtaagaaattcagttagtaatagttcatacggttctactccatatcagaaacacactgtaaatattatgaaaacttccctttcctctctcctgtccattcagggcctgaggcttctttttccagaggagctcagtccaacagagctttctgcagtgatggaaatgctctgtattggcactgttcagttcagccacatgtagctgctgagcacttgcggctagtgtgactgagcagctgaatttttaatctttttttttttttctttccttgagacagagtcttactctgttgcccaggctggagtgcagtggcgagatctcggctcactgcaactgcctcctgggttcaagcaattcttctgcctctgcctcccgagtagctgggactacaagcacgcaccaccatgcccagctaatttttgtatttttagtagtgatggggtttctccatgttgaccaggctggtctcgaactcctaacctcagatgatctgcctgcctcggcctcccaaagtgctgggattacaggtgtgagccaccgcacccagcctgaatttttaatctttttaaacttcaatgattttttacattaaatagccacatgtagctagtagttccagtaatagtcagtgcaaacctgaagcacccttgattttacagatgtttttgcttttttaatgtaaaacaaagaagctattcagaataagacaatcttccattcaaggcagtagaggcccactgagcatgtgactgggtccaagctctatgatgctcactcaggaaagtcagacagctgtgtgccgccataccctggactggggagactttcttgtctcctgcactgagggaatttggaaaagctgctaaagaatgagcagaatttgctagtgccactgtaacaacccacttttcctagaacaagatctcagagggaggaaacagagacgtgggcaagctgagtgcatctcactcaagtccctcctttctaggctcagagctttaaagggaagctgaatcagaggggagctgataatccaggagcagcctattaaattccagaccaattggcaaccatatttaaaagtttggaaaggcctgtattttatccatgaagtggattcaaggtagtacctctggtcttgccatgtaacattcttttagaggagtttttagcttctgagctaaatgcataagagcattaggaatagtatattttcaagcccattattacatagaaatcttctttaagcccattatgacatagaaatcttctttttcttcttctttttgttttgtttttgtttttttttggaaacgtggtctcactctgttgcccaggctggaatgcactgacatgatctcggctcactatagtctagacctcccaggctcaagccatcctcccacctcagcctcttgagtagctgggactataggcacatgtcaccgtgcctggcttttttttttttttccggtagatactgagtttcactatgttgtccaggttggtctcaaaactcctgggctcaagcgatcctcctacctcagcctcccaaagtgctaggattacaggcataagccacaacacccagcctaattacatagaaatcttactgttaaagtttatagcgtgtgctaggtctgggttagatgctaagaaggcttcattataaaacaagtatctcatttgtaaggctgccttacctcataaattcttacgtaaggaggaacagttttcagacaagcccaagaaattattgaaaaaacaatcacctctacaaaaaaaaacttttttaaaaaaattagccaggcatgatggcacgtgcctgtggtctcagctactagggaggctgagatgggattgcttgagcccaggaagttgaggctgccgtgagcaggctatgatcatgccacagcactccagcctgagcaactgagcaagacctagtctcaaaaaaaaaaaaagaactgaaaaggattttttttttttaaaatcacaaaatgttttcccaaagattctcaaaatactcatgaaaagcagaaaagactgccaggtctcaacctgcatacaagagtatagggacatcattgttcacccctaataagcacctggagttggtgccacagtgaaattttaattaggaaattaagccttttttttttttctttaataaggtgacagtcagcttcagagaaactgaggagaatgcagtctggattcgaattgcctggggaacacagtacacaaagccaaaccagtacaaacctacctacgtggtgtactactcccagactccgtacgccttcacgtcctcctccatgctgaggcgcaatacaccgcttctgggtcaggtatggaaaaaattattacaagctataatattttattatcctatctcaaaggtctatatagattttaactgttgaataagtatttgatagagaatactaggccaggtgcagtggcatgtacctgtggtcccagctacttgggaggctgaagtgggaggattgctcgtgcccacgagtccaaggctgccgtgagctgcgatcacaagacaaagcaacaccccacctctaaaaaaacaaaaaaaagatatagaataccacatgtaattcttgttctcctaaaataagaaacagagtgttgttatctgcagatgggaacatggcataagatattagattggagctatattttattgttttttgatctagaaataatgcatacttaatataaaaaaatgcaaccgatacagaagtctctaaagataaaaagtcttcaaagcttcataccccttttccctattccgttcgttcaaaataactactgtcaaagtttgctatttcctttgacaagatggttattagaaaagccagggtaggccaggcgcggtgctcatgtctgtaatcccaatactttgggaggccgaggcaggtggatcacctgaagtcaggagtttgagaccagcctggccaacatggtaaaaccctgtctctactaaaaatacaaaaaaattagccaggcgtggtggtgggcacctgtaatcccagttacttgggaggctgaggcaggagaattgcttgaacccgggaggcagaggttgcagtgagcccatatcgcaccattgcactccagcctgggcaacgagaaagaaactccgtcttaaaaaaaaaaaaaaattaacataacatttccacgtggttacaaatgaatatacctcattactttttcataattgtataatttgcttattaatgaacattattttcatttgtaaccatttctcccacattccatacacaaggagactgctttcacataagatgtagcctctgttccgagcctgcttctctttatggttctgcctttaatatcacaggcttcctagcatctttccccaaagttagttctccctaaattggcctggcacttgctgctaccactgttagcattcacaacctcagtggcaccttcaattggttccagagctgccacatcagctggttgtaggcgagcagctccaccatcctggctgcatcatgtcctgtcactccacagcagagtggggtggaggtgcggtgtggagtaccaaggactccactgttgtgaccaggcgagccctaggtagtaaatgactacttgcttgtcatttaagttttttggtggtttattgaaatggcaaagactgctactcacttctatttccttaaaacacttctttacatttggggtctcctgctccatgatacatagtggtctttcatccacttatagccaggtgagtacaccttgccacaggtagtttaaacattaccccaaaggctaatgttctttttttttttttgagacagggtctcactctgtcacccagggtggggtgcagtggggcgatcttggctcactgcaccctccacccccaaggttcaagcgattctcctgcctcagcctcccaagtagctgggactacaagcactcaccactatgcctggctaacttatttttctatttttagtggaggtggggtttcaccatgttgcccaggctggtctcaaactcccgacttcaagtgatccacctgccttggcctgccaaagcgctgggattacagccgtgagccactgcgcggactaatgttcatttctattgtgtatcttaaggcaaacttgtctgttctctagatcaggttaaacatcttatcctatcatagtaattctgtttcagtcttcttttcccctaatgacaggaaactcttatgagctgtattcaatacacacttatttcttcagtatttgccaaaaagcatacatatctgcgtttttgtatggcaatatcattatggtattagatgactgatattcaaaaacagtaacattttgagtatttattgtttattccaaagtctgaacttgatttattagtaactcctaactttaaacaggatcgcttttctaagaaatgatacaaaagactgcatttatcagagtattaatgccattaaccactttgtttttgaagctcagtaacaggctatcagatgtttttctagacttctttttacacttacggggaaactattccctaattgcagctcttacattttactttgacaagtattataaacacagaggcagtaatcctagtaatagtcttgcaaattttcatttcaaggcgctgacaattgctagcaaacaccatcagattgtgaaaatggacctgagaagtcggtatctggactctcttaaggctattgtttttaaacagtataatcaggtgagccaatcagtgactctctttaaaggtaaatctttattttctctttgacacaggagttagaagctactgggaaaatctacctccgacaagaggagatcattttagatattaccgaaatgaagaaagcttgcaattagtgaacatgaaaggaaaataaaaattcctcacagtcatctttttataattgtattgtgttttataccactcattagtcactggagtctgtgttgtagatctcagcttccaaatcacctgatcacactagaatttgttttctctttagagaaacttcacattatcttttgaagctaaatatattattctatgaaacaacagagaagtagaattaactttttgtcccatcactcaagcaggttatacaggcactggaattaaagggaaaagcagtggttttttaaatcccaaagttcatttgttaaaataatttgaatgtaatgttcccctctaatgacaaatacagatctgtccttacagatgcaggggtgttttttcaaactatgcatggcagatgtctgcatatgtgttgacactcctgtgagtggattgttaatgctctgtgtatatctttgagccactagagatgttatacttctgtattttcatctgttctaagcagaaagaagtgacagctctctgcaagcagtccctctttaaggaaaaactaacattaagaagttatatcatgaggccaggcacagtggttcacgcctatgatcccagcactttaggaggccaaggtgggaggaatgcttgagcccaggagtttgagatgagcctgggcagcatagggagaccacatctctacaaaacaaaaaataaataatatatattttttaaacttagatcatgattttcttctctagccatcccctcctacctactaccctctcaccaaattgatataaactgttctgctataatacgacagtagtggccaggcaccatggctcatgcctgtaaccctagctctttgggaggccaagaagggcaaatcccttgagcccaggagttcaagaccagcttgggcaatatggcgaaaacccgtctctacaaaaaatacaacaaataaccaggcatgccgggcgcggtggctcacacctgtaatcccagcactttgggagtccgaggcgggcggatcacaaagtcaggagatcaagaccatccttgctaacacggcgaaaccttgtctctactaaaaatacaaaaaaattagccaggcatggtggcgggtgcctgtagtcccagctacttgggaggctgaggcaggagaatggcatgaaaccgggaggcagagcttgcagtgagtggagatagtgccactgcactccagcctgggcgacagagtgagactctgtctcaaaaaaaaaagtagccaggtgtggtgccgcatgcctatagtcccagctacctgggaggctgagttaggaggatctccaaagcccagggagactgaggctgcagtgagccatgatcatgccactcactccagcccgagcaacagactgagatattgtctaaaaaaaaaaaaaagacagtggcattcttacgaaaatccacgttgtcaagcacagaactataaaaacaatggattcagtgggtgaaggtaggagaaggggttcaagagattcagacttacagtaggaaagttatttttccaatctcagtaagttttttagggttatgaagattgagcactgacgacgctgaaataccacagtgcaaatgcttccgtagattccctgggctctgcactcaccagatccatttctatgataaagcacagagctcctcaaacagaacagtcgagttgcaggctcagcagcctccttgtcagtgtcctgctcaactcagccaactcagccaggatatggctttggatctttctgttggaaaaaaataaacatttgacatactttaatatactaaaaaaaaaattaatatctgtacttcaagatgtcaagattagtaaaatattcacttttttttccctagacctttgaaactcacaactctacgacacctctacaggaaagaagccttggactagatataaatagtacgtgtgtgttaatatgaaactgaattttggaaatgcatcattcccttatagatttctttcacttggtaaaacgtgtatagtaggatcctaatttaaaacttttattgttttcagaaaaattgaaaagtaaatatctgttgaaggaggaaagctaatctaccatagttctcctttagaatttactagaataacaataaacaacaaaacaataattacaaaaacaaaagttagctaatagttgttgagcatttcttgtgtgccaggcaccacactaagatgtttatatgtattctttccttaatcttcacagtagtcctgtgaataagcgccattcatcaggaaactgggtttcagggaggtatggtaactctctaggcaaagtcacacagctaaggagtggcaaaactgggagtaaaatccaggtacgtctggatctggagcccatgctcttaatgcgctggataaacttctagaacaatgagaatcatgactgtattgctactcacagatgtctgaagtctctcactagaaaacccaagagaaaagagtacagaactactaaagtaaatttacaaaagtggtggggtaaaataaaaattcataaaaaaatgaaaactttcctatctcttagtagagatttggcaatgaaatgaaacagtgccactgttataaactaaacacttttatgattttccagtgtcataggaactgctgttgatctcatcttaggtaaagaaatcaggatataaaattgtgtgtatcttacgattccagttttaaaaatacataggtgaggctaggaacaatgttatgcatctgtggtcccggctacttgggaggttgaggagggaagatcacgagcccaagagatccagtccagactgggcaacatagtgagaccctgtctctctttttttttttttttttttttttttttttaagacagagtctcactctatttcctaggctggaatgcagtagcatgatttcagctcactgcaacctctgcttcccaggttcaagcgattctctttcctcagcctcccaactatctgggactacaggcgcctgccaccacacctggctaatttttgtatttttagtagacatgggatttcactatgttggccaggctggtctggaacttctgacctcaagtgatcctcccgcctcagcctcctgaagtgctgggattacaggtgtgagccaccgtgcccagccgagaccccatctcttaaaaaaaatacatatataggctgggtgccatggagatatatatatatatatatgtgtgtgtgtgtgtgtgtgtatatatatgtgtgtgtatatatatatgtatatatatgtgtgtatatatatatgtatatatatatgtgtatatatatgtgtatatatatgtgtgtgtatatatatgtatatatatgtgtgtgtatatatatatacacatatatgcatctttatttttattcactgtaaaaagagctaggcaaaaatatactaaaatgctaacagtgcttatctctgggtggtagaattatgatttttattttctcttttatcaacctgtacttcactaccctaagaaacttccctacactaagaaattattacagccaagagaagaagcagtaaatattattttaaaattatacaaacaattcgaagggttaggaatgaaaggaggataatttaaggatgaaatatattcctaacggctgttttatttgaaatcttccacccatagtggattcaaggatcattcatgaaaacatagtagaaaaagagagagtccaacgaataactcaagaaacatttggagattatcctcaaccacaactagaatttgcacaatataaggtaagatgtcgtaataaatattaagtacaagatatcaacattgtttaaaaagaacaaaaaccttaagtggaaaacagatctaagaaactgttcctttttcacttgtcacttaaatttcatgtaataaatttatgaattaaatagacctctttattgtatttataagttcctctgttagcaaaagagacctttagaaattatgaatctgggctgggcgtgatggctcactgcaacctctgcctcccaggttcaagcaattctcctgcctcagcctcccgagtagctgggattacaggcacctgccacctcacctggctaatttttttttttggagttttagtagagacggggtttcatcgtgttggccagactggtctcgaacggctggcctcaggtgatccaccttgcctcggcctcccaaggtgttgggattacagacgtgagccactgcgcccagccataagttgataattattttacctgggtgatgtgcacatggggctcataccgtgctccttacttttgtatatgtttaaaatcttccataattagaagttaaaaagatatctcagttgggcacagtggctcacacctataatcccagcactttgggaggctgaggcgggcggatcccttgaacccaggagactgagaccagcctgggcgacacagcaaaaccctgtgtctacaaaaattcaaaaatacaaggtgtggtggcatgtggctgtggtcccagctacttgcactgaagcgggagaatggcttgagccagggaggtcgaggctgcaatgagccatgttcgtaccactccaacttgggcaacaaagtaagactctgtctcaaaaaagaaacaaagaaagaaatctcagtgtgactcaaaaaaaatgtggtatttttacattgaagttacagattgcaaaagatagcactaattttccattaagaatgcaaactgtaaagggcacctgagggtggaactgacagtcagtatctcccatgtagcaggcactgtgcatgctggcattttgccttggatgttgtttgatacaccagttgccctctatgttttgttttgtttttttctgagatgcagtttcactctgttgcccaggctggagtgcagtggcaccatcttggctcactgcagcctccgcctcctgggttcaagcaattctcatgccttggcctcctgggtagctggaattacaggtgcccaccaccatacccagctaattattgtatttttagttaagacggggtttcaccatgttggccaggctggtctcaaactcctaacctcaagtgatccactcgccttggcttcccaaagtgctgagattacaggcatgagccactttgcccgacctgccctctatgtttgcagttagcagattaaatggtccccacccctgttaattcctgtatttcttaatggcaagaattaatgaaacgtatcattatgatttcattatattttaccattcgtatttatacaatatgtttaatagtcatttataaatgtttgttgacagcttgaaacgaaattcaaaagtggtttaaatgggagcatcttggctgagagggaagaacccctccgatgcctaataaagttctctagcccacatcttctggaagcattgaaatccttagcaccagcgggtgagtggtcagcttactctataagctagaaaaattaacaacatgcctccattccatccttataatctgctaattacttctgagctcacccatcaccctagtctgctagcccatcctgctctctcttgcatcttctgcttctgtacttaatagggaggaggggcatctatgatccaccctctaatctcagccatttttaaactgactcaaatccatcctcctgtgatgacttttaattttctttttcccttttttttttttttaatttcaggtattgcagatgctccactttctccactgctcacttgcatacccaacaagagaatgaattattttaaaattagagataaataagacgtgcgtggtttcttaagcacagctcctccttcttgatattgcacatgcacttcagttcatggctagctgtatagcttccgtctgtaaacttgtattttcaagaatccttggtattgaatttttagaaatgctcacataattgttgggactgattcattcctccacgatatgcctcctctctctgatatcctgctaactgtagccgttgtggcatttgagatgacaggacatatatatatatggccccacacttgaccttgagtgcctgaatgctctgaaatcaagcatatggcacagcgctcaagacttttgggtttgtgtccttttttctatggctgtctcttctcaattctggagaggtctggttccagtggctggtttccagggattgattcttaagctctggatcacagagagaagcaacaaggaactatactcaactcaaaactttttaggagaatcatgaaattggtctattcaaaggatggagttgagtccattctgttattgttgcaagaggttgcatatttggtgagtcagttatataaaatagtgttcttattgtaaatatgatacttctcataatctattttatcatgtgtataacattcaaactgacaaatatattgacttatgaataaaggtgtcaaaaaactggcacatcagttaattttgatcaaagtacttcagtgatcatcactaaataccctatctttttaaaaattttttcctttctaattttttatttctttatttatttattgagacagggtctcactgtgtcacccaagctggagtgcagtggcatgatcatggctcactgcagcctggacctcccaggctcaagtgatccttccacctcagcctcccgaatagctgggattacagacgcgctccatcctgcccagctaattttttttttgtttgttttttgttttttgagacaagtctccttctatcgcccaggctggagtgcaatggcacaatcttggctccctgcaacctctgcctcctgggttgaagagattctcctgcctcagcctctgagtagctgggactacaggcctgcaccaccatgcccagctaatttttgtatttttagtagagacagggtttctccatgttgcccaggctgatctcaaactcctgggctcaagcaatctgcccattttagcctcctaaaatgctgggattataggagtgtattagtctattctcatgctgctaataaagatacctaagactgggtaattcacaaaggaaagaggcttaactgacgcacatttccacgtggccagggaggcctcacaatcatggtggaaggcaaatgagaagcaaagtcatgtcttacatggcggcaggcaagagagcttgtgcagggaaactcccatttataaaaccaccagagctcatgaaacttattcactaccatgagaatagtatgggggaaatcgttcccatgactcaagtatctccacctggccctgcccttgtcacatgggggttattacaattcaaggtgacacttgtgtggagacacagccaaaccatatcacaggcatgagctaccacgcccgccagcatgtcttttttaaacattttaaaatctattctttatcttgtttcagagaggatttggagttacagaaacacattagactgggcatggtggctcacacttgtaatcccagcacttcaggaggtttctcctagtgtactctcacacttctgataccagatatgtgggggaggggtttcccccacacattaagcaagtgtgaaacatgatatagaaaaatgacttcactctgggccgggtgtagtggctcacgcctgtaatcctagcactttgggaagccgaggtgggcagatcacccgaggtcaggagttcgagaccagcctagccaacatggcaaaaccttgtctctactaaaaatagaaaaattagttgggggtagtggcagccgcctgtaatcccagctattcgagaggctgaggcaggagaactggttgaaccggggaggcagaggttgcagtgagccaagatcatgccactgcactctagcctgggtgacagagtgaaactctgcctcaaaaaataaaataaaggccaggcatggtggctcacgcctataatcccagcactttcagaggccaaggcaggtgggtcacaaggtcaagagtttgagactagccttagcaacatggtgaaggtgaaccccgactctactaaaaatacaaaaattagctgggcctggtggtgtgcacctgtaatcccagctacttaggaggctgaggcaggagaatcgcttgaacccgggagacataggttgcagtgagccgagactgcaccactgcactccagcctaggtgacagagtgagactccatcttaaaaaataaataaataaaataaaataaatgacatcactttggttcagagctctaaaatggagggaggaagccattctaaaaaggactccctacatgacctgcaacttgaaaaaaaattaaaagctccaaaaaaaaaacaatacaggagcttaccttgaacctttgaattgggccaaattgcgatgaccactgcatcctggaaaattttatttcaccagcactacaactcctcaacagcaccaaccaataaactatggatttttgtactaagccagttgcctctttcaaaacaacttgtcaacttgtctaatcaccctcagctttttttaaaaacccctcctctaccctctctcttcagaacacaagtggcttctagctgaatctgtctcccaaattgcaattcctaagacctcaataaaaacaccttgtcttgctgc

SEQ ID NO: 5951 - DNA, 24977 bp, Homo sapiens
gagcgacgcccacggcctgtctcggccaccagcgtgttccagcgagcgcccagccacctcgctcgcagcctccccagcgcagcagcccggctgtgggcctgcggcagccgggtcttcctggtccccacctcctggggccgacgggcggcaggaaggggctcggcgggacgcgccgtcagggacctgaggaggaacaacggaacgcgttcggaacggcctggactcccgagactcacccgactcgtggccacaccgggagaactgaagcggcagtagccggcggagacgcccgacccgaaggccggctgctagggagcagacagctgaaccgcttgccagacgccgaaacccagtgacgccctccaccgctccaccgtgctcccggctccccgcccccgccgcccgcgggccccaaggcgcatgcgccgcctgtcctggaggggcccatttccgtccgtcgtggggggaggcacagtgagtccactggggcacggcagcgtctaagccacaagccgagcacataagccaggtcctaacggagcctatgtgtaagtccactactggtgcaaggttgcacacttctaagaagagcggcgtggggggctcggcgaccttcgcttcagtcgctcccccgtgcagtcccctgtgcccaagacacagcctgatgcttgtgctccggtgggcggagcttggaggcggcgggaactgcaattggtggctttgaaggcgcggcgagcgggaacagctcttgaggagtgagactgcaggagatgtgggccggtaagagagccccgggcggcactggatcgggccccggagggtgtggggccttgaggaagccagatcccaggcctcgggggtggctttttcgcaattgtcgcacgttgtgaggcgcaggattggcgctgggtctcgggctcggggcgaggaactacggttcgggccgaggtgagggggcggtggcgctgtgccggctgtgacgtcacctcgcccgcggtggggcgggtggagcctttcgtaggctcgcgactgcgtcaggggagggccgtgtggtcatgtgaccaggggctccgctctacgatcctggggttgcttcctttcccagagttggggttttgcttttctgtcacctcggcttccgtcgttttttgtccctgtaccctcttgcgttgctcctcgcattgcctgttggagcgcagcagaggtgtgtggctacgggaacgttacttaaaatggatcttttcgatcatgcgttccacagatcttgagcatctactgtatgtcagacactaaaacgctaggaagtataaagaaagttttaaaatggggccaggcgcggtagtttacgcctgtaatcccaacactttgggagaccgacgtgggcggatcaccttaggtcaggagttcgagaccagcctggccaacatggtgaaaccccgtctctactaaaaatacaaaaattaaccggacgtggtatcgggtgcctgtaatcccagctatttgggaggctgaggcaggagaagcgcatgaacccgggaggcggaggttgcagtgacccgagatcgcgccactgcactgcaccctgggcgacaaagcgagactgtgtctccgaaacaacaaaaaaaggaaagtttaaaaatggtcacggggtaaacgtttactaaagggatttccgtcttaattggtgagactgagggcgctctaccaaatttctttagactggcgttctgcaaactttacccggaataaatcatctgacgtactttttaaaagatgctaaatctcaagccctccgtgcgccctcctcacagtttaatttgatagggcccaggaatcttcattttaacgggtagcctcgtctgtgggtttttttgtttgttttttgtttttttgagacggagtcttgctttgtcgcccatgttggatggcagtggcacgttctcggctcactgcaacctcctcctcccggattcaggctgttctcttgcctcagcctcccgagtagctgggactagaggtgtgcgtcacgacacccggctaatttttgtatttctagtagagacggagtttcaccatgttggcctgggtggtcttgaacgactgacctcaagtgatacaccacgcccggcgcgctcccggcccctcgcccgtgttcttaatgggagaggtgttgatttgatgtttcactgactgttgaaccccaaaccacccaggttgtctcctcaggcattcattccacaagtatttatcaaagacacattagactgttcttggcctgattagacttactgactatagtgaggcagttctggtctaggagtatagctgtgaataaaaacatcgtcctgccctggagctcaattttagaaacaagaaaagttaaaaagataatttcagatagttctgtaaagacaattagcagtggatggcctggtgcagaggctcacgcctgtaatgccagtactttgggaggccgaggcgggaggatcacttgagattgggagttcaagaccagcctgaccaacatggtgaaaccccatctttactaaaagtagaaaaattagttgggtgtcatggtgcacacctgtaatcccagatactcgggaggctgaggcaggagaatcatttgaatctgggaggcagaggctgcaggaggctgcagtgagcagaaatcccactactacactctaatgtgggtgacccagcaagattccgtctaaaaaaaaggaaaaaaacaattagcagtggagagtggggaagtaacttttggttgggtggtcaggataagtctgaggagaaaccatctaagctaacaccagaattgcaagaagtcactggagagaacatgtgcaggaagaaccttctaggcagttgtaactgcaggcacaatggtccttctctagagattatttaagagactagtgtagttggagctcagaaaaccaaggagagggaagcaggggccacgcaacacggggccttgtagaccatggtgaaggctttagatggtccagtaactacacaaagaaacaaatccgactcctgtttcatgatcctgattctgttcctacgaccttaattcagttatttttctatttctaagtgactcctaatccttcctctttatctttgtcttactatcattttcagtatattgttaaaatacagtcaactatttcttttcagaagtggacaaggataatttttcagtgttcaacaaataagtcacagccaggactcttgtaggaagatacttctttgtccctggaattcccacagttgtgaaggaaacagatgactgacaggcttgtcttaaacacagatgccaaggtctgtgtgtgccttcctagaagacacactgttaagggacattaaagtatgcaggtggtaccctgcattgtataaaaatcatgtttgcagaccacgcgcggtggctcacacctgtaatcccagcacttcaggaggccgaggagggcagatcacttgaggtcaggagttcgagaccagcctgggcaacatggtgaaaccatgtctctactaaagatacaaaaattagccaggcatggtggtgcacgcctgcagtcctagctacctgggaggctgaggcaggagaatcacttgaaccaggcaggggaggttgcagtgagccgaggttgcaccactgcactccagcccgggcgacagagtgagactctatctcaaatgaaaaaaataaataaatatcatgtttgcttgcttttttgttctgtatttgaagagagagagagagatgctcactggtgtccccaaataaagtagcagacgtgagatcagctgtcaccattggctcacaacttctgccaaaggaaaatgataaaagagctcagaatcttccttccttattcctgcagccgctaggtcattcttctggagattatatcccttgcctattgataagggaggcacaccagatttggggctcaggaccttatagacaattaaggaatctcaccctcaggcatgggcaggagaagtgagggaggaaagagctctttgttcacaggcggtgcattaaaggactaagagacagcaatccactgcaccactagctcttagcatgtcctgtggagtcacagatccagctgtttattcggtatctccatttggactctcatctttatcttaatattaacagattcagaacagaattacagaattcttgagctttctcctgcctctctcgcagtcttggccgtctcagctaatagtaactttgtcttttagttccctggtaaaaaccttggtttcatctttggttcttttcttgatctaacaccccacatgtaatccatctggaaaccccgtgagttccctcttaaaagtgtatccagaacctgacctcttcccctgcctcactaacctccaacctctgccctcgcctccttacactgcgttctcagtacagtagcgagattgatcctggtagaaaagctaaacaagagcatgtcctgcctgtgctcagcaccttgcagagtgaaaacagcagtgatccccgcagtgcctttcaaggccctccatgatgactgacctcacctccttctctatgcctccttcctgtctctgctgtcccctgactggaggccacccttccctgttcctcgaaggccccaagcaggctcttgcctcaggacttttgcacatgctgttccttctgcctggaaagctcttccaccacatgactccttctcctacaaggattgcccccaagtcatgttctctatgatgcctactctctccagcactcccacgctcaactcagcctgccaaaattattccattttctccggcactcctcacttttaacatagtttgtgatttccctgttgtttctctctccccactagaatggatgtgccatactggaacagatgtttgtctttttggccaaagacatatgtatccccagtgcctagaaaagggcctggcatgcacagatcctcagtaaggggttacatgaatcagtaaatgaatgaatgatttatatatcatcaccatcaaaacatcaaaatactctagccagaaaaggagagatagcactaatttttaaactctaaaacatttaaatatacattaaggagaaaataattaaatgctcatgctaaaacactgcaaaatagctgaaaaagtgtaaacatttaggtgttggacctacaaatcaaaatcccagctaaatatgatgctgatggccaggcgcagtagctcacgcctgtaatcccagcactttggcaggttgaggcgggtggattgcttgagcctaagagttcaagaccaacgtgggcaatctagtgagaccctgtctctatttttcatatgtgtatgtgtatgtgtaaataaagacagacaagtattgtatttggttaatactttgttgtgctgtttttgttttgtaaaagtgccaaagagatggatgagactgttgctgagttcatcaagaggaccatcttgaaaatccccatgaatgaactgacaacaatcctgaaggcctgggattttttgtctgaaaatcaactgcagactgtaaatttccgacagagaaaggaatctgtagttcagcacttgatccatctgtgtgaggtaacagtgttaaaaatgatgagccttgaacagagtgctacccccttgggtttttctttcttctattccttactccaaaagagatgtaaggtagctgctaaactactagtgaagtgatgagggctatatacaactgcagtggaaaaaaacctaatttttaattgaccttttcatcttaaaagaatgcttaaaaatcaataagatggaaaaagtaaatatagtagaaaaaacagtacaaattaaaataacgagcagtatttttcgcagtatttttttaaacctatcaaattatcaaggatgaaaagacaacaacacccagatgtattggcaaacttgtaaggaaagagactctgtctttcatgtgtatttatctctttaattgcttgttgttttaaaatgttttcagactatcagaaaagttgcaaatttagttcaaataattttcttattccaatatacccgtctctccttcacttttatttatttattttttatttatttttgagacagagtcttgctctgtcatccatgctggagtgcagtggcacaaactcagcttactgcaacctctgcctcccaggttctagcgattctagtgcctcagcctgctgagtagctgcgactacaggcacgcaccaccacactggctaatttttgtattttcagtagagacgaggttttgccatgttggccaggttggtgtcaaactcctgacctcaggtgatctgctcactttggcctcccaaagtgctgggattacaggtgtgagccaccatgcctggcctcctttgcttttaaataaatatactttttgacctagcaattctacttacagaaatttatgatgagaaaataataaaaaataggaggtatgtataaatattgataaatatttagttatataaatcaagatgcattgtagcattgttttaaaaacaaaacacgttcacataaagacgtgtgtactaatgttcacagcaacattattcataaaagccacaaactggaaacaacccaaatgtccatcagcaggtaaacagatgaacagattgtgatgtttccatacagtggatatactcagcagtaaaaaggaatgaagtattcatagatgctaacatatggatggatatcaaaataattgtgctgagtaaaagccagaccaaaaaaatgagtacacacttatgttaacattcatataaacctctagaaaatgcaaacaaatctgtaatgacagaaagcagatcagcgtttgccttaggactaaggcttgggaggtagagacatgggaaccaagaagagtggaaggaagtgggcggtgataagaaagggacacaagactggactcagtggctcctgcctggaatcccagcactttggaaggccaaggcaggcagatcatttgggttaggagaccagcctggccaacatggtgaaaccccttccctactaaaaatacaaaaatcagctaggcatggtggtgcacacctgtaatcccaactccttgggaggctgaggcaggagtatcacttgaaactgggagacaaaggttgcagtgagctaagattgcgcgtttgcactcctgcttgggcaatagagcaagactctgtctccaaaaaaaaaaagagacacgagaaaatctgggaggcagtgctggtggatattgtcactgtcttgattgtggtagtggttttgtgtgtatattcataagtcaaaatgtatcaaattgtatactttaaaaatatacagtttaatggatgataattatacttcaataaagttaatttttaaaaaatcaaaaagttaaaagtgataaatgaggaataaattgtgagagaaggttgtggactaagacatgaatcagaaagaatgtccattggttaacaggagaagagattggagatgggttgtcagtaaagtactgagaatgtgctaatagtctgttctaaccaatcctaaaatgtgttttaaacgggatagaaccaaacctataaccacagttactaaataatttgttttctcttttaggaaaagcgtgcaagtatcagtgatgctgccctgttagacatcatttgtaagtgtcagtgatttgtatttatacttaaccaatcagtttattagaggcaattttgtttctttctttgtgagacagggtctccctctgtcgcccaggctggagtgcagtaacgccatctcagctcaccgcgacctctgcctcctggattcaagtgattctccaacctcagcctcccgagtagctgggactatagcagtgcaccaccatgtatggctaattttttgtattttttgccacaaggttttgccgtgttgcccaggctggtctccagctcctgggctaaagtgttcctcctaccaaagtgctgggattataggtgtgaaccgctgtacttgtcccagaagcaattttgtatataacgcctcagagtctagagttcaggagaccttgtttcaaatcccagtatgtcactcagccgtatgttctttgacaagttgcatcacctttctgagcctcagacttcaagcagagataatagtacattatctacttcacggtattcttgttaggattaaatgaggtagtgcccgagaagctgttagcatggtaactggcacatcagaaacacaaagtaaatgtttggctttgtattactcaggttgccaacttacaacagctcaacttaaaaattttcaactagtatgaaagcagcagacattcaacagaaaccatactttgagttcctatacaaccattcttttctcactttcagtacagcatttagtaagttacatgaggtatgcaacagtttatgatagaagactctgttggatgcttttgctcaactgtaggctaatgtaagtgctctgagcacacataaggtaggctgggctaagctaagatatatgaaggttaggtgaattattttcacctcaaggtggatttatcaggcatagccccatcataagtcaagaagcatctgtattattattaaaggatttgaaaatatctttctgaaaatttgttcctattacagtgtagcttctcacctctcctcccttccatttcattgatttttgtctagctttcctgtctgtactttttcaagatgtctgttttttttatcagaaggcagcataatataggggctgagaacacaggccctggggccagacctcttgggttcatttcatggctccgttactgcctccctgtgagccctggaggaagttggttaacatctctgtggcataccgacatctctggtattatcatttgaccaatctgtataatagtgataatatcacataaggttatggtgaggattaaataagagtacatgttaaatacttaaagcctggtattaactaattgcaatcattatgtattagctgttttctgtaagtgtaacaaaaattatctttattaatactttgctccaactcatggcatgctccaattcagctattgctgaatttggagcatctgcctctgatttagtttgtctcattttcagtggttggattctctcaagcataaaaggtggatccacaccattcccatttctcatacattgattcaaaaattcattaagcacctggctggacgcagtggctcacacctgtaatcccagcactttgggagaccaaggcaggtggatcacctgaggtcaggagttggagaccagcctggccactatggtgaaaccccatctctactaaaaatacaaaaaattagccgggcatgatggcaggtacctgtaatctgctattcgggaggctgaggcaggagaatcatttgaacccaggagacagagattgcagtgagccaagatcacaccactgcactccagcctggcgacaccgtgagactctgtctcaaaaaaaaaaaggaaaaagaaaagaaaacctggtctgaagtccagaggcacagacagaggtcagtgcagagacaattttaagccagaaggatgaagggatatggttgaacttgctaacttcctaggtccatttctactccaagacactccaagtttgtaactcctgaaaggtgttttctgtcatatacttattcattcattcgttcatcaaacatatactgaagcctggtgtggtggtgtgggacacttgggaggctgaggcaggaggattgcttgagcccgcgagttcaagtctagcccagttaacatagtgagaccctgtctcttagaaaaacaaaacaaatattgagtgcttgctttatgccacgcagttaagtttagacctgggactacaacagtgaacaggtccctcatttccatcagagtctaactggaaagacaggcagtgtacaaatgaacatctaaataaataatgtggctgggcacgatggctcacgcctgtaatcccagcactttgggaggccaaggtaggtggatcacccgaggtcaggagttcgacactaacctggccaacatggtgaaacctcatgtctactaaaaatacaaaaaattagccaggcgttgtggcaggcatgtgtaattccagtactcgggaggctgaagcaggagaatcggttgaacccgggaggcacaggttgcagtgagctgagattgcactattgcactccagcctgggcaacaagggtgaaactccatctcaaaaaataataataataaatacacacatacatacatacatacataatgtgacatcaggtagtgatgagtcctccgacaggaactgggaactaacgcagggtgtttggggtagggtgatccgggcggggactactctgagtagagagcagaatgaggtggggagtagggtgtgtaaggagctaggagaagaggctccaggcagaggaacagctggctcaaatgtgggtcctgtggggcacagcattccctgtcgtgccagattaatgtggcattctgtggaatggaataaatggaatgtggaaatggaataaatgggctaacatagaataaataccaaaactcaactgtattatctaagtcagttgaattaagtaattatgatttgctttatttatatgaagtaactttaatccatataaagtttatattttgaatacaaatctgtataactcaatttgtgaattactgttactttccccagttttaaagtatagaaatatctataagcatattacttcaaagttctatgatatgctagtaataaagctttcttccctctctcagatatgcaatttcatcagcaccagaaagtttgggatgtttttcagatgagtaaaggaccaggtaatattttctgtttacaattgaatatttgatagtttggcttggactcaggaagcagaggttacagcgagctgagattgcaccactgcactccagcctgggtaacagagcaagactctatatccaaaaaaaaaaaatagcagtatgttcctcatttctttcaaaatgaggtgattatttattactcacttttggaaaatgagaaacatacttcttggtgccatgtcagaagtactagcaccatttgtgtgatttgatcattattactctggaattatacaaaatgcttagtttcatggtactttacgaatgtatttactgaagacattgtagctctcttgatttttctttatttttttttcactttggcaggtgaagatgttgacctttttgatatgaaacaatttaaaaattcgttcaagaaaattcttcagagagcattaaaaaatgtaagaataaaattcatcttttacataaaattcaatgtcatgacgtctgtgcacttaaaatttgctactatcatagtttttttttaatttgtaagaaattcagttagtaatagttcatacggttctactccatatcagaaacacactgtaaatattatgaaaacttccctttcctctctcctgtccattcagggcctgaggcttctttttccagaggagctcagtccaacagagctctctgcagtgatggaaatgctctgtattggcactgttcagttcagccacatgtagctgctgagcacttgcggctagtgtgactgagcagctgaatttttaatctttttttttttttctttccttgagacagagtcttactctgttgcccaggctggagtgcagtggcgagatctcggctcactgcaactgcctcctgggttcaagcaattcttctgcctctgcctcccgagtagctgggactacaagcacgcaccaccatgcccagctaatttttgtatttttagtagtgatggggtttctccatgttgaccaggctggtctcgaactcctaacctcagatgatctgcctgcctcggcctcccaaagtgctgggattacaggtgtgagccaccgcacccagcctgaatttttaatctttttaaacttcaatgattttttacattaaatagccacatgtagctagtagttccagtaatagtcagtgcaaacctgaagcacccttgattttacagatgtttttgcttttttaatgtaaaacaaagaagctattcagaataagacaatcttccattcaaggcagtagaggcccactgagcatgtgactgggtccaagctctatgatgctcactcaggaaagtcagacagctgtgtgccgccataccctggactggggagactttcttgtctcctgcactgagggaatttggaaaagctgctaaagaatgagcagaatttgctagtgccactgtaacaacccacttttcctagaacaagatctcagagggaggaaacagagacgtgggcaagctgagtgcatctcactcaagtccctcctttctaggctcagagctttaaagggaagctgaatcagaggggagctgataatccaggagcagcctattaaattccagaccaattggcaaccatatttaaaagtttggaaaggcctgtattttatccatgaagtggattcaaggtagtacctctggtcttgccatgtaacattcttttagaggagtttttagcttctgagctaaatgcataagagcattaggaatagtatattttcaagcccattattacatagaaatcttctttaagcccattatgacatagaaatcttctttttcttcttctttttgttttgtttttgtttttttttggaaacgtggtctcactctgttgcccaggctggaatgcactgacatgatctcggctcactatagtctagacctcccaggctcaagccatcctcccacctcagcctcttgagtagctgggactataggcacatgtcaccgtgcctggcttttttttttttttccggtagatactgagtttcactatgttgtccaggttggtctcaaaactcctgggctcaagcgatcctcctacctcagcctcccaaagtgctaggattacaggcataagccacaacacccagcctaattacatagaaatcttactgttaaagtttatagcgtgtgctaggtctgggttagatgctaagaaggcttcattataaaacaagtatctcatttgtaaggctgccttacctcataaattcttacgtaaggaggaacagttttcaggacaagcccaagaaattattgaaaaaacaatcacctctacaaaaaaaaacttttttaaaaaaattagccaggcatgatggcacgtgcctgtggtctcagctactagggaggctgagatgggattgcttgagcccaggaagttgaggctgccgtgagcaggctatgatcatgccacagcactccagcctgagcaactgagcaagacctagtctcaaaaaaaaaaaaagaactgaaaaggattttttttttttaaaatcacaaaatgttttcccaaagattctcaaaatactcatgaaaagcagaaaagactgccaggtctcaacctgcatacaagagtatagggacatcattgttcacccctaataagcacctggagttggtgccacagtgaaattttaattaggaaattaagcctttttttttttctttaataaggtgacagtcagcttcagagaaactgaggagaatgcagtctggattcgaattgcctggggaacacagtacacaaagccaaaccagtacaaacctacctacgtggtgtactactcccagactccgtacgccttcacgtcctcctccatgctgaggcgcaatacaccgcttctgggtcaggtatggaaaaaattattacaagctataatattttattatcctatctcaaaggtctatatagattttaactgttgaataagtatttgatagagaatactaggccaggtgcagtggcatgtacctgtggtcccagctacttgggaggctgaagtgggaggattgctcgtgcccacgagtccaaggctgccgtgagctgcgatcacaagacaaagcaacaccccacctctaaaaaaacaaaaaaaagatatagaataccacatgtaattcttgttctcctaaaataagaaacagagtgttgttatctgcagatgggaacatggcataagatattagattggagctatattttattgttttttgatctagaaataatgcatacttaatataaaaaaatgcaaccgatacagaagtctctaaagataaaaagtcttcaaagcttcataccccttttccctattccgttcgttcaaaataactactgtcaaagtttgctatttcctttgacaagatggttattagaaaagccagggtaggccaggcgcggtgctcatgtctgtaatcccaatactttgggaggccgaggcaggtggatcacctgaagtcaggagtttgagaccagcctggccaacatggtaaaaccctgtctctactaaaaatacaaaaaaattagccaggcgtggtggtgggcacctgtaatcccagttacttgggaggctgaggcaggagaattgcttgaacccgggaggcagaggttgcagtgagcccatatcgcaccattgcactccagcctgggcaacgagaaagaaactccgtcttaaaaaaaaaaaaaaattaacataacatttccacgtggttacaaatgaatatacctcattactttttcataattgtataatttgcttattaatgaacattattttcatttgtaaccatttctcccacattccatacacaaggagactgctttcacataagatgtagcctctgttccgagcctgcttctctttatggttctgcctttaatatcacaggcttcctagcatctttccccaaagttagttctccctaaattggcctggcacttgctgctaccactgttagcattcacaacctcagtggcaccttcaattggttccagagctgccacatcagctggttgtaggcgagcagctccaccatcctggctgcatcatgtcctgtcactccacagcagagtggggtggaggtgcggtgtggagtaccaaggactccactgttgtgaccaggcgagccctaggtagtaaatgactacttgcttgtcatttaagttttttggtggtttattgaaatggcaaagactgctactcacttctatttccttaaaacacttctttacatttggggtctcctgctccatgatacatagtggtctttcatccacttatagccaggtgagtacaccttgccacaggtagtttaaacattaccccaaaggctaatgttctttttttttttttgagacagggtctcactctgtcacccagggtggggtgcagtggggcgatcttggctcactgcaccctccaccccccaggttcaagcgattctcctgcctcagcctcccaagtagctgggactacaagcactcaccactatgcctggctaacttatttttctatttttagtggaggtggggtttcaccatgttgcccaggctggtctcaaactcccgacttcaagtgatccacctgccttggcctgccaaagcgctgggattacagccgtgagccactgcgcggactaatgttcatttctattgtgtatcttaaggcaaacttgtctgttctctagatcaggttaaacatcttatcctatcatagtaattctgtttcagtcttcttttcccctaatgacaggaaactcttatgagctgtattcaatacacacttatttcttcagtatttgccaaaaagcatacatatctgcatttttgtatggcaatatcattatggtattaaatgactgatattcaaaaacagtaacattttgagtatttattgtttattccaaagtctgaacttgatttattagtaactcctaactttaaacaggatcgcttttctaagaaatgatacaaaagactgcatttatcagagtattaatgccattaaccactttgtttttgaagctcagtaacaggctatcagatgtttttctagacttctttttacacttacggggaaactattccctaattgcagctcttacattttactttgacaagtattataaacacagaggcagtaatcctagtaatagtcttgcaaattttcatttcaaggcgctgacaattgctagcaaacaccatcagattgtgaaaatggacctgagaagtcggtatctggactctcttaaggctattgtttttaaacagtataatcaggtgagccaatcagtgactctctttaaaggtaaatctttattttctctttgacacaggagttagaagctactgggaaaatctacctccgacaagaggagatcattttagatattaccgaaatgaagaaagcttgcaattagtgaacatgaaaggaaaataaaaattcctcacagtcatctttttataattgtattgtgttttataccactcattagtcactggagtctgtgttgtagatctcagcttccaaatcacctgatcacactagaatttgttttctctttagagaaacttcacattatcttttgaagctaaatatattattctatgaaacaacagagaagtagaattaactttttgtcccatcactcaagcaggttatacaggcactggaattaaagggaaaagcagtggttttttaaatcccaaagttcatttgttaaaataatttgaatgtaatgttcccctctaatgacaaatacagatctgtccttacagatgcaggggtgttttttcaaactatgcatggcagatgtctgcatatgtgttgacactcctgtgagtggattgttaatgctctgtgtatatctttgagccactagagatgttatacttctgtattttcatctgttctaagcagaaagaagtgacagctctctgcaagcagtccctctttaaggaaaaactaacattaagaagttatatcatgaggccaggcacagtggttcacgcctatgatcccagcactttaggaggccaaggtgggaggaatgcttgagcccaggagtttgagatgagcctgggcagcatagggagaccacatctctacaaaacaaaaaataaataatatatattttttaaacttagatcatgattttcttctctagccatcccctcctacctactaccctctcaccaaattgatataaactgttctgctataatacgacagtagtggccaggcaccatggctcatgcctgtaaccctagctctttgggaggccaagaagggcaaatcccttgagcccaggagttcaagaccagcttgggcaatatggcgaaaacccgtctctacaaaaaatacaacaaataaccaggcatgccgggcgcggtggctcacacctgtaatcccagcactttgggaggccgaggcgggcggatcacaaagtcaggagatcaagaccatccttgctaacacggcgaaaccttgtctctactaaaaatacaaaaaaattagccaggcatggtggcgggtgcctgtagtcccagctacttgggaggctgaggcaggagaatggcatgaaaccgggaggcagagcttgcagtgagtggagatagtgccactgcactccagcctgggcgacagagtgagactctgtctcaaaaaaaaaagtagccaggtgtggtgccgcatgcctatagtcccagctacctgggaggctgagttaggaggatctccaaagcccagggagactgaggctgcagtgagccatgatcatgccactcactccagcccgagcaacagactgagatattgtctaaaaaaaaaaaaaagacagtggcattcttacgaaaatccacgttgtcaagcacagaactataaaaacaatggattcagtgggtgaaggtaggagaaggggttcaagagattcagacttacagtaggaaagttatttttccaatctcagtaagttttttagggttatgaagattgagcactgacgacgctgaaataccacagtgcaaatgcttccgtagattccctgggctctgcactcaccagatccatttctatgataaagcacagagctcctcaaacagaacagtcgagttgcaggctcagcagcctccttgtcagtgtcctgctcaactcagccaactcagccaggatatggctttggatctttctgttggaaaaaaataaacatttgacatactttaatatactaaaaaaaaaattaatatctgtacttcaagatgtcaagattagtaaaatattcacttttttttccctagacctttgaaactcacaactctacgacacctctacaggaaagaagccttggactagatataaatagtacgtgtgtgttaatatgaaactgaattttggaaatgcatcattcccttatagatttctttcacttggtaaaacgtgtatagtaggatcctaatttaaaacttttattgttttcagaaaaattgaaaagtaaatatctgttgaaggaggaaagctaatctaccatagttctcctttagaatttactagaataacaataaacaacaaaacaataattacaaaaacaaaagttagctaatagttgttgagcatttcttgtgtgccaggcaccacactaagatgtttatatgtattctttccttaatcttcacagtagtcctgtgaataagcgccattcatcaggaaactgggtttcagggaggtatggtaactctaggcaaagtcacacagctaaggagtggcaaaactgggagtaaaatccaggtacgtctggatctggagcccatgctcttaatgcgctggataaacttctagaacaatgagaatcatgactgtattgctactcacagatgtctgaagtctctcactagaaaacccaagagaaaagagtacagaactactaaagtaaatttacaaaagtggtggggtaaaataaaaattcataaaaaaatgaaaactttcctatctcttagtagagatttggcaatgaaatgaaacagtgccactgttataaactaaacacttttatgattttccagtgtcataggaactgctgttgatctcatcttaggtaaagaaatcaggatataaaattgtgtgtatcttacgattccagttttaaaaatacataggtgaggctaggaacaatgttatgcatctgtggtcccggctacttgggaggttgaggagggaagatcacgagcccaagagatccagtccagactgggcaacatagtgagaccctgtctcttttttttttttttttttaagacagagtctcactctatttcctaggctggaatgcagtagcatgatttcagctcactgcaacctctgcttcccaggttcaagcgattctctttcctcagcctcccaactatctgggactacaggcgcctgccaccacacctggctaatttttgtatttttagtagacatgggatttcactatgttggccaggctggtctggaacttctgacctcaagtgatcctcccgcctcagcctcccgaagtgctgggattacaggtgtgagccaccgtgcccagccgagaccccatctcttaaaaaaaatacatatataggctgggtgccatggagatatatatatatatatgtgtgtgtgtgtgtgtgtgtgtgtgtgtatatatgtgtgtgtatatatatatgtatatatatgtgtgtatatatatgtgtatatatatatatgtgtatatatatgtgtatatatatgtgtgtgtatatatatgtatatatatgtgtgtgtatatatatatacacatatatgcatctttatttttattcactgtaaaaagagctaggcaaaaatatactaaaatgctaacagtgcttatctctgggtggtagaattatgatttttattttctcttttatcaacctgtacttcactaccctaagaaacttccctacactaagaaattattacagccaagagaagaagcagtaaatattattttaaaattatacaaacaattcgaagggttaggaatgaaaggaggataatttaaggatgaaatatattcctaacggctgttttatttgaaatcttccacccatagtggattcaaggatcattcatgaaaacatagtagaaaaagagagagtccaacgaataactcaagaaacatttggagattatcctcaaccacaactagaatttgcacaatataaggtaagatgtcgtaataaatattaagtacaagatatcaacattgtttaaaaagaacaaaaaccttaagtggaaaacagatctaagaaactgttcctttttcacttgtcacttaaatttcatgtaataaatttatgaattaaatagacctctttattgtatttataagttcctctgttagcaaaagagacctttagaaattatgaatctgggctgggcgtgatggctcactgcaacctctgcctcccaggttcaagcaattctcctgcctcagcctcccgagtagctgggattacaggcacctgccaccacacctggctaatttttttttttggagttttagtagagacggggtttcatcgtgttggccagactggtctcgaacggctggcctcaggtgatccaccttgcctcggcctcccaaggtgttgggattacagacgtgagccactgcgcccagccataagttgataattattttacctgggtgatgtgcacatggggctcataccgtgctcctcacttttgtatatgtttaaaatcttccataattagaagttaaaaagatatctcagttgggcacagtggctcacacctataatcccagcactttgggaggctgaggcgggcggatcccttgaacccaggagactgagaccagcctgggcgacacagcaaaaccctgtgtctacaaaaattcaaaaatacaaggtgtggtggcatgtggctgtggtcccagctacttgcactgaagcgggagaatggcttgagccagggaggtcgaggctgcaatgagccatgttcgtaccactccaacttgggcaacaaagtaagactctgtctcaaaaaagaaacaaagaaagaaatctcagtgtgactcaaaaaaaatgtggtatttttacattgaagttacagattgcaaaagatagcactaattttccattaagaatgcaaactgtaaagggcacctgagggtggaactgacagtcagcatcttccatgtagcgggcactgtgcatgctggcattttgccttggatgttgtttgatacaccagttgccctctatgttttgttttgtttttttctgagatgcagtttcactctgttgcccaggctggagtgcagtggcaccatcttggctcactgcagcctccgcctcctgggttcaagcaattctcatgccttggcctcctgggtagctggaattacaggtgcccaccaccatacccagctaattattgtatttttagttaagacggggtttcaccatgttggccaggctggtctcaaactcctaacctcaagtgatccactcgccttggcttcccaaagtgctgagattacaggcatgagccactttgcccgacctgccctctatgtttgcagttagcagattaaatggtccccacccctgttaattcctgtatttcttaatggcaagaattaatgaaacgtatcattatgatttcattatattttaccattcgtatttatacaatatgtttaatagtcatttataaatgtttgttgacagcttgaaacgaaattcaaaagtggtttaaatgggagcatcttggctgagaggaaagaacccctccgatgcctaataaagttctctagcccacatcttctggaagcattgaaatccttagcaccagcgggtgagtggtcagcttactctataagctagaaaaattaacaacatgcctccattccatccttataatctgctaattacttctgagctcacccatcaccctagtctgctagcccatcctgctctctctttcatcttctgcttctgtacttaatagggaggaggggcatctatgatccaccctctaatctcagccatttttaaactgactcaaatccatcctcctgtgatgacttttaattttctttttccctttcttttttttaattttaggtattgcagatgctccactttctccactgctcacttgcatacccaacaagagaatgaattattttaaaattagagataaataagacgtgcgtggtttcttaagcacagctcctccttcttgatattgcacatgcacttcagttcatggctagctgtatagcttccgtctgtaaacttgtattttcaagaatccttggtattgaatttttagaaatgctcacataattgttgggactgattcattcctccacgatatgcctcctctctctgatatcctgctaactgtagccgttgtggcatttgagatgacaggacatatatatatatggccccacacttgaccttgagtgcctgaatgctctgaaatcaagcatatggcacagcgctcaagacttttgggtttgtgtccttttttctatggctgtctcttctcaattctggagaggtctggttccagtggctggtttccagggattgattcttaagctctggatcacagagagaagcaacaaggaactatactcaactcaaaactttttaggagaatcatgaaattggtctattcaaaggatggagttgagtccattctgttattgttgcaagaggttgcatatttggtgagtcagttatataaaatagtgttcttattgtaaatatgatacttctcataatctattttatcatgtgtataacattcaaactgacaaatatattgacttatgaataaaggtgtcaaaaaactggcacatcagttaattttgatcaaagtacttcagtgatcatcactaaataccctatctttttaaaaattttttcctttctaattttttatttctttatttatttattgagacagggtctcactgtgtcacccaagctggagtgcagtggcatgatcatggctcactgcagcctggacctcccaggctcaagtgatccttccacctcagcctcccgaatagctgggattacagatgcgctccatcctgcccagctaattttttttttgtttgttttttgttttttgagacaagtctccttctatcgcccaggctggagtgcaatggcacaatcttggctccctgcaacctctgcctcctgggttgaagagattctcctgcctcagcctctgagtagctgggactacaggcctgcaccaccatgcccagctaatttttgtatttttagtagagacagggtttctccatgttgcccaggctgatctcaaactcctgggctcaagcaatctgcccattttagcctcctaaaatgctgggattataggagtgtattagtctattctcatgctgctaataaagatacctaagactgggtaattcacaaaggaaagaggcttaactgacgcacatttccacgtggccagggaggcctcacaatcatggtggaaggcaaatgagaagcaaagtcatgtcttacatggcggcaggcaagagagcttgtgcagggaaactcccatttataaaaccaccagagctcatgaaacttattcactaccatgagaatagtatgggggaaatcgttcccatgactcaagtatctccacctggccctgcccttgtcacatgggggttattacaattcaaggtgacacttgtgtggagacacagccaaaccatatcacaggcatgagctaccacgcccgccagcatgtcttttttaaacattttaaaatctattctttatcttgtttcagagaggatttggagttacagaaacacattagactgggcatggtggctcacacttgtaatcccagcacttcaggaggtttctcctagtgtactctcacacttctgataccagatatgtgggggagggggtttcccccacacattaagcaagtgtgaaacatgatatagaaaaatgacttcactctgggccgggtgtagtggctcacgcctgtaatcctagcactttgggaagccgaggtgggcagatcacccgaggtcaggagttcgagaccagcctagccaacatggcaaaaccttgtctctactaaaaatagaaaaattagttgggggtagtggcagccgcctgtaatcccagctattcgagaggctgaggcaggagaactggttgaaccggggaggcagaggttgcagtgagccaagatcatgccactgcactctagcctgggtgacagagtgaaactctgcctcaaaaaataaaataaaggccaggcatggtggctcacgcctataatcccagcactttcagaggccaaggcaggtgggtcacaaggtcaagagtttgagactagccttagcaacatggtgaaggtgaaccccgactctactaaaaatacaaaaattagctgggcctggtggtgtgcacctgtaatcccagctacttaggaggctgaggcaggagaatcgcttgaacccgggagacataggttgcagtgagccgagactgcaccactgcactccagcctaggtgacagagtgagactccatcttaaaaaataaataaataaaataaaataaatgacatcactttggttcagagctctaaaatggagggaggaagccattctaaaaaggactccctacatgacctgcaacttgaaaaaaaattaaaagctccaaaaaaaaaacaatacaggagcttaccttgaacctttgaattgggccaaattgcgatgaccactgcatcctggaaaattttatttcaccagcactacaactcctcaacagcaccaaccaataaactatggatttttgtactaagccagttgcctctttcaaaacaacttgtcaacttgtctaatcaccctcagctttttttaaaaacccctcctctaccctctctcttcagaacacaagtggcttctagctgaatctgtctcccaaattgcaattcctaagacctcaataaaaacaccttgtcttgctgc

SEQ ID NO: 5952 - DNA, 464 bp, Homo sapiens
cgatgttcgcggaatgtcagaaactgacaactagttcaggcctcaacgcagtaggaaaaggatgaaaaagaaactcattttaaatcaactaaacaagtgcaaaagccatacatataaaggagaggagatacgaatggcatcacaacataattcctttgccatcgaaaacttccatgcctttgaggttttaaatgaagacttccaaaactgatttacttaagactctacgtaaaacgcctgatctttaaacgcaagaaaagcaagatgaatgtattactttcctggaaaaaaaaagcattaaaggagaaaaaagagtaaagtgtactgatggggctcttggtgggttctcacatcacagggcactgcagctgagacttgcttgaacggcccccgttttctacccgcaaattctcaattgctagataaacaacaataacaacactttattgggcgctcatcgtgtc

SEQ ID NO: 5953 - DNA, 454 bp, Homo sapiens
cgatgttcgcggaatgtcagaaactgacaactagttcaggcctcaacgcagtaggaaaaggatgaaaaagaaactcattttaaatcaactaaacaagtgcaaaagccatacatatagaggagaggagatacgaatggcatcacaacataattcctttgccatcgaaaacttccatgcctttgaggttttaaatgaagacttccaaaactgatttacttaagactctacgtaaaacgcctgatctttaaacgcaagaaaagcaagatgaatgtattactttcctggaaaaaaaaagcattaaaggagaaaaaagagtaaagtgtactgatgggggtgggttctcacatcacagggcactgcagctgagacgtgcttgaacggcccccgttttctacccgcaaattctcaattgctagataaacaacaataacaacactttattgggcgctcatcg

SEQ ID NO: 5954 - DNA, 788 bp, Homo sapiens
ggaaacattgcttctgtaccagccaaccttctgctcctgaagaatatctctgctatgggcctgtactgtggtcaatacaaaaaatgaactttcccgtcttctccaagagcctatcttcagtgcttcggtactgccagcaagggcgcatccaaccatatgtcggaatggttttcaagctggatgaggtcaatgatgccttccttcatgtgatacaggggaaatccgtgggcaaggtgcttctcgctcttaaataaatcctcacctgagcagcaaagttaacatgtccagatcaaaactccacatctttccccaaaacctgatttcccttctgtgtttccaaaggtgttaccactttccttaccaatccaggtttaaaatcttggagtcacctttgattctgtttactaattgcccctaattaatatgattatatagtttattgtccaaacctttttgagagtaaaagggtgccattagtaattacatcaggaaaacatatcccaggcaaaccaggatatatggtcagcctactcgatgcattatgaaatgcagtgattgccaagttctgtcattcccacctctaagatatctcttacctccatatcctcttttccattctgactaattaagcctcaactgctgtcaccagtgaccttctaactgcttttcctacctttaaactaccctcaccccctccattcttgtgatgcattattgccatggtgatcttcccgaagcatagctctgactatggcccatctcagaaaacctacagtggctcaccgttg

SEQ ID NO: 5955 - DNA, 788 bp, Homo sapiens; identical to SEQ ID NO: 5954

SEQ ID NO: 5956 - DNA, 1399 bp, Homo sapiens
ccttgagctagcatttcattatgaccgtgatttttccccgcatcactttccagccttgtggtccacaattccactgggccctaagtatgtactgaactttcctgcctccctcattttgctctgcttgtgcaattttttccaccctccatctctgtcaaacataagccttcctgacctctaagacctacctttgtcatgtgcctttaccctcaggcaaggggcaatctcttctattcctcttctaccttcctgtagcttctcccccagggtttatcacattctgccttgaatcctagggaacaacatgtgtagtggaatgaacacaggcctctgaatccaagatgtgagtttaaatcccagctttggaggtggttacttaagttctcagtgccttcattcttcttcctatataaagtagatattacaatatctaacttacagagtcattgggagctatacatgcagtgattgggtaaagcacctggcacatggcaagcaattagcaaatgctggttacttctacttctttctcttctcttttcccagtgtatcataagttccttgagagcaggcaccatgtctgatttacccttgtatttcccacagtacttcccgtagtgagttacccttagtaaatactcagtaagttgaattgaatttaaattacctgtaagtcttaaaatgtgggattaaattaagagtatgttgccctggaaatacccaaatgtctaccgatggatgaatggataaacaaaatgtgatatacacataatggaatattattcagccttaaaaaggaatgaaattctgacatgtgctacagtatgatgaacctggaagacattatatgtgaaataagccagacagaaaaggacaaatactctatgattccacttatatgaagtacctagagtagtgaaattcatagaaatagaaagtacaggttgacatcgcaaatctgaaatgggaaattctccaaaatctgaaactttttgaatgctgacatgatgctcaaagaaaatgctcgttggagcgtttcagattttggatttttggatttgggatgctcaactggcataatgtgaatattccaaattctgaaaaaatctgaagtctaaaacacttctggtctcaagaattttggataaaggatactcaatgtgcaacatgtagaatggtggttacaaggtggtaggagagaatggagagttactgtttaatggtacaatgttcccatttgggaagatgaaaagttttggaggtgtgtgatggttatggttgtgcaacaatgggaaggtacttaatactgcttaactgtgcacacttaaaaatggtaaaaatgataaattttgtgtatgtcttacaacaataaaagaagttttttttttcaaaaaggaaa

SEQ ID NO: 5957 - DNA, 1399 bp, Homo sapiens; identical to SEQ ID NO: 5956

SEQ ID NO: 5958 - DNA, 445 bp, Homo sapiens
cctaaatggccaccctcaattggtgaaaacttccaaggtagagacagtactcaatcaatagaattctcattgtttcttctctgtccacagctccccacagcccttataacacaaggcagacactaaatcactgcataaaagtggaaagaatcaaaggctgaatctccatcctgttatcttctctactcaaagcttctgtggacatgcacgtgtgtcttctggttttcctgcccccttgatgaaggacaaatggtgtttccattgctcattgtgttcaaggaaggagggcttagttctgcgagtttctggggtttaatttgatgaattcatctgctcattgcttactgattagaaatttctgtcacattgtaggatagcagagagttcaagattattgggactatgagcatatcatttttgttccatttaaattgctatgaaatgg

SEQ ID NO: 5959 - DNA, 445 bp, Homo sapiens; identical to SEQ ID NO: 5958

SEQ ID NO: 5960 - DNA, 564 bp, Homo sapiens
tgaaggcctggttgggtctggcactttcagaacagcctctctcacatgcctagccattggtgttgtgtaagagctcactcttaacagtttctacttgcttccttagacagtagtgacaggggcccaagagagtaaaagcaaatgctttcagtcctgttaagggctagacctaaaacctgcacctgtccaacaactcacaagttcaacccctatgtaaacgaatggaaaataaacataattccttgacaaaggaggagcattcacacacagaggagggagcagttgttggagcccatcttcaaagaccactgaccacactccggttcagttcagacttctcacaaacacccttacagggtcctgtggaccactaatcccaggatgcgaattagaaagggaagagtgttagggctggctgtgtacgaagccttcacatgcttcacacccaaaaactcaggatgaggttgagcccctcttccttgagctgccaccctgccagatgttgcttccattgcaacatgaacaacactaattgcaaagagtttactgggatattttttgaaa

SEQ ID NO: 5961 - DNA, 564 bp, Homo sapiens; identical to SEQ ID NO: 5960

SEQ ID NO: 5962 - DNA, 4508 bp, Homo sapiens
taatttcaacattctttctccagtggtcactcacaggcacctgaactgatcttcccttacaatgcatagagctaacagacccactaagggaagaaaaactcatgtgccattttcagcttgtcagtgtaagtccctgtaaaaaacacacactaatttatttggtgaaaactataaaaaacacacctccaggtggttaaaagaataatttttttaaagttgatatgatttacttaaatctgagagtctcaggagaataagggacaagaattttaaaaaagatcacttccatttatatgcaaaccagaactacggctacaatgttatgtatttcagggggaaacaagtcagaaatagacacaattaagattttaagaaaggaagaaccccatccagaactgttagggtgcttgcaatatggggaaaatttatttaaatcttatatattaatttttatttcttgttggttacataaaagttttaggaaagcttacctctcttcactagattttttactcacctctttctgacgacctacaaaccgaattctcctgtagtctttatcatcataaacctggaaaaaaacaaaaagaccatgtgtgacttttacggcctaattctgaaagtcacttcatatcaatcataaatattacaggaaagtgtttttcttaacttttaggccattgatgaaaagtcaaacaagtgcacagtactcggtgtaatcaggggcatttttagcgagatacctgggatgaaaacgggtggtcacctggatcagagagcagcacagagacatagcccgggaaggtggagctaaggaggagagacaaatcctgaccgaggagaaccgcccccaaccttctttggcatatggcctgagagctttactatccccccattaaatctactagggcacattccagtatacacaggtacctttgttcttcattttggcttagggcttttttgtgccttggactacaaccgacttctcaggttactaaaatttattattgaatattacacaaattctaaacgttctgacccaaataatcggctgccacaaatcgcctatgggcagccagtccacagcaagtgctgcccgctggggagacttcccgttccagagcccgcaggccctggaaggacgagacccaccgctacaggctgccaccaccgtcccgactcgcgggcgtcctccccggcgcgtgagcgacagcacaaccttaccacgacctgcgctgccggcgcagaaccagggccgcggatgcccggcgagcccactgccaccagtcgcccgaggtgcggctggaggaaggtgcatcctgtacccagcggccgttacctggccagtgtgcgtgaccttctccccggtcggcgagacccgcaccccgaaacacctggcgcccaggggcaggctccgcgccgcctcgccacaccggttcagcagccggcagaaggtcatcgccgccgccattttgcgccgctggcctttgacccggcgcaacgtcccgcttagcgctaacgcatgcgcacggcttctggcggcgccaaacacccggtatttatttcggccctgggggcggggagcgcgggtcggggcagagggtgcgccggagctgctctctgattcaggtggtcacccgttttcatcccaggtatctcgctaaaaatgcccctgattacaccgagtactgtgcgcttgtttgacttttcatcaatggcctaaaagttaagcggccccgttgcgccggcaggtgcagcctcatgcagttgcagccgcaggctagagctagggccctgatgaggcaggcaatggtgtgcgaaaccttcagcgattaggagtacccagtggttcttatttagcggacaggcaggggaggatgtaaactgaaaatacattgtttatattcttatggtaaccgataatcatgagacatttaaatatcaaaattattgggtgaaggagtcaactgcttagcagacgagactggaagtgcattctcctcgttcaaggcaagcgttcctgtgtgtggttacggggagccgcagaggaaacgtatattggggatttctgcaacaaagcctagtacaccgactgattttacagcatgcaaatacagcctctaaaaaggcccgttttgcttagagttgacttgggtataaatcccagcttaagctccagcatccagcttttcttttgctgtggtcagagcctgaggaccacgtgactccaagaacaaaacactagagatggatgagtggcggggaagatgataaagaggaggaaaggcatgagaaacaagaatgcacatgaaaacctccggtcccaaagatgtcccagcaaacgtggtggtcagaggcagatttgtcctggagctgataaactccagcggcccgcccggtgttcgccgggtcaggtggaaaaagtgggcgctgcgatgaagcgttggggcctgcagggagcgcggagtggacgcagccacgtctgcaactcacccggacacacacaaaaaggaaggcgaatggagttacgggtagatacctgaaaaggcagggataagcgagctaagggtagaatctaggtggcaagtatatgggtgttcaccgtacagttctttccctttttctctatgtccgaagtttttcataatgttggggaaaacagccgtaaccagttgaaactactgcccgtctccactcgtttcccggagcctgtttacatttctcctgtccacttaaaaacatgtcctctttctcagtttgttttgacattggtatttgccagttttttctaaggcctaagtggttgtaatttctttttcgttgcggatatccattttcgttcctggtttttgcattttttttcccgagagcgctccaaacagcacgacgatcccggtggcccgcagagtgcgcgcagtcggggagtgatacgtcgcactccagcgcctgcgcactcgctgctgcgtctctgcgccccgcactggacgtgggcacgccacgtgacccccccccccgccgccatcttccttcctggcagcagcgtccgcgtgccagtgcgcagacgcaggggtcggcgccgggtgagagcgtgcggccgggtaagggagccgtcttctcaggtcaggggtcccgggtgtcttgagagtgggggctgcgagagggtggggccggccaccttgggaccctcgggcgtgtctccccgagtgggctgcggtcagaggagcgtgggccggggcctggcggtctcagagggccagggttggggggtgcgggtccgaccgtgggcgcccgacctggcgacaggagggggtgtccagcgaccccggggcgggagaactggcggctcccgaacgcgacctcacagcccgcgcgcagggccggctccggtgccgcagtgtcctccgggccctgcaggcccagctcttcccagccggggccgctgaaccctaagggccggggcgcgtggggaagcaggggcgggcgaccggggtgccagagttccgtgctcttccggagcgggggcctgtcccgaaactggcccgagggagggcccctgggtctgggaagagttggagggaggagctcatcagttgaaccgtccttgacctggtgtctgtttggaaagggatgcggcctaagtttaagctccctcccagccaagtgagcggctcctcaacatcgcagggctttgcacactcacctacacttgcagcaggcgggaaagggaaggaagccaccgtccactgccccttattctcctggcacacttggctgattaaggcagtgttcaagctcaggtcgaggctgcagctggtatgggaacaccctcagtccccgaggtccctgccttcccaagcctcagtgaaacagagaaaaggaagccttaaagagcaggtggaagtgcaggagaagctataactcctttttttctctctcccatagattcaccacaacatggcaaatctttttataaggaaaatggtgaaccctctgctctatctcagtcgtcacacggtgaagcctcgagccctctccacatttctatttggatccattcgaggtgcagcccccgtggctgtggaacccggggcagcagtgcgctcacttctctcacccggcctcctgccccatctgctgcctgcgctggggttcaaaaacaagactgtccttaagaagcgctgcaaggactgttacctggtgaagaggcggggtcggtggtacgtctactgtaaaacccatccgaggcacaagcagagacagatgtagaccctttccctccagagtcacgcacatactcgtcatcgcatcacttgggagaatggttgtatcttatggaaggaattatcacatcaaggagtcaggggaaagtgactggaagcaaacgccctaaaagttacccatcacgtttcagtgtaaatgagtaactatagaagacattgcgttatcttatttccaaaacgttccaactaaaaaacattttcctattaaaatagaccttccgaata

SEQ ID NO: 5963 - DNA, 5084 bp, Homo sapiens
taatttcaacattctttctccagtggtcactcacaggcacctgaactgatcttcccttacaatgcatagagctaacagacccactaagggaagaaaaactcatgtgccattttcagcttgtcagtgtaagtccctgtaaaaaacacacactaatttatttggtgaaaactataaaaaacacacctccaggtggttaaaagaataatttttttaaagttgatatgatttacttaaatctgagagtctcaggagaataagggacaagaattttaaaaaagatcacttccatttatatgcaaaccagaactacggctacaatgttatgtatttcagggggaaacaagtcagaaatagacacaattaagattttaagaaaggaagaaccccatccagaactgttagggtgcttgcaatatggggaaaatttatttaaatcttatatattaatttttatttcttgttggttacataaaagttttaggaaagcttacctctcttcactagattttttactcacctctttctgacgacctacaaaccgaattctcctgtagtctttatcatcataaacctggaaaaaaacaaaaagaccatgtgtgacttttacggcctaattctgaaagtcacttcatatcaatcataaatattacaggaaagtgtttttcttaacttttaggccattgatgaaaagtcaaacaagtgcacagtactcggtgtaatcaggggcatttttagcgagatacctgggatgaaaacgggtggtcacctggatcagagagcagcacagagacatagcccgggaaggtggagctaaggaggagagacaaatcctgaccgaggagaaccgcccccaaccttctttggcatatggcctgagagctttactatccccccattaaatctactagggcacattccagtatacacaggtacctttgttcttcattttggcttagggcttttttgtgccttggactacaaccgacttctcaggttactaaaatttattattgaatattacacaaattctaaacgttctgacccaaataatcggctgccacaaatcgcctatgggcagccagtccacagcaagtgctgcccgctggggagacttcccgttccagagcccgcaggccctggaaggacgagacccaccgctacaggctgccaccaccgtcccgactcgcgggcgtcctccccggcgcgtgagcgacagcacaaccttaccacgacctgcgctgccggcgcagaaccagggccgcggatgcccggcgagcccactgccaccagtcgcccgaggtgcggctggaggaaggtgcatcctgtacccagcggccgttacctggccagtgtgcgtgaccttctccccggtcggcgagacccgcaccccgaaacacctggcgcccaggggcaggctccgcgccgcctcgccacaccggttcagcagccggcagaaggtcatcgccgccgccattttgcgccgctggcctttgacccggcgcaacgtcccgcttagcgctaacgcatgcgcacggcttctggcggcgccaaacacccggtatttatttcgccctgggggcggggagcgcgggtcggggcagagggtgcgccggagctgctctctgattcaggtggtcacccgttttcatcccaggtatctcgctaaaaatgcccctgattacaccgagtactgtgcgcttgtttgacttttcatcaatggcctaaaagttaagcggccccgttgcgccggcaggtgcagcctcatgcagttgcagccgcaggctagagctagggccctgatgaggcaggcaatggtgtgcgaaaccttcagcgattaggagtacccagtggttcttatttagcggacaggcaggggaggatgtaaactgaaaatacattgtttatattcttatggtaaccgataatcatgagacatttaaatatcaaaattattgggtgaaggagtcaactgcttagcagacgagactggaagtgcattctcctcgttcaaggcaagcgttcctgtgtgtggttacggggagccgcagaggaaacgtatattggggatttctgcaacaaagcctagtacaccgactgattttacagcatgcaaatacagcctctaaaaaggcccgttttgcttagagttgacttgggtataaatcccagcttaagctccagcatccagcttttcttttgctgtggtcagagcctgaggaccacgtgactccaagaacaaaacactagagatggatgagtggcggggaagatgataaagaggaggaaaggcatgagaaacaagaatgcacatgaaaacctccggtcccaaagatgtcccagcaaacgtggtggtcagaggcagatttgtcctggagctgataaactccagcggcccgcccggtgttcgccgggtcaggtggaaaaagtgggcgctgcgatgaagcgttggggcctgcagggagcgcggagtggacgcagccacgtctgcaactcacccggacacacacaaaaaggaaggcgaatggagttacgggtagatacctgaaaaggcagggataagcgagctaagggtagaatctaggtggcaagtatatgggtgttcaccgtacagttctttccctttttctctatgtccgaagtttttcataatgttggggaaaacagccgtaaccagttgaaactactgcccgtctccactcgtttcccggagcctgtttacatttctcctgtccacttaaaaacatgtcctctttctcagtttgttttgacattggtatttgccagttttttctaaggcctaagtggttgtaatttctttttcgttgcggatatccattttcgttcctggtttttgcattttttttcccgagagcgctccaaacagcacgacgatcccggtggcccgcagagtgcgcgcagtcggggagtgatacgtcgcactccagcgcctgcgcactcgctgctgcgtctctgcgccccgcactggacgtgggcacgccacgtgacccccccccccgccgccatcttccttcctggcagcagcgtccgcgtgccagtgcgcagacgcaggggtcggcgccgggtgagagcgtgcggccgggtaagggagccgtcttctcaggtcaggggtcccgggtgtcttgagagtgggggctgcgagagggtggggccggccaccttgggaccctcgggcgtgtctccccgagtgggctgcggtcagaggagcgtgggccggggcctggcggtctcagagggccaggttggggggtgcgggtccgaccgtgggcgcccgacctggcgacaggagggggtgtccagcgaccccggggcgggagaactggcggctcccgaacgcgacctcacagcccgcgcgcagggccggctccggtgccgcagtgtcctccgggccctgcaggcccagctcttcccagccggggccgctgaaccctaagggccggggcgcgtggggaagcaggggcgggcgaccggggtgccagagttccgtgctcttccggagcgggggcctgtcccgaaactggcccgagggagggcccctgggtctgggaagagttggagggaggagctcatcagttgaaccgtccttgacctggtgtctgtttggaaagggatgcggcctaagtttaagctccctcccagccaagtgagcggctcctcaacatcgcagggctttgcacactcacctacacttgcagcaggcgggaaagggaaggaagccaccgtccactgccccttattctcctggcacacttggctgattaaggcagtgttcaagctcaggtcgaggctgcagctggtatgggaacaccctcagtccccgaggtccctgccttcccaagcctcagtgaaacagagaaaaggaagccttaaagagcaggtggaagtgcaggagaagctataactcctttttttctctctcccatagattcaccacaacatggcaaatctttttataaggaaaatggtgaaccctctgctctatctcagtcgtcacacggtgaagcctcgagccctctccacatttctatttggatccattcgaggtgcagcccccgtggctgtggaacccggggcagcagtgcgctcacttctctcacccggcctcctgccccatctgctgcctgcgctggggttcaaaaacaagactgtccttaagaagcgctgcaaggactgttacctggtgaagaggcggggtcggtggtacgtctactgtaaaacccatccgaggcacaagcagagacagatgtagaccctttccctccagagtcacgcacatactcgtcatcgcatcacttgggagaatggttgtatcttatggaaggaattatcacatcaaggagtcaggggaaagtgactggaagcaaacgccctaaaagttacccatcacgtttcagtgtaaatgagtaactatagaagacattgcgttatcttatttccaaaacgttccaactaaaaaacattttcctattaaaatagaccttccgaatagcttagttcattcattctctctgaactcaggctgcaggtagggattggatggtgctgggtgaggctgggcaggacttctctatgtctccgtgaggctgcttagagcctcttggaagaagtggtgttttggtcacccgtcgctgtacaagccaaggcttggtggcttaaatcagccattttacattgttcacgattttgtgaggcatttgggatgggctcagctgagcagtttgtctgatctgtgtggcattaactgcaggacccacttccaagatggcaccggctctcctgtctggggtctcagtgctcctcaggctgtacgtagcacctcctcaggcagggcccacagcgtggcttgcactgccccacagtgagcttcccgagagtgtcccgagagacccaagcagatgctacgaggcttcctatgacccagcctcagaaattccagcgtgtcatttctaccgcactctttcagtccctagggtgagcccagattcagggggaggcaaggagctccccttgctagaggatgaccacacctacaactggtaaggacttggagggatggagtgggctgg

SEQ ID NO: 5964 - DNA, 5087 bp, Homo sapiens
taatttcaacattctttctccagtggtcactcacaggcacctgaactgatcttcccttacaatgcatagagctaacagacccactaagggaagaaaaactcatgtgccattttcagcttgtcagtgtaagtccctgtaaaaaacacacactaatttatttggtgaaaactataaaaaacacacctccaggtggttaaaagaataatttttttaaagttgatatgatttacttaaatctgagagtctcaggagaataagggacaagaattttaaaaaagatcacttccatttatatgcaaaccagaactacggctacaatgttatgtatttcagggggaaacaagtcagaaatagacacaattaagattttaagaaaggaagaaccccatccagaactgttagggtgcttgcaatatggggaaaatttatttaaatcttatatattaatttttatttcttgttggttacataaaagttttaggaaagcttacctctcttcactagattttttactcacctctttctgacgacctacaaaccgaattctcctgtagtctttatcatcataaacctggaaaaaaacaaaaagaccatgtgtgacttttacggcctaattctgaaagtcacttcatatcaatcataaatattacaggaaagtgtttttcttaacttttaggccattgatgaaaagtcaaacaagtgcacagtactcggtgtaatcaggggcatttttagcgagatacctgggatgaaaacgggtggtcacctggatcagagagcagcacagagacatagcccgggaaggtggagctaaggaggagagacaaatcctgaccgaggagaaccgcccccaaccttctttggcatatggcctgagagctttactatccccccattaaatctactagggcacattccagtatacacaggtacctttgttcttcattttggcttagggcttttttgtgccttggactaccaaccggacttctcaggttactaaaatttattattgaatattacacaaattctaaacgttctgacccaaataatcggctgccacaaatcgcctatgggcagccagtccacagcaagtgctgcccgctggggagacttcccgttccagagcccgcaggccctggaaggacgagacccaccgctacaggctgccaccaccgtcccgactcgcgggcgtcctccccggcgcgtgagcgacagcacaaccttaccacgacctgcgctgccggcgcagaaccagggccgcggatgcccggcgagcccactgccaccagtcgcccgaggtgcggctggaggaaggtgcatcctgtacccagcggccgttacctggccagtgtgcgtgaccttctccccggtcggcgagacccgcaccccgaaacacctggcgcccaggggcaggctccgcgccgcctcgccacaccggttcagcagccggcagaaggtcatcgccgccgccattttgcgccgctggcctttgacccggcgcaacgtcccgcttagcgctaacgcatgcgcacggcttctggcggcgccaaacacccggtatttatttcgccctgggggcggggagcgcgggtcggggcagagggtgcgccggagctgctctctgattcaggtggtcacccgttttcatcccaggtatctcgctaaaaatgcccctgattacaccgagtactgtgcgcttgtttgacttttcatcaatggcctaaaagttaagcggccccgttgcgccggcaggtgcagcctcatgcagttgcagccgcaggctagagctagggccctgatgaggcaggcaatggtgtgcgaaaccttcagcgattaggagtacccagtggttcttatttagcggacaggcaggggaggatgtaaactgaaaatacattgtttatattcttatggtaaccgataatcatgagacatttaaatatcaaaattattgggtgaaggagtcaactgcttagcagacgagactggaagtgcattctcctcgttcaaggcaagcgttcctgtgtgtggttacggggagccgcagaggaaacgtatattggggatttctgcaacaaagcctagtacaccgactgattttacagcatgcaaatacagcctctaaaaaggcccgttttgcttagagttgacttgggtataaatcccagcttaagctccagcatccagcttttcttttgctgtggtcagagcctgaggaccacgtgactccaagaacaaaacactagagatggatgagtggcggggaagatgataaagaggaggaaaggcatgagaaacaagaatgcacatgaaaacctccggtcccaaagatgtcccagcaaacgtggtggtcagaggcagatttgtcctggagctgataaactccagcggcccgcccggtgttcgccgggtcaggtggaaaaagtgggcgctgcgatgaagcgttggggcctgcagggagcgcggagtggacgcagccacgtctgcaactcacccggacacacacaaaaaggaaggcgaatggagttacgggtagatacctgaaaaggcagggataagcgagctaagggtagaatctaggtggcaagtatatgggtgttcaccgtacagttctttccctttttctctatgtccgaagtttttcataatgttggggaaaacagccgtaaccagttgaaactactgcccgtctccactcgtttcccggagcctgtttacatttctcctgtccacttaaaaacatgtcctctttctcagtttgttttgacattggtatttgccagttttttctaaggcctaagtggttgtaatttctttttcgttgcggatatccattttcgttcctggtttttgcattttttttcccgagagcgctccaaacagcacgacgatcccggtggcccgcagagtgcgcgcagtcggggagtgatacgtcgcactccagcgcctgcgcactcgctgctgcgtctctgcgccccgcactggacgtgggcacgccacgtgacccccccccccgccgccatcttccttcctggcagcagcgtccgcgtgccagtgcgcagacgcaggggtcggcgccgggtgagagcgtgcggccgggtaagggagccgtcttctcaggtcaggggtcccgggtgtcttgagagtgggggctgcgagagggtggggccggccaccttgggaccctcgggcgtgtctccccgagtgggctgcggtcagaggagcgtgggccggggcctggcggtctcagagggccagggttggggggtgcgggtccgaccgtgggcgcccgacctggcgacaggagggggtgtccagcgaccccggggcgggagaactggcggctcccgaacgcgacctcacagcccgcgcgcagggccggctccggtgccgcagtgtcctccgggccctgcaggcccagctcttcccagccggggccgctgaaccctaagggccggggcgcgtggggaagcaggggcgggcgaccggggtgccagagttccgtgctcttccggagcgggggcctgtcccgaaactggcccgagggagggcccctgggtctgggaagagttggagggaggagctcatcagttgaaccgtccttgacctggtgtctgtttggaaagggatgcggcctaagtttaagctccctcccagccaagtgagcggctcctcaacatcgcagggctttgcacactcacctacacttgcagcaggcgggaaagggaaggaagccaccgtccactgccccttattctcctggcacacttggctgattaaggcagtgttcaagctcaggtcgaggctgcagctggtatgggaacaccctcagtccccgaggtccctgccttcccaagcctcagtgaaacagagaaaaggaagccttaaagagcaggtggaagtgcaggagaagctataactcctttttttctctctcccatagattcaccacaacatggcaaatctttttataaggaaaatggtgaaccctctgctctatctcagtcgtcacacggtgaagcctcgagccctctccacatttctatttggatccattcgaggtgcagcccccgtggctgtggaacccggggcagcagtgcgctcacttctctcacccggcctcctgccccatctgctgcctgcgctggggttcaaaaacaagactgtccttaagaagcgctgcaaggactgttacctggtgaagaggcggggtcggtggtacgtctactgtaaaacccatccgaggcacaagcagagacagatgtagaccctttccctccagagtcacgcacatactcgtcatcgcatcacttgggagaatggttgtatcttatggaaggaattatcacatcaaggagtcaggggaaagtgactggaagcaaacgccctaaaagttacccatcacgtttcagtgtaaatgagtaactatagaagacattgcgttatcttatttccaaaacgttccaactaaaaaacattttcctattaaaatagaccttccgaatagcttagttcattcattctctctgaactcaggctgcaggtagggattggatggtgctgggtgaggctgggcaggacttctctatgtctccgtgaggctgcttagagcctcttggaagaagtggtgttttggtcacccgtcgctgtacaagccaaggcttggtggcttaaatcagccattttacattgttcacgattttgtgaggcatttgggatgggctcagctgagcagtttgtctgatctgtgtggcattaactgcaggacccacttccaagatggcaccggctctcctgtctggggtctcagtgctcctcaggctgtacgtagcacctcctcaggcagggcccacagcgtggcttgcactgccccacagtgagcttcccgagagtgtcccgagagacccaagcagatgctacgaggcttcctatgacccagcctcagaaattccagcgtgtcatttctaccgcactctttcagtccctagggtgagcccagattcagggggaggcaaggagctccccttgctagaggatgaccacacctacaactggtaaggacttggagggatggagtgggctgg

SEQ ID NO: 5965 - DNA, 468 bp, Homo sapiens
ggcaagaggtcaaggatgctccctgcaggggatgacggccaagctgaaactttggttgcaggggaggcaacccgaggaggggcctgaggctgggcacgggcagggggcatccaagccatcctgcgtggatgaaaactgggtgtgtttctgcagtacgcagtgctctggggggagacctgaccaccggctgcatgcctgcagttgggtgtgatgtgcttacgtgccatgcaaacgtgggcacacagtcgtggcctcttgacaattgcacagacaaatccccagcaaggcagcgtggcacaggagccaacaggaaggaataaagaaggcatggatttcatggcacgcttgatccaacggggaaaggtgggattctgctaattttgcttgagtagaaatctaaggctgataattacctatccaggcttcagtccagaataagtgattaataaaagaattctgcagaaccag

SEQ ID NO: 5966 - DNA, 775 bp, Homo sapiens
aaaagggtttctgaggatggagagaaagagcacttaccctatacaccacttactcgacaactgacagtgtgatatcactggagacttatgattcaattaaaaatattcacatggttccatttcacaaatgagaaaactgaacccatgctgtgattcaacctcacaatttttagactgcaagtccacacagcttctactccgagaggcaaacccaccagacacaagcccctctccaccaccatgatcctggtagacatcactaatcaatcatggcacactcttccactgaatgtgcatcaggcctcaggatctttctcaacccaacactcaagtggcattgccaaataatcaaccactataaaacaaacttttctgacacccacccatcaaaccacacaacagtgaaccagctgaattttgagaatgtgaatttatagtcaattcatgatcatgtgagcttttctggaatgccctgtagctctggaatagacgtacaaaaactacacactgggaatggataacgtaaccaagattgaaggagaagggaaaatacatgatttagggatagctacggtgttaacaagaagaacaccaggctaaccaaagtgggaaaaagaatgaataaggtggctgtgaaggacacttcacagcatccttcaggaagcaaattcaggaatcatggaggcatgcctgatctaattacgaattcaggagctcattgacatgagtgatagagaaggagtcaggtaaaaaaaaaaaataggctgatttaggc

SEQ ID NO: 5967 - DNA, 468 bp, Homo sapiens; identical to SEQ ID NO: 5965

SEQ ID NO: 5968 - DNA, 775 bp, Homo sapiens; identical to SEQ ID NO: 5966

SEQ ID NO: 5969 - DNA, 775 bp, Homo sapiens; identical to SEQ ID NO: 5966

SEQ ID NO: 5970 - DNA, 14925 bp, Homo sapiens
ggcagagccagctttggacgcaggtctgacttcctacctcactccccttgccttgacagacacagtaattcagagttgaacttggaacagagtttattttccatcactgtaaaacattctcagtgaggttactggcattaaaaaggtgggagaaatggaagaaaatggggttgaagaaaaaaaaagcctttgctcttgacagctaggcagccacagcggaggccgccaggctgcgagggcagcgtatgggggcagagcccggttctggcggcacaggccccggagtggagggggcaggggagggtctctgtaggtgggagagggcctgggggctgggaggcagcctggccttgtgccctacaggagggacctcctgggactttatggaagcctgtcttgcctttgacttgcaatgaaaatgcccctcatcattgggagtggggtcgggtgggggtccccagtggccagatcacgtggggtccagagagcagacatctgtagccctgatcttggcggccagtgaccacggccaagcagggcctgtcttttgcctggtacaaggcttgatgagaagagacccctgcccatcctcagtggcctggcagccaggggtgaaccccaggggaagctgggacactgtcccaaaggcccggcgccctactgtgctgcctgagcccgtggcaccgtggggcccaaggtggtgatgatttctctgctcttcccacggggcagacagcaggacacatcctggagacaaggttggggagacaaacaggtgcccaggtcagggctgatcacagcagttacaaaagcatcccgtgaagacggggctgcaagacggtgctggcaaaggaacaggacccaggaagaccaggcttgtcctgtggaggggccgggtcttggcagggggcaagcagatgtccccagtttttgctggtgatcaacaagtgaggccgctgctccattctacacaggacagcatttccaggggtttccagtattctgtctagattcataaaggtcaaaggccttgagaatctatgtgtgcctttctatcttaggtaaagaagagaaagagaaagcaaattctcgttactcctctttcaaaaagttcattaaaagccaggctggcagctcacagtgctataatcccagcactgtggaaggcctaggcaggaggattgagaggagttccagaccaacctgggcaacaccgtgagaccccatctctacaaaaaaaaaaaaaaaaaaaattagctggacatggtggtgtgcacctgtagtcccagctgctgcgtctcgaaaagagaaaaaaccacgtgtattagatctgtgtgggtaggcatgtgtgtgtcgtgtgttaatttaggtgcccaaaatagcaagtatgcaggaagccagaaaataaggcttaggtctctttcaaccctaaaatcctctaaatacgttttacttggtttttaaaaagaccttattgatggaaataatagatgcctgtttaaaaaaatgcagaactggagaaagatgaagagcctcagagtcccgcagagagcagcaccccgtcctcctgctgtccctgcccatctccctcagaggaccaggcccctttatcccaaagctgttgtcacaggttacatacagatttgtatctgcatccttcctctaagttcatgcacctgtgactgagctctaacagggtgggcaacagtccaaagtctgagggtccctgcctctggaatgcccctgctagtggaaatgcaggaacaacaaggggacaccggggcccagggtccatggcaagtcagcccgcccctgcccactcctgggatcccactacctgaggcagctatagttgctccagaggaggcatcagggcctccctggctgcccctggctcaggaacatcccccagggctctgggcctgcctcttgggagtcgagcctgggcgctctgccccttggcacagagcttcatgtgttgcttcctcccagttcgtgatccagctgtgtcttcaggggcctgagccctcccacccgcgggccccttgctggcaggcagctcgggctgggctgtccccttctgaaaggccctgagctgctggagaagctggcttttcccggtacaggtcctgtgacacaatgagaccaaattcactcaaccccgtgggggccgcccctcccagccctccttactgaaacaggagaaaagcagatgagcccagctcccatttcagagcaagaatgcaattcaggcagcccatcactgctgccactgctgggacccagtggacgtgggcaggatgatgaaagctgtgccgtccccctcaccctgtgcggtgggtgcagcaagacctcaccacaggcggtaaatgtgccaggtggagggcttgctgcagaaagcagaggtgggacatctgcaggtggcgagaggcccctgggtggttaccgtagccccagggaggaaggagatgccccctctgcgtctcccagagctgccatctcttcctcctcctcctcctcactgtcagaggagctgtggctggagctgcagggagagaaatgggtttctggatgtgcccactccacctggtgttccaactcttgttggggcttgaagcactcgggctttgctggtgacccaatgcaagaggtcagcagccacactggaggccggtggacgtcctgccaggaggtgaggacaggtgtgggtgatgccctccagcctagacgtgttgggctctattgcatagagcccagcccgaggaggtgtgcctcatgcccctcttccctccctgcagggacccagggggactgtaggccagcacttttcaattgagaattgatccaagccttttgaagtccctgttcctccccatcaggatccaccagaggctctgtgcggtcaacaggcaactctgcaaagtagaggctggtatggggtagtcactgccctccggacctttctggggacaggtggtctggtagctccatctgccgcaggtcaataaagatggtgggggactctgcgttaagcctcatgccctgggccagctgcgggcctggcccagcctgggagccctgcttccttgaggcacatctgaaatgagaaaagcaggtgttgtggagtcagttctctgtgataactctgtgacctgcgctgggtttgtccagtcacagtgctcgtggctgccacccagtgagtgcccactctctacagacgggcacattaaacacatttgctcttttactcttcagaacagcatgcgagatttaggccaccactggccaacagaacgtccctcatgatggacatgctctctatctgtggtaagtgtagccacttggcacaagtggctaagtttacatttaagccagtttaaatccaatgcataaaacattcagttcctcagtcacattcaccacgttaggtgtttagtagccacacacggctaatggctgccatggttaacactgcagttctctccatttctttttctttttctttttttttttttttttgagacagagtcttgctctgtcgcccaggctggactgcagtggcatgatcttggtcactgcaacctccgcctcctgggttcaagagatttctcctgcctcagcctcccaagtagctgggattacaggcatgcaccaacatgcctggaaaatttttttgtgtttttagtagagatggggtttcaccatgttggccaggctggtctcgaactcctgacatcaggtgatctgcctgcctcggccttccaaagtgccgggattataggcatgagccaccgcgcccagccaggtgtagccacttctgttaggtacttttggtttccagacacagaaacccactgctggtcaggtgaaaagggattcactggttctcagattcctcaagtgcggagcaaccaaagtgtggggagggcaggcatatagaggggccttacgggaccctggggccctgcctccacctctgcctctcccagcttcactgcagcttgcctttctccctgtggcaggacaggtggctgttgcccttccacccctacacagagacacagagattgaaaaatcccgcagctggggtcacatgcccagagctggaccaatcagctgtggccagaggggcagggtcacatgataaccttcctactctcagggaggcctcatggcctcccattgaaaggagggttcccgttgggtttggggaaagagcaggtacttgagggcttgagtcccagccctgccatttatggccagagagagtcaacctctctgagccttggtttccccatctctaaaatggggatgactggagcgactgcctgatcagatgcttgagagtgactgagaaaatgcacatggagtgccccgcccttggtaggcccagtcagtgctacaaaaccatggggccattctaaaggaccacaggagccgggcctggctacaagtcccacctgcttcctgaatctgcctctttggtgtcctggggagtgtcggcaggcaccttccgggcacaagcagaggccttggactgcgtggtgcacaggagggccagctgttccatgagcctgttgtgggcgctcggcaccatgcggtctgaggatggccaaaggagaggctgattagtggggacttggcccacttgtgacttacagcagctggagcctcaggacccctggggtctccacatgtgaatggacctcaggctcctccactgcccccgcccagccctctccctactcagccctctgaggactccacctctagctcagcagggctgaggggggcagaatctttatgagcagggcctgtggcacaagggcttggtgaagtaggagtgacgtatttttaagtttatcccacttcctcacaccccggtcccacttgtcacaggtgatcataatgaacagttctgtgtgttgacttaaaaaaaaaatagggtcatcctctataggttttttttcaacttcacttttttcactttgtatattacatgcttccacgttaacctacggagatcccctcatcgagccgcagtgtattctgtgctaaaacgatctagctggactcctcctgaatatgggttgtttccagcttttcagatttttaaacaacactgcagcaaacagctctgaacacacatctttacctactagagtcagagtgtaagacagattttctaattgcaatagcttgattaaagggttatgtgcctttaaaacagagaatacattcggccaagcgcggtggctcacgcctgtaatcccagcactttgggaggctgaggcaggcggatcctgaggtcaggagttcgagaccagcctggctaacatggtgaaatcccgtttctactaaaaatacaaaaaaaattagccaggcgtggtggcacgtgcctgtaatcccagcaactcaggaggctgaggcaggagaatcgcttgaacccgggaggtggaggttgcagtgaaccgagatcgtgccattgcactccagtttgggcaacaagagtgaaactctgtctcaaaaaaaaaaaaaaaaaaaaaaaagaatacattctgccctactcccctccacaaagggagtgccagttacacacacacatacacatgcacacacatgtcctccagaatggttggctctctacctcctgctttatgggatttgaattacaaaccaacaaaatgtatttaacataacacgggctgtcagtcacaggggagtctttgctttgggaccagaggcggaagcgccgcacctgccctggctcctctgcctcagacctgcctcccctcgcctttgtggcccgagtggatagggaggggttggagaactttcattttatttgcaggacttcccagagcaaagccatgagtgtagtgacagtggtgacatcctttgcctccctttttaaatggggaggccaggggaagcgggagcgtgcttaggagctgactgcgcacagaaggtggggcttccttcccccaggaaggaggaggagggagaaggaaggcaggctggcccagggaggtggggaagaggaggtatgggtcatggggtggggtgcggaggcctctcctttgtccctaggacctggcccacgcctggcacgtagcaggcggtcacatatatgttgaatgaatgaagtcttttggggactggcagcatgagtgtttagggcggggccagcagggaagacttgtgtgggctgcaggactgtctgtgaccagcctgcagccctctgtgtctgaggggcccaggaaggtgctgcttgtggggattcacgtgggctccagtgttcaaggtcagaccttgaacttggcggtggtcagctgcccaccacacagttccaggtgcacgatttccctggttgtcttcttgtcccgccagactctgaaggatgtcatccaaatcccacgcttcaagttgctgaaatcattaaaaccagtgattatgaggatgctgaggggtcccagaggcacaagtacctgcttcacagctgctgtgacccatggagatggtcacaggatgttgggggtagaaatcaggaattcagtgcatgacagagtttgcaaataggctgaccccgcctttccattacagattgaacgcctccgttaaggtgggcctgcactttgccacctccttcctatgctttcttggggatcagtacttcacttttgtttttggcacaaagacgttgtctgacccgaaggaaaccctgtattgttgtttcattttgttttgtttttgagaccgagtctcactctgtcgctcaggctggagtgtagtggtgcgagctcagctcactgcaacctccacctcccaggttcaagtgattctcctgcctcagcctcccaagtagctggaattacaggcatgcgccaccacacccttcattttttttttttttttttttgtatttttagtagagatggggtttcaccatgttggccaggctggtctcgaacaaacacctgacctcaggtgatccacctgcctccacctccgccttcacctcccaaagtgctgagactacaggtgtgagccaccacgcccagcctaatttttgtgtttttagtagagatggggtttcaccatgttggcgaggctggtcttgaatgcctgacctcaagcaatccatctgcctgggtctcccaaaatgttgtgattacaggcataagccaccgagcccagccaaaccctgtgttgttttcagaaacactatttaggttcatacaggttcacaatgtttggaggttaaaaaattttgttcttttaagaatcaagctgttccaggcaggagctaaaactggaaggcttggcagtgagtgcttaggggcagagtgagtctgaggaggagggaggaaattaatcaagaattcatgtttatcatatgacctttcaactctttgcagccctctaagtggagaaaaataagtttttaggtgagcagaaagaacggttgatttaaacagtagtaaagatgacttctgtgtatacctggtgccagttttctctaacctgttaagaaaaattatccaaaatgtgtaaaaccgagacggtgtgatggttacttttctgtccagtagacaagataactcctctaggacatgaatgtgacaagcgtatctctgcattcctctctttttccccagtgttttacaaaatcccaatttctttttttttgagatggagtctcgctctgtcacccaaactggagtgcaggggcgtgatccccatctcctgggttcaagcgattctcctgcctcagcctcccaaatagtgggactacaggcgcgcaccaccacacttggctaatttttgtattgttaatagagtcacggtttcaccatgttggccaggctgctctcgaactcctgacctcagattttcctcctgccttggcttcccaaagtgctgggattacaagcgtgagccatcacacctggccaaaatcccagtttcttatgatctcattaaaccggcactgtcatcctgctggttccctcattaatgcactaaatacaactttttaacaggtgctcactagtttatgagaatgagggctttcatattttgagatcaggctttgacagaaccaggttctatattttagatatggctatatgtatttatgaacatcctcgggagtggaattccttttttctctctctttttaaatttatacattctttctttctttgtttctttctttctttctttttttttttttttgagatggagtctcgctctgtcacccaggctggagtgtagtggtgcgatatcggctcactgcaagctccgcctcccaggttcacgccattctcctgcctcagcctcctgagtagctgggactacaggcgcccgccaccacacccagctaattattttttttttttttgtatttttagtagagatggggtttcaccgtgttagccaggatgatttcttttttttttagagatgagggtctcactgtgttgaccaggatggtcttgaactccggggctcccgcctcggcctcccaaagtgctgggattacaggtgcgagccgctgtgcctggcctccttttctctctttaaggaaggcaggccctgcttgttctttgttcttgttaaccctcccccaggatgtgctctgctgggaccctccacccctctactgagacaggtacacagaatggtggataatgggcctaaggtcctagtgggccagccctcaagctgcttctagctccagtgcatgggaacagcagccatgccacaggtaacaggcctgagaaacagccaggcacggggaggcgcctacctggagcgagagcactggtggtccctccggaggctccacgaggggcattttggatctgggagctgactccgcagcgtggcagggcgcctccttcaccccacctttgtcactgctggtcgggccgcaggcatcccgggtgactttctggaggatgtccgtctctatcatcttccttctctcctgtcggagggcccggcggttcacagattcttgtgaggcagtgctgaggggctctgcctttgggtctccttcatggcaggagagagtggcttcggcctgtgggtcccagggaggaccctgggatcctttggtgttgaaagacaggcttccaaggtcgccttccagccacctggggggctcctcggccatcccaagaagagcgctgacctcaccagagctttcaaaaggcctgccagggtctcttccttcctgagaggatgcatcctttgtccttgtgttctgtctgcacccaggttctgtggccaattctgcaggcaccagaactggctgtcaagaaaacaggtatgttcagttagcatcctcaaaaacatgcttcagggaatgtttttcatagaaaaatatgtactttttttttttttttgaggtgaagtctcgctttgttgcccaggctgcagtgcagtggtgcgatcatagctcactgcagcctcgacttccctggcccaggcgatcctcccacttcagcctcccaagtagctaggatgacaggcacatactactaggcccagttaattttttttaatattattttgtagtgacagagtctctacaacatagttggtcttccaggcttgtctcaagttcctggcctcaagctatctttcctgcctcagcctcccaaagtggtgggattacaggcacaagccactgtgcctgacctcttttaaccatttttaactgcacacttcattctactaaaaatacaaaaatgagccagcacagtggcgtgcgtgtaatcccagctacttgggaggctgaagtgggaggatcgcttcagcccgggaggtggaggctgcagtgagcagtgagggcaccattgtattccagcctgggtgacacagcaagatcctgtcccaaaaaaaaaaaaaaaaaagttggaaagctactgttgaatatgggctggctaaagacagcaccactgaggcatcctgctatttaaatacaaggctagagtggaatgcactgttacagcaatgaaacaatatttaaattatcaatcatgataatgttggggctcagaaattcataccccaagctagagtacaagtcatccttccacctcagcatcctgagtagctgggaccacaggcacaccatcacacccagctaattttttagtagagatcccacattacaaaaaaaaaaaaaaaaaaaaacaagaaaaaatcatccagaagagtttctgaagtaattgattgtaaaaatgaagcagcaaaataaaatcacatgcaaattgttccacctgaacccaccagagttcttagctgccctggggatctctcttgtgtggggttatttcaaacctaggtctaggaatggctgggctgatgggagatttccttcaaggtgatgggtgggtgcatgtcctggttctgggagatgatctggttcggtgcccatgccctcccattcagtaggttaattgttctcagcagaacacctgagagaagttacgctggagctaggccccgtctccattttggaagtgggttagtgcctctacactgttttcttttctttattattattttttttttagatggagtctcactctgttgcccaggctggagtgtgcagtggtgtgatcttggctcactgccatctctgctcccccgggtccaagcgattctcctgtctcagcctctggagtagctgcgattacaggcacctgccaccatgcccagctaatttttttatttttagtagagatagggtttcaccatgttggccaggctggtctcaaactcctgacttcaagtgatccacccatactggcctcctaaaatgctgggattacaggcgtgagccactgtgctcagccagaaatggggtcttgctgtattgcccaggctggtctcaaactcctggcctcatgggaacctctgtctcagcctccagcactggcaacacaggcctgcgttggcacgcttagtccacatttgctcattgtctcctgggttgtccctcccacgaggtccagcttgtgtgcttgctcaggcactgatgggccatcttcctccctcccactccccactgtagcctgtagcagtgtagtttagcagtttagtaaaccagagttcctgtgtactcgccaggtgctgggatgagccaggtagccatgaagccagctgggttaagggagagacaattaggacaagcagttgtgacaatggccagaagctattcaggatgccatggtagagaacaggataggagcgatcaagaagaagagaagggtcaaaatcggatggaaaatcaagcgtgcatgccagccctaaggtgccgggctccccaggagagggaggtgcgtggaggttagatgttgggcatctgaataccttgggttgtacatgggggaaaaaaaaaaggaccatgttctagcatatcgtggaaatgctagaacagtggtttagaccagtcagtttagactaacatcgcacacacacaggcgtatactcttctgtgtcccacagacctcgggaagggactcttcagctgcagcgacccaggccctggacttgtcgccatcggcaggatcttcagccagctcctccgacaggtctggaatcagggaggtttggtttcgctggaagatgaacagctcctcttccccatagtccgactgtggacaaatgagagggcttttggaggacaaggcagcaggcagagccctgagggcctagccacccccgctctccactctccactctcacttccagcccagcccgcccagcccatccagcccgtccagccctgctgctcaggagcctgggggagatccggttctctcccagtcagccttgctgtgcgcggcttcttgccaccgtttagaaatgggcttggcagcacaacctcgtggaggtgagactggggctcctggttctgcaagtacctcgcatacagcaggtgcttcattaatgcctcgtgacatgaacagggcagtgaggtggtagctgaaagagcagggtccagccctccccatcccctgtgaccctgagccatcacttacacagcttagtttgtcttcttgaaggggttggggctcatactctcaaatgagactgaaggtgtgaaaacaccctgagcactgaggcgtggggtccccttaggttctccttagcctcgtcatgcactggatgacgtctgaggtccctgaagctctgttgctggtgcccaggtaggacccaaaccctgcccgttccttttaaaaccctcatactgtctcttaacgcccagtgccaacctgtgcactgagcagcccccgccaggagcatctttagcagggtcttatgcctgcacctagggctattggtctgagcgtctttgagagccatttcagggaccccaaaccacaaatgcagaatccctcgaaggcttatcacaatgcactggaattgtgcattctcagtgggtgttctggccctgtcctggcacgagagagtggagaatagcagaatggaaaggacagagcttctgcatcaaattgacctgggttccaagtcagcaccaaaaactccactgaaagggtctcccaagatgctgagcaccaatacccatgctcagagatgacaatcaaggcagaagaaagagtaaagaaggaaataggcacccagaaaacacaactttgagtctggccatgcgatttaaagtaaaatgacaacaaactgcacaggtcagcaggaaaagtcttcagagaagtgctccaaagctgtcctggccagcgtcatgcctgctctggtaggaaggacaaggcatccagggagagagttcttgcttaccaaaggggagtctgagtccagagacgggagctggtctttgacagccttgaggatggcatcccagggccccatctgggaggcccagggagagcccagcgagggtgccatgcctttatcgttggatgccatgagggcccaggcttccagatgccttctcagtgcaccataatccggggagctctgtggggtacacagggtgatggaagagggtccgggccactgaaggtcaggagagcaggggctgctctaccagctgtaggagaccaaacaggctggcaggcctcaccacctgcctcagtttccttctagttatgcaagctcctgttagtgccaggcactgtgtgtgtacgtgtgtgtgtgtgttcccactcatgcacacatgtggagcctgcaggtatataatgtatatagtgatatatacataataatatacaaatatatgtattgatataaatatacctatgtagatatatgtacatgttatatagaatgccatatgtacgatatataatgatatataggtatattttatatataccccatatagcataactattctcttcatttcataggctcagggtgtttagtaaatagcaacagtggactctgaatcagggggaatttcaagtcctactaccctttactgccctttaccaaggaacagaagacaccttgcttttttgttttggagacagggtctggctttgtcgcccaggctagagtgcagtggtacaatgatagctcactgaagcctcggcctcctgagctcaagtgatcctcccacctcagcctcctgaataactgggactacaggtgtgtaccaccacatctggctaacatttttattttttgtagagatggagtctccctgttgcccaggctggtctcaaactcctggcctcaagtgatcctcttgcctcagcctcccaaagtgctgggattacaggcatgtgccatcgcgcctggctgacagtttggagtcactaagtgatttttttttttttttggagtcactactctgaccagcccctgcatttatatcttagagtcttaaaggagatggtcctgttattcagggggctggggagcttgagcttgagagctggggggtgagggtcctctagagccagtgtcaggagaactctgcagctcgagaggccgctgtggctttggccctgcagtcagtgcccgttcatccccaatcagggcagcggcaggagatgtgaattgggggctgcttgcttcctctgtacttctgggaatagggcaggtgcttggtgcactctgaactgggagcagcgggttggggacgcatctggtgcacacagccagcgggtgttttttgtaactagagctctgttccgcaattcagggcacagtatttcttagggcaacagaatcgtcgggatgaagagggcctccagagactctgataaacccttcaggcggacaagacaataggggagggaacggcattaccggcagaaggaagagcatgtacagtagctcaaaggaatgaaccgcccaacaggtttaagggaagaaagtgtcagttgctggactctccggtgaaaacggaccagacaatgcagggccctgaacgccaagttgaggagctcagagcatccagaaggcgaaggggaggctcggagccgcctctgaataacggccttccggctccgtctcggggtgggtttctcagctgcagcctgttagccccgccacagccccgccccggttctcagagccccgcccccagccggcctgccacgaggctgccggttgttatggcaaccagacgccaacagcctcccgggtcgagcttttaaattttaaagctgtggaagtggaaagcccatcgctcctcctctcacccacccccagcccgtatttccccgcgttttgttcaactccctgcaggcgcagcaggcccgaggcccctcacctcaggcctctgcctccactccccgcgctgtcctgacagcgctataaacagcctccagcgcgtcactccgctcgcgtccgcccctcgggccgcgccgcaggtacagaggctgtccccttcttcagcactctccctctcagcggagctttaca

SEQ ID NO: 5971 - DNA, 265 bp, Homo sapiens
tcacgcttgtaatcccagcactttgggaggccgaggcaggtggatcacaaggtcaggagatcgagaccatcctggccaacatggtgaaaccccatctctactaaaaacacaaaaattagctaggcatggtggcgtggcacgtgcctgtagtcccagctactcgggaagctgaggcaagagaatcacttgaaccagggaggcggaggttgcagtgagccgaggtcgcaccgttgtactccagcctggtgatagaacgagactccac

SEQ ID NO: 5972 - DNA, 1541 bp, Homo sapiens
acattctctccagcaggcagccgtaagggaggcggctgcagtccagacaagatgatgagttggcagtgagcatctcgacaggagcctaatgaagaaatctggtaacagcgagggctggctttatgagcgctcatatttggtctttcactctctgcaaggttggtgagtggcaaaagtgtccatgggcctctacctcccactgtggaattacacattcctacagccagtgggctccgggaacccaatggcagcatccccaggcccctgggcccactccacacatcacaggctagagacttcttgtctgcctcctttctcacgtctctccccctgagatagcatgctctcccctccctccttccctctcataatttgttcccaacaggtagctttgtgcagttactccaagagaagcccgaactccctggggagcctctgcccaggtggaagagctctcgagtggctattattaggggtgattgctgggaagctggttgccatggcaccgcagaggccagtgctgaactcccaagctgccccgtttccaaggctgtctacataatcactgcaatgagaggcacaggcacagaaagggagagaggagcagctccccactgacagtgatctccctgcagagcaaggtgagcagttcacagctgagtacgacagcccatcttggcatgggccaagcactgcctggagggaccctggtgtgagctggtcactgcttcactgtcttctcatggatcaggcagtctgcctctgtgttcccagtactggttttctacaggaaaacactgctcctaatccactgatccatttcttaaaggttcctggagtttgcaaacatcgagtagtgatagtcttccatctgccaggcactgcgctaaactctttatggagacaaagaaatgatgctcagagagtcatttgcccttggtcacaggctaagaagaggcagagctaggacgtaaacccaactctggctctatggcatctcatatagcatcatttttcctccagtcctctgactagaaagggtggccccttcaacctggtgctgagaacagacactggcggccccacacctctgaaggcatggttccagcaaatagaaattggactggcaaggattaaaccgctggtttgggcttcattagctatgtgatctcaccaaccacagagaattaaccagagtggagccatctctttacagacttaacacaatgtaccgaggcaatgtggagaacagtcactgaatttattgagcacctactacctgctccagacatgccattaacacgtgggctatccttcccttccacagtcactctagaacttgaggccactgtcctctgatgcagagagaagaaacattttataatcactgtagacaataaaggctttatctgttagcaagcacttttgcttaatgacttggtcatggggaaggagagacaggttgtacttggtcctcattttgcacttggttagagagtaagaggcctttccatctccactgctgctcaggtacttcctcc

SEQ ID NO: 5973 - DNA, 1541 bp, Homo sapiens; identical to SEQ ID NO: 5972

SEQ ID NO: 5974 - DNA, 377 bp, Homo sapiens
caagttacccacacctgggcttgtctgaccccagaaccagcactattgaccactatgatatacagcctctttctatcttcattaaagccaagtttccaagccacaggaatctcacaaatacctataaccggcctttataatttatgaacctcaacagagtatctgaaagccacctagtggctggaagttgctcagtaggatttgaaattctctaaaaggcaaaattgttcccatattccaggctctgctccctctcccccttccaccaccccttgatattctttctgaaaagttgagttggaaacaatcactttcttctctgaacttctatagagcaaggttcccaagttgtgatcaagacacaaaagtcatggggc

SEQ ID NO: 5975 - DNA, 377 bp, Homo sapiens
caagttacccacacctgggcttgtctgaccccagaaccagcactattgaccactatgatatacagcctctttctatcttcattaaagccaagtttccaagccacaggaatctcacaaatacctataaccggcctttataatttatgaacctcaacagagtatctgaaagccacctagtggctggaagttgctcagtaggatttgaaattctctaaaaggcaaaatcgttcccatattccaggctctgctccctctcccccttccaccaccccttgatattctttctgaaaagttgagttggaaacaatcactttcttctctgaacttctatagagcaaggttcccaagttgtgatcaagacacaaaagtcatggggc

SEQ ID NO: 5976 - DNA, 456 bp, Homo sapiens
caaaaacaaacccaaaatacaaacaaacaaaacaaaaccataaaggggcaatttccactctgctccggctgaatgcagccatgcagaaatggggctccagcacagccagactaatttgtaaggcctaaattttttgaggaactctaattttttcatgttagcaactaactaaagaaacttgagcgtgtgatcaaacatacgtcctctgtaagctatgcaggccacacctgtgacctgattaactccctgcagtgatgatggtgatgtctgtggtgcactggcatgtgctggggctggatccatgctccttccctaacctctccctgctcccctgtttctctggctcctattcaaccttcagggctcactgtctttttctagaaaaacttcctggacaatcttggcccactgcatcctttcttccttactggttaatttggccaccttctaatcttc

SEQ ID NO: 5977 - DNA, 456 bp, Homo sapiens; identical to SEQ ID NO: 5976

SEQ ID NO: 5978 - DNA, 8031 bp, Homo sapiens
gaccttataaaaggaaagaattggccagttttcagataaaccagaaaagcttatacaagagtttgttacgttgactatgttcttcaaattgccacgatttacaaatattgtcatccgcttgctgtgctgtggggaaaaaaaagtagaggaaaaagtgtgtggttaagccagtcaattatgacaaggttaaagaagtaactcggggaaaagatgaaaatcccgctctgtttcagggtcttttagttgaagcactcaggaaatatactaatgcaggcccagacaccccagaagggcaagctctcctgggtatacattttctcattcaatcttctcctgacattaggaggaatctacaaaaagcagcaatgggaccttcaagtcctatgaaacgacgcttaaacatagcctttaaagtttacaacaacagggacagggcaaaagaggggagtaaaaagaaatagccaaaaagtacaattgttaacagtgactttaagcctccttgcccctcaggattactcatcttgagaaaatgttacaaaattagcatctgggatgcctagacaagacttgatgcctgacttgctgacccctgggccagaatcactgcgcctactatacgcaaaagggcccctggcaatgcaaatgtcctaactgctctggtgagagagaacaataacaacaaaaagcttccatcaatactagagctaaccttctcctactagccccagtgagctgcttagctcaagtaagtttactgtcccagaggacagctttccacagtggcagataagcagccgcctgaacatttttctttggtatttccaccactgagtgtgctctccagtggcgtggggactccagaatctccttttgagcaatgcagtttgcttcctcccctttttagttgatgctatgggattccctgtcctgccttttcctgttttccatacctatcggggcaaacaaaatttggccaggtagatgggtcccagttctgtaaataacttgaatccagttgtcttgtataggtcattttatttaatatgtttttgggtatatgtacatgtattgtgatgtgtgttacatctagcgtgctgtcaaactggcttatagataaaagaacactcatacattcaacaaataagactactgaaagcttattagtttgaagagaatcttgtatcttctaaaatttaactttaggatttttacctaggtaagtcactgatgttcataggctttaaaatggttaaaatggctttaaatggtgaccagctttgcatggtaccttggttctcggtgatctagataaagttaaaagtgaaataattaaatacacgtaaatgggatatgcttaatgtgtggtttaaaatcataaaatggtagaatggttctcagttatagaatgacaatgtctagtgtgaagttcatgacttcttccttcctaggtttccataaaatgtgctaaagaaatgtattctttattgagaaaaaattttttgtctaatccggaagttactaaatgggaggttcaaaacatgagtgaaccagtgagtagaaaagagagatgtaaagaatattatgaatagaaaatgtattttttgtttgttttgcaaggaaggatataaagaaagagtaattttatatgtggaggaatcctgtatagtaaattccctatcctagagtaaaataactttaagaaagaggtagtatagaacatgtcaggaaattcagctatgttgtagatggtctgtgtaagtcatctgcacagtgcatgagtgtggaggtgggcgggcactcattggcccttgaactccttttgagcagtatggaagccaagaactagaagccaggaaatggggttgtaaaactgatttgtctatggattttatgtgttgagctgctgtggtcttggcttgtagtaattacctatatgaaccttcccccctcccctttagaatttaggacaggttcaaaaggccctccaatataaaaataaaatactgtccttccccacaaaggaaaaaatagctccccggttcaaccaggagacttagtcttgctaaaaccttaaagacagggtaaagacagggataccccaagaatcaattacaatgaaatggaaggggccttatcaggtattgttaagtacccccactgctgttaaacttcagggaacacctacttgggcacacagatccaggactaaacctgtttcttatgagtcacaggcacaaaggaagggcactacaaccacaaccaatatcagtaaagctttggaagacctctgctacctatttaaaataatcaacactcagccagaagaggtaatgtaatgctgtagatgggaataggagcattgatcttgctcttcttcctgactgtagtacttcctttctatggctttaaccagccacctcctcctgggaaacatctcctgtgggcttgttgggtatagaagctactctaagacccaaccagataccatgatgccactgttaattctgtttgctcttctaattaacctaagctagtgtgtatgtggacagggagggtggacaaaattctacagtaaatatttcaaaaattatagcatcatagaatcatctttatggctgccagatttgtcatcaacacccccaggatagacagtttcatcttccgacctatctggaaaatctcaggaccatgtccccagacctcctaactaaccatagcaccccaaaatacccaaacccctattgtgaagtggaactcttccccacttagtggatcccccctggaccctgctgtccccctgccctgaccactattatcggaatctgggaagttgggcatctatatctccagtgcactcataactctaacatttgcatccactcttgcattaatgacacaaaagtggaagcttccctgcgatgctctggtccaactctagttgccaagtttccaagaccacggggaggtaaatgagattccatttgtgagtgaaaagaccatatatggtaccttctcccggatgggaacatacaaaggaaaaacaactgcctgatctgggaaggtgacagtactaccttcttctagaaaacaaagattgttcaaccaccaccatgagaacaggtggaaaatatctctatagacccaacctggcaatgaagtataaacatcgcaccccgcagggcttctcttggtgccctagttgggttcatttttgtttgtgactatgaatgggaagaagtcacaccctgtaaccactccaactccctaaggagtcacctcttctttaaggaatagctttcccttgtatctaaaaaacttggaactgacatgaatgaacgttggccactcttacccctccaggggtcacaatctataacgcctaggacccaagaatatcagaaataagtaagcaataaaactaattctggcaggaatcagggtggcaataggactagcagcaccctggggtggctttgcctaccatgagttaacgctaaagaacttggctcaaatcctagaatccttagccaccaacggagatcaggcattaaagagaattcaagagttccccagactctggaaaatgtagttgttgataacagactagcattggattatttactagctgaacaaggtggggtcttgtgcagttattaataaaacctgctgcacatatattaactctggacaggttgaggttaacattcaaaagatctatgagcaagctacctagttacatagatataaccagggcactgcccccaactatatctggtcaaccatcaaaagtgccttcccaagtctcacctgtttttcacctcttctaggacctttgacaactgtcttgttacaaatgtttggtccttgcttctttaacctcttagtaaagtttgtgtattctagattaccacagttccagagacaatgctggcacaaggcttccagcccatcctgtccactgacacggagaatgaaatcgtcctgcctctgggctccttagatcaggtatccagagatttttactcctccagtgccaggcagggcctacgtccataaactcagcaggaagtagttacggaaaacagatctccgcccttctgcagcccccttaagattaaggaggagtatctaatctctgaagggggaatgaggtaggaggtgggactcaactctggaagtggggctcaggcactcagaccaaactgagcactagctaaaataggtccagggcagatgctagtttccataggacacaccgacctgtgtcaagtcagttcaccatggctctggcagcacccagaagttaccaccctcaccctggaaatgtctgcataaactgccccttcatttgcatataattaaaagtggatacaaataccactgcagaactgcctctgagctgctactgtgggcgcacagcctgtagggcagccctgctttgcaaggagcagcgcctctgctgctgctgtgcacagccggccgcttcaataaaagttgctaacaccactggcttgcccttgagttccttcctgggcaaagctaagaaccctcccgggctatgcttcaatcttagggctcgcctgtcctgcatcactgggatcatctcccagtaaactagccacacttacatccatgtgtcagggacatttctggagaaagcagcccaggacactgttgaataaaacacacaatagtctctgtggtcttctccaccccaccccacaccaggcaccctcagcttgattctcctttttaattgcctgtaagcagggaagcacaatgttttcacattctttgtaaggcctttgttctactaaaatctaacctcagagcacaattttaaactagatgaaagagttgctgcgcctgaagcactgcaaacacctcctcaccacacatgtgcactcaccctggacaccctcactcaccctgacaccctcactcctcaccctggacaccctcactcaccccagacaccgtcactcctcaccctggacacctcactctgcaccctggacaccctcactcaccctggacacgttcactcaccctgacaccctcactcaccctggacaccctcactcaccctggataccctcactcctcaccctggacaccctcactcaccctggataccctcactcctcaccctggacactctcactcaccctgacaccctcaatcctcaccctggactccctcactcctcaccctggactccctcactcctcaccctggacaccctcactcctcatcctggacaccctcactcaacctggacaccctcactcctcaccctgacaccctcactcctcaccctggacaccctcactcctcaccctgacaccctcactcctcaccctggcaccctcagtcaccctgacaccctcactcctcaccctgacaccctcaagtcttcacctccctggctgcagcctgggacacgctttccctaacttctgaaggctcagtcctcctcaagccaatctcatctcaaattgcacctcctcagagaggtcttccataaccgcccttataaagcaggattctttcaccaataccccttcccacatggcactgtctcacagcactcctctaaaagtctgtttacttccttgacaatctgtcttccttataaggggaggttctgtaaaagccaagactctctctgtctagttgactgttgcataccagggcttagaccaaggccctgacatgcagtaggtgcttaatatgttttgaggcaaggtcttgctctgttgcacatgctggagtgcagtggcacaatcgtaattcattgcagccttgaactcctgagctcaagtgatcctcctgcctcagcctcctgagtagctgggactacaggcatgcaccaccaagcttggctaatttaaaaaaaaaattatatagatagggacttgctatgttgcctaggctgatcttgaactcctaacctcaagcaatcctcccacctcggccttccaaagtgctgggattatagccatggagccgccacacccagccaatgtgccgaagaaagaaagaaaaacatgctcatcctttgagtcaggttcaaattttttctcctctttaacccccagtcactccagttataagtgatttttaactcttctcacactttaatgcatctggcaagaagatccacgtggtgttaggaacaatacaggaccttaaggatgggggaatcagcaggtgtcagcgtgccctgtatgctcagggcagctgtttccactggacattctccctttgcctctctgggcagcaactcctaggccagccgacctgctgtgtcgagtaaccaggatttctcaatcttggcatggttgccattttggaccagatcgttctttgttgtgggggctgccctgtacggcaaagaatgccgagcagcacttccagtctccacccacaggacgccagtagcaccctctaagttgtgagaactcaaaatgtccccagaggatgccagatgtcccctggggtggggacacaatcaccccaggttgagatccatggagccaggtctgtttgccaccaaggggtaaagctccattcccaccttaggagggctaggaggcagcatcgtggggccacagaaggcctgggtttgcagtcagaggacaggatgcacattccttcaagatacagacccagattgttgggcatctagttcttgggttttctgttgttgctgttccgttttgtctgtcttccctcctttgtttactagcagcctggaatttgccactttttctaaacgaagatttatggaacacttaccacacggctgacgctgcgcgaggctaaggttctaatacaccgcagctcacttaactctcgcaataccataaacgcacactgtttcatcttgaccctttcttgggaaggtgacagagaggtaggagggcaaacatcttgtgtgccccgtcccaagggtattactggtggaataatatccgccccccaccccagtttctaatttgctgtaggctgtgacgctgtggggcaagactaggagtcctgttgaaattaggaataagtgtgctgtgagggaagggctgccttattttagagcacagattttctgaatatctattttgacaggttcgatcctctccccttcctgccttccttctgtcgattttcaatgtcttgatggtgtcccacctgagtggcctttagagatgtgagttgtgaggcactggggaggcaggcacacgtcctccagcccaagactgcctaatttaacagggatttctgcattctggaacaagcctccattttccccaagcaggattactccagagggcaaaacacagcccaatagtatcacatttcctttctgctttagcaaaaataaccactgtctcattcatgggaaaaggccgccaaacaaatttgttactggaaccatttgtaacaacttctagtttgcactgccttggagcaagcacactttgtagaggagggatttgcagttacttgggcaacaaggtaaccactgatcattacaggaagcttcagaaaccgtgggaccagtgtagaagaatggactatctgtccaaactaagaataaaaagaatgacacttgtattttgtatgtctttttcactttgcctttctagtaattcatttttcttgatatttacaccttgtggccctgtgatagactggaaatctcaaaaacacacgttcagcaccaagattttcagcagcaccgcctcagaatgagacccctagaaaaaactgcgtgttttccacttgcccaacacgaggagtttttggaacacgacctgcttgaggtggagattttctagatgggcaaagagaaggaaacacttaacctaggaagagtatttaggaagaagaaagaacacagcctttctgcacaggaaaccgccgagcagaggggcatctggcctctgcagtggcctccaaatagagtccaatggctggggccagcgtggctgcttaaaggggactcaagggatataataaaatgcagattct

SEQ ID NO: 5979 - DNA, 670 bp, Homo sapiens
atttccccaggaggcagcacgatgtagtgggaagggctctggatgtctctccaaggcttctggaattcatgcccacctccaccaagaagccactttcctgccagctacaggtgctcacctgaaaagcaagccagaccatattaaccctggcattgctggtacctggaagactttctgattcaatgctttccacctcctcctacccctcaccacccccgtggcatgaaatcctgggggctgctttagaaattgttttctttggctgctggtgggggtgctgctggtgggggtttgcacagctggcacactgcaccagtctggtgggggtttgcacagctggcacactgcaccagtctcctgcctgctgccaacaaggccatttcccaagcactggctttggagaagttggggctctgaagtgggaacacaaggctgccttttgcaggccaggtgtaaattctccccctgccactttcagcctagcgtgaaacagatggagtgtgcattcccacttccctttatggtaccctggaatgatggagctgcccagggcatcgccacgttactctctagacagtctctttgtcttcctgcaatggcagcgccgaggttgtatatttctaggtgcaggtatatgattgccatataataaaaatctgaaaacatccca

SEQ ID NO: 5980 - DNA, 1129 bp, Homo sapiens
tggcgagggcatccttgttggctgaaacgcaggcattttgggttctcagcatcggtattataggccaccctccagatgctctggggtttttagcactgacatttcctctaggattgtgggttatacccctttcgctaggcgaatattggtcttgtctttttccaccctgaagttaggagtattattttcctaatagccaattgcaagctccttcctgtgtactgtcttataactcccttgcctaagctgctcttggtcaaaggaattgggagctcccaggctcctggcctggcagtcagccacctacagtggtagacaagtggccagcccaatatttttttcagtatctccactactgggtaggttcttcagcaagtcagagcctctgaggtctccccttgggcaacgctgtttacccctttcccttcctccatttgtttagccccctctccacccaactctagatctctatggaatttaggctccacattcgactgcccattcgtagctcataatccatttttataacaccttgctatctatatttacacctttaaagaacacgggaatttaagagggaagagtaactaggcttttgctaaacttgggctaataaaaccctctgtagagagatccttaatataggcatggggacaacaaggagtatcccaagggactcgccgctagggtgtcttttaagctattggagcaaattcaaatttggcttaaagaaaaagaaactcattttgtattgcaacaccatttgggttaaatacaagttagatgacgaatatatctggcctaaacatggttctatatactatagtgatattttacgattaggcttattttgtaaaagagaaggaaaatgggaagagatcccttatgtacaggcttttatggctctatactggatcacgttacttccaggcattagaatgccatgcataagggatccccacctagctgctccccatagaaagttcataagcctccccagagtctcttcagtcccccagtcctgagtgggggttctcgccaattccctaatgagattccaccccaatatcatcaggcacctttcccccttatccaactagccctagcctataccctctgctgcccaaga

SEQ ID NO: 5981 - DNA, 14718 bp, Homo sapiens
cctgagcgcaggccagggttgtttggttttgaggtgtgctgggatgaaaggcaccctggaagtggaaggttcggtcattcattaattaattacatctataattgagggtttgttcttaagagcgagtcctttgaaagtactttccttcaaacagtgactgccacaaaggcatcagatattcaccaccttctcggctgcctcagcacagcaagctttattctgggacctgagatcctgttctgagctggctttcccttctccaggctcgctcaccctccctttagaggtggggcttattgggggtggaaaaaggtgtgtgtatctctgttgtttaatgtctggttttttgttgctgttgttgttgttttgttttggttttggtttttggttttttttaaggaaatctatactacatcgaatatgctttcttttgggtggactttaacctaacccattccaggtaaatgaacaatggaaaaacttcacggcaagattagaaagatacctgagcccaatacccgcctgatgtcgtgggccacacctccgggttaccaggggaagggaggaagcaaactgtcatattgatgtggctctaaacaacaacagtgtgcgaaggcccaggggcactttgggattgaccaagaggaaacacaagttgcacaatgatacaatcttgttggtacaattgtcagagaagggaactcccacagcaaaggccataaaaccatccagggcagtctggggcggctcagttctgcggtgccagggagtggagcagagctcagccccgtcccaaacacagatgggaccatgaactccggacacagcttcagccagaccccctcggcctccttccatggcgccggaggtggctggggccggcccaggagcttccccagggctcccaccgtccatggcggtgcggggggagcccgcatctccctgtccttcaccacgcggagctgcccaccccctggagggtcttggggttctggaagaagcagccccctactaggcggaaatgggaaggccaccatgcagaatctcaacgaccgcctggcctcctacctggagaaggttcgcgccctggaggaggccaacatgaagctggaaagccgcatcctgaaatggcaccagcagagagatcctggcagtaagaaagattattcccagtatgaggaaaacatcacacacctgcaggagcaggtaagatgctgggtgaccctggagatccagatggggctgctttgccaggggaccctcgggaggaaaaatgagtccagaagacaatttccaggaaaatggcatcagcgcttgaagtaattgtgcacaaaggttttgggggatgttttcttattatatcttaaatttggagtgggaaacgtctgttttgtttaattagtctactgtccatggataatgtagaaaaagaaggcagcaaaaatgatagaagtgctacagactgtttcaaaaatgagactactgatttctcacagaccaaaaacatctttaaaatgtgaggcaaccagctgctgtttaatgtcacttatgacccaacgatgtcatagaaatgataagggctggtgttcatgctgcatgctcagtgcaccaggcataagagagtgtttactttctcattacctcagttctgctccacctcaaacttttttgaacaatgtggttatccatcgacaaaaggctgttacactattttgaagattatgcctaaaagttgtcaccacaccagcatataggtcatcatgacatccctagatatttccgtttgtgggttgcttgcagtaaagttgctcacagttctgacaatggcatattgctagaaccaataataataaaatgagcataatttttagaatctgagagttgagatggctataaagaccttgttcaaaaaaaaccgaactctttaaccaaacctcaaaaaagctaagcaaataccttctgggatgtctcataacattagctagaagtagaaggaatccaatcatctcataggttatgttttaaagctatctaactcccctcttatataaagcagtcccagaaaattccctgtaagaccatgatttaacctcccctagaaagggtatcacaagtttccaatatttatatatattatttcacaatgctcagtcatccttgcttgaatgtaggaaggaccagtcaagataatataaatctgtccttgtaatgaaccctaattattgaataatcaacctaataactgactgtaattaccttaactatatagtgcatggttgtctttatgaaaaaaaaaaaaaaacaaggtgactcaacagtcctcatcatgtttttttgtttaataaagttgctttggttgtagaaaggaggaattgaagatttttgcaaatggagagcaaagggagaccatgactcccaaaagaaatacaaggttagaaccagtcaaataatttatgagctcgcggaagagatttaaaaaaaagaaagggaggaaagagagggaaatgtttactgagcacttattatgtacctaggcatcctgctggatatttaatacacatgtcaacactatccaagagttttctgcaatgatggaaatgttccatattattttatttgattctgcaagaaccctgtaaggaaatggaagcttggaaaaaagtgaaatagccatccaaagccatcagcaagaagcagaggtgggattctaactcaggtctgtttccagtagcctcataaatttcactacagtgtagtgctgcctagcccacctcatataaaaatgacacttagtatgaataaagataatgcattatacttgcatcattaaccacacatcacatacttcatacacattgtctcatttaatcctcacaactgtgtggagcaggtatttgtattctcaacttacagataaggagactgagacctaatcattgtctaaatcctttggaacagaattgagaaaagtgagtaggtgcaatggggggtgtggggagcaacctgcccacccttcagatgacctggaattctgggttctgagattgaataggaaacttctttggctttgaatttcactcttttctggatttttacctctaacattgtgttttctctacacttgaagaaagaaactctttaaagttgaggttgtctatctaccccaacctccctcatttgaagatgagaaaacagaggtgcaaggaggtcccacaattacctggggcttatccttcctggaccttggtgaaatgctctgagtggatacagttctcccgtaccctcactttaggtatattaaatatcactcaaaaggttgataacaagttgagcttaaaaattaattcaatccttttgaaatccagaattggacacagtcataggagtatcataaataaaacaccttgaatgattctcaatcggactatatttggcatttttgtttacagtcaaacattctgttttcctctccctagtagatcaaacatcctgaagcaacaatgctgcaagaatatgccaacttgcttttaaaagaatgaactgagggccttcaggagaatctgggtgattaattacaacactcagtaaaaaacctatgcctcatatatcgtttctcaacccatcttcatccacttattaccatgaagattgtgtcagaaatgatggttatatcataattctgtactaagtaagcctgaataatgggaaatagttttaaacgtgctctatatcaagcacatttcagaattcacatttgtgtgctatgagaatgatagctgggggaatcagacacttgaggtggactttgcaatggataaattaccaatttaacccagaaaagctaaataagcccatagacagtatttttgattttctgattctctggatgtagattaacacctcatagtgtgtgtcaaatagaaaacctcagtgcacaagtaagtaagggttaccccacaatggcccccaggctctttgggatagagctacttttcattttgcaggagcttacataatgcaaagaataaggggtctggagggagaagtattggtaagaatgcccctaagcagcactgtggagaggagacaaggaaatatctaaaagtgtccttctttatagcaagggaaggggccatagtaccatttggaatcccacaagaggaaaaagaatgaggcaggagcagccagcctggctatgtcccaccatgaacagcaaaagtctgagcaggcatctcagcatatagaacctggggatgttcacagtgtagtcactgaatctataaaagtgctagatttttaaaaagaaaggtgtattatttacttttttctgaacaaattcagtttcgaccaatttttcactgtctataatatgccgataatatgctatttgacattatttgacatactctcttctaattctcataactctttgatgaagtaactattgttattgctattttatggatgaataaactgagactcagccaagctcactcagccaatctcacccagccagtaagcgcggagcaggatcccaggccctgctctttgagttccagacccagcattcatgccatctctaaatcctgctattgtgcattcatgataccaaattccatgggatcagtggagctttaaataggaccagacttttaaaaggtgcctttgtactgaagtatagctttgtcctaagaaaatgctttctaaataaaggaatgagctatgtaaatataatgggaattacccaggattctctgactccaactaaattacagaaacttagagctaagacctctaaggtcctctgtctctagtacagactccttatttgacaatggatgaaactgaggcctggagagtagagtgatgcagcctgatgcatccacatggatggtcaagaacagagccagaaccaaagaaaagctctaagtttctagtccagcacaacacttggcgtaaaagcattattacacttttgacaacgagacatcttctaccctaaagacagtgacatacatcaaatgtgtgctatttctctgactataacatacctacaagtgtttacaaatcataaatgtatacacacttgctcgagtaagtgctttcaatactatttttcttttcaaagtaaaaaaaaaattatacgaacatctagtgaaagtctttaactggaggctttaccactactgaagcttcttaagcattttccttagatggtaaggaattatttcagttaatattttaatagctacaatgagcacattctcatcacagaataagttgcaatgacataaacacaccttcaagttacagtcacttcgggcaaaaaaaaaatgtgttctgtgatgactattacaaaatacattgaatattagtgttagcgttgctcagtaacactgattagaaacatgattgctatcacaagtaagaattatgttcacctgaaataataatttttgtatttttggagggctgaactaattaaaagtaatggcaaaaatcactttttcaccaacctaatacaataagaaaaggatcagaacctaaagtccttttaacatcttcagctgtggatgagcttaattaagcaaaatgctatgacatgtccataacctaaaaagttagagggcattttgaacaattactgtccttccccttcctatatcattctttcagcagttgcatcaatccaagcctgtcaaaactcaacataaaaagaaaaaaggcagtaacactgactgcagatcatattcttattttaaaatcattctgctttgcacctagtatgtgctcactaagcatttactgattcggttattcattgttccactgccagaacaagaagttgtctgtactaacaagtcaaatattcaggaagctagaggacagacatgcagcggtcatgtgtgggtgtgtccaagtgagataaccttttgtgcttttgtgcatgttttacagatagtggatggtaagatgaccaatgctcagattattcttctcattgacaatgccaggatggcagtggatgacttcaacctcaagtaagttccttcttcacagggttgttcgggtttttgtttgtttgctttacaaaaggaaaactcggcggggcgcggtggctcacacctgtaatcccagcactttgggaggccaaggcgggcggatcacgaggtcaagagatcgagaccatcctggccaacatggtgaaaccccatctctactaaaaatacaaaaattagctgggcatggtggcacacgcctgtagtcccagctactcgggaggctgaggcaggagaatcacttgaacccaggaggtggaggttgcagtgagccaagatcacgccactaacactccagcctggcaacagagtgagactccatctcaaaaaaaaaaaaaaaaaggaaaactcatcttgccattacccgcatctaaaatcttataatgaaaaggcatagcaacggcaaatgcactgtgtgttacttgaatgaaccttagtttaaacaaatcagatataaagcacattatagtatggggaagtttgaatatgaatcaagaattagatgatattaaagggttgttattaatgtttaggtgtagtgttatgtttattttatttatttatttatttatttatttatttgtttatttttgagacggagtcttgctctgttgccaggctgtagtgtagtggcgtgatctcggctcactgcaacctctgccttccaggttcaagcgattctcctgcctcagcctcccaagtagctgggactataggtgcacaccaccatgcccagctaatttttgcatttttagtagcaacagggtttcaccatgttggccaggatggtctcaatctcttggcctcgtgatccgcccgcctcagcctcccaaagtactgggattacaggtgtgagccaccgtgcccggcctgtttattttaaaatatatttttcttaaaagatgcatcctgaagtatttagtcttaaaatgtcatcacatctataatctgctttaaaatacttcagcaatgaaatagatgaagcaaatatggcaaaacattcatggttgctaaatatagataatgggtatatgactgtttattatcctattctccctactcaatttaaaagttgacattgagtcaccatcatggagaagtgtagcatgaaactggcataaaaaagacatcctatatgtattcatttgctctctttaaacctaaaaagtaaaagattcacctctaaatgaaaatgaatcctttcaaaaaccatggccttccaacaatgagtgcactcttctcttccttctcaccaaaggtatgaaaatgaacactcctttaagaaagacttggaaattgaagtcgagggcctccgaaggaccttagacaacctgaccattgtcacaacagacctagaacaggaggtggaaggaatgaggaaagagctcattctcatgaagaagcaccatgagcaggtacaactccccaggaacacctgctaataagcacagctcttagcctgcacatctcaggctgattcgacagctacagaagaaaccaccacctggatgccaatccccttgtccttcaccctaaatagtctttagaaaaacatacaaatatctaatgtttctaatttcaaggttagctagtcacatgtcaaatacaacaaccaaaatgcaatcataattaatgatgaattggtcaacagttttgttaatacacaatgtttacctagatgtgcttgttaatgttactataagaatcaatgcgtgagactggacttccatcactggcccaatgttcagcaagttaggggacaatataatgaagagagtctgctaccaaccaagataagtgtgatgtggggcaaaaataaagaatcctaatttccagaagcatttaactgacttttagagttaccatccatcacaagtcctcaagactctgataaaatgatagaaaaacagttcccattttaggaaaacaaaattgcttctcaacatcaaagagctcagtttctgaatagctggttagacaatgattgttaattaaacctttcctgtggctgcttggttttcatgaaatcctatgggcgtcagccctacagtgtcacaaggcattgatgagattttgaaagcctctacaccttctttctgctgtttgcctcttgaactgcttcccaaaagctttggcctatagcctgtaaggttcagctgcttaactatgttgtcacttcaccaatccacatctgctgaacaggactttgcacactatggaagcataattctttctgaaatattttcaaccacggatcaagtcagtaatcatggaggctatttgattacctgccttatgatattctttttttttttttttttttttttggagacagggtctcactctgtcacccaggctggagtgcagtggcgcaatctcggctcactgcagcctccacctcgcaggttcaagcgattctcctgcctcagcctcccaagtagctgggattaaaggtgtgtacaaccacacccagttaattttttgtatttttagtagagacagggtttctccatgctggtcaggttggtctcaaagatattctttattttataaaattattagagaaaaaagtatacaatgttttatcaccaacaagtaagtaatatttgagaaaccaaaccagtgacagtgggagcaaccacataatcggaatgtttaaaagatctatttaccactgccaatcaacatggcaatccagccttctgattgtcaaagccggttcatttcctttctctgttattaaataggaaatggagaagcatcatgtgccaagtgacttcaatgtcaatgtgaaggtggatacaggtcccagggaagatctgattaaggtcctggaggatatgagacaagaatatgagcttataataaagaagaagcatcgagacttggacacttggtataaagaacaggtaaaagaaagatgcacaaacttcccaaaggttgcatttccatgaggtcccaatgctgacgcctttgccttgcttggtcccacagtctgcagccatgtcccaggaggcagccagtccagccactgtgcagagcagacaaggtgacatccacgaactgaagcgcacattccaggccctggagattgacctgcagacacagtacagcacggtgagtcaaggctaggaaaaccgtgaatcccacaccacctccttcacgaagccttctgagacctctctcccaggccctgaccctcaactcccttgggacaactctcactttccactttccatccaaattgtttatgatgagaaccataataaagggctaccatgtattgagtgtcccgatggtgccaggcattgtgctaagtagttcatgatattaaatgtcattaatccttacagtaaccttcccagataggtcttagtgtccccattttagagatgaggaaaccaaaactccaacagtaaaataaattggccaaggtcacacagctagtaagtaactggtgatgaaaccatatgatttatttggaggaagggggattctagacccccataatttctatcagtgccctctccacttacaaccaggctacccccctcaaaccccaatgtagagaaattccagtgccaacatggtaggtggcagatccaggcctggctaactccaaagcactgccctattcatttatgtatatgtcttatcacccagaaaactctaagttcttgtgtccaagtcatttctatcatcttcacagtttagaaaaatgcttagcatggtcataagcattcaaaatttatgaaggtctatcatttgattcccagtataccctattgagtcttctaatcattcatccatataattgccaagtgcgattctaccctcagtcttgagaggcaatgatttgttcatttatgttgcaggtgcacttgggtaaatgactgctgtgttttatgcatccgtgatggtgaacagacactgcaaatgtgcacgtagagatcatgagtacaaaaataattatagtgcaactttcaaaacgttttaacatacagtatttcacaatggccctgtgaaacaggcgaggcatgtatacccattttcatgcattctactatctgacaccaatccttagcactgaggattttttaatgaaggagtttatattctagtaggagtgacagataataaatgtgcaaatcatcaaaatatatgttagatggagaaaattgctacagagatgaagcagaggaggagggcagatgcaccagggtgaagagctgctatcttaaacaaggtggtcaggaaaggttttcctgttagagtggcagtgagcaaagaggtaaggaggtgcttgatgtggtgatgggatgtgttccaagaggagggaacagcaagtgcaaaagcgacaaggcacaagtgtgtctgatgagttggaggagcagcagggaagtccatgtggctacagtgagtgaatgaagggaagaagaaaggagagaagaggaggggaagggaggggaagagggaggaagacagggtgaggccgcggagtcccaacagaaccagacagtgtagggctttgtaggctaccttggaggggtctcaagaggaacagcaggcatagacaactctttgaggagctttgctgtagctgaaggagagcagagaaattggatgatagctgaaggtagatatgggtttaagaaagatatattttaaggtaggaaaaattattctatttgaaagctggtgggaataatccagagagaatattgataacgcaagaaggcgggcaactgccgagatgactggagcacagacagctcacacaaaagaacagagggaagccagcacccagatgcagattcaagtatgtgcctgggagcaatgtagggagcagtgggcggtctctcccgattgctttcatttcatcaacaaaattaggaagcgaggccatggactccgaggaaggatggcaaggacagaggagagggaacaaaataacctcctgggagagtaggagactggctgaccagggaaatgtgctttaaccgccaggcagcatgaacggccccctgaaaattagcagccacgataaagggagagtatccagcacagttaggagattctctttaaggttaaaattatgcgcttcagaaaagcaggtgttacatgcaaacagaactgggacttgaactcaatcctccatattctagcccagaaacttcatttggcagctgttagaatttcctcaaaaaatgacattttttttttttaccatcgtcataatcaaaaagcattgcttgagactagggttgccagatttaccaaattaaaatatagaatactcagtttagttggaatttcaaataaaaagcaattttttttgcatgtcccatgcaatactggagcaatattttggacatagttacactaaaaaattactcattactcatctgaaattcaaatttaactagatgttctctattttatctggcatccctaattgagacccttctccgaagatacaaagagatagcagtcccagttgctgtcgctctttgggagttttcaatcaggtcaaagataaaatgaaaggagttaaacaacagttcagagcaaggcaatggacttcaaaagtcctaacactgctcaactcctgactgcccaagtcccaaacctgtaagtcagcctacttctcatcttggtgtcctcagcagctaccaagacacctagccaactggtcgacatctgctaagtactcaacaatcacctgttattgactcaatcaagccatcagttaattaacagaagatcatttcctctttcagaaatctgctttggaaaacatgttatccgagacccagtctcggtactcctgcaagctccaggacatgcaagagatcatctcccactatgaggaggaactgacgcagctacgccatgaactggagcggcagaacaatgaataccaagtgctgctgggcatcaaaacccacctggagaaggaaatcaccacgtaccgacggctcctggagggagagagtgaagggtaaggcaaaggctggcacgagaggagcatgcgagggacctccagctcctgtgggtatatgtgtgcatctttgggttctgttagcaagagtcactctagcaagagaaaagttgtgttgagctactccagaagatacctatagctggctgtatttcactaagcagcaagtataattaatcaactaatactcacaggacactaagatttgcagtcagaagagttaaagtctctagaaggaaacaattcaaaaggatttggccactgtgtttcccagtaggaatgcacacaattttggctccaaaaaaaagaaggcagggggaatgtgttagtccaccagcaaaagagaaaaaaaaaaaaagatgcatatgagctagagatgtctagactttcaatctgatatttctggccaccccaggaaataacaacagctggccatataaagggcatatatattctatgatccgaaaggaagggatagaagttttataaaaatacataaataaaacatcactagaccaaactttgaacagcctgagaagctcaggggtctcaggcttgagacccagaccctggcagggatcctagagaaaaccaagcttgcagctgaaaggaggggatggttggtggacttcccctgactccagggttagcaggaggcggtacccaatgccttctgtatccagacgggttctcccgtgaacccatgaccttgagactactaagctcagacaattatcctcattaaagagcagaggatttacaagcaagcgaaggaagttagttcatcctgagaagttgttatgattgttgctaatactaaagtgagctttaacctttatcacttttataggacacgggaagaatcaaagtcgagcatgaaaggtaaaaaatttccttcattgtttgaatctctgtttttaaggaattagcatggttatccattttgtagtagtcataatccttaatgtactcccaaatgtcctgggttcaaaatgtcctgggtcaggaatcttcaatgaacaaattagctaatacaaaatgatgtaagctctcattattgtcctcaatataggtaaaagcaagcagtaaagaaaattaaaatgataattaatagtattatgtctctattaagtaatggagtcagtttactaaacccctagaaaactaagaggcaatgatttcatgatttcatttctcagatgattctgttgaacactcgtgttccatgagatttgaatagtgtattacgaacactgtgttctatggccagataaggttagaaatactgtgtgccatgatcctcttcttggacagtcctgttgcagttcagtgtattaaagatggaacaggtactgctttgaaggagaaaaggaacaagaaagaggtagaaacaacaaaagtttaactttgtttagcccagtattcccaaacatctttgacctggaaacatgctttctcagattacctttaatatctcacagaaaagttgcaggagactgtagtctgggacaagtggcactttctgattagtttgtgataaacctattctaaggcattggagattcaaagaatcagttggagtaatcatcacaggacagctggtctcactgctacccatctacaaaataagacaagggtctttgagactctcttcacacatgtcttaggatggggaacccatacttgatgggatggtcccaatggagaggttttaatttaacaaaattctcccttgtaaatttattaatgatttcaattcttccctatggtctagaattgctttattgatgtttcaacaggcacttattcaaataagttatatatttgaaaacagccatggtaagcatccttggcttctcacccattcctcatgtggcatgctttctagactttaaaatgaggtaccctgaatagcactaagtgctctgtaagctcaaggaatctgtgcagtgctacaaagcccacaggcagagaaagaactcctcaagtgcttgtggtcagagactaggttccatatgaggcacacctatgatgaaggtcttcacctccagaaggtgacactgttcagagatcctcatttcctggagagtgggagaaaatccctcctttgggaaatcccttttcccagcagcagagcccacctcattgcttagtgatcatttggaaggcactgagagccttcaggggctgacagcagagaaatgaaaatgagtacagttcagatggtggaagaagcatggcagtgacatcttccatgctctttttctcagtgtctgcaactccaaagatcaaggccataacccaggagaccatcaacggaagattagttctttgtcaagtgaatgaaatccaaaagcacgcatgagaccaatgaaagtttccgcctgttgtaaaatctattttcccccaaggaaagtccttgcacagacaccagtgagtgagttctaaaagatacccttggaattatcagactcagaaacttttattttttttttctgtaacagtctcaccagacttctcataatgctcttaatatattgcacttttctaatcaaagtgcgagtttatgagggtaaagctctactttcctactgcagccttcagattctcatcattttgcatctattttgtagccaataaaactccgcactagctgca

SEQ ID NO: 5982 - DNA, 101 bp, Homo sapiens
gcttgaacccaggaggcggaggttgcagtgagtcaagattgcgccattgcactccagcctgggtgacagagcaaaactccatcttgagaaaaaaaaaaaaa

SEQ ID NO: 5983 - DNA, 9717 bp, Homo sapiens
tgctatgttatttccagcgcatagtgtctttatttagaaaacagacggaatcaaacaggttggagttattgctttcttgttctgtatattcatattctccacttgaaaaagcacacagtcaaatctatcttcatccattctgttgatgagggtaagcaaaaaagatcactggttacttcaaaagaacctaggggggaaaaacacaacttatttaaatcatagattttaaaagtctctataaccaggataagaaaaaatacaaataaagacagaaaatcaactaacatgacaataaaacattctaaattgattagactaccaaaaaccacagttttgtgttattatcactttgtcttggtgagctcagttaacaaagatatactctgattctgacttagaagacatttaatgttcttatcattaaaaaataaaagctaaatctattactgttttacaagagcaaccttatttcccaaatttatttgactctccttcaggaaaaactattctaactccctggaaattgttctctctagtgagtgaacagtcgcaagttcaatttataggtccataatattttctacttaattaagatgctgacaccaaaacagccaaaatgtgcttccttttctaatctgcaagttttgtgacttattttagacagcttatgttaaatatatatatgtgtgtgtgtataaaaccacaaagatgtctccgtactattactccttagcaatcctataataaagacaattatgctgcattttagtcagaaaaattgtaccaaaagaaaaaatctaacaaaaattccttgtagaacatacaaaataaaacaaaattattgtgccaatatgcctagacaaacaaaattcaagttaaatgctctcttgtgttccaggttaacttaacaataaattacagaaaaaaacaatttttgattcagattaaaactcattttctttcagttctaaagcattaaaatttttatatagtaatcaaaattactgttctgtcacccaggctcaagtacagtagagaaagagtgagaccctgtctcaaggaaaaaaggaaaaaaaaaaaaagctgaaataagataagaaccatatgcctttcatttctgtccaactgatcatacacagcttggttgccagaaacaacagatactatagttaaataagtagttgggtgaataaacaggtctgcatcttataaatttaattgacatttacattctataaatttaattgaaatttacattctttaattctagagaacttcaaagtatcatttaatttctattcagtctagtcaaattctaatgaagaatgcaaatgaaaagtggggagagagggaggaagagaaagacagacatgcacactctcttaggaaaaacaggcaggcagagatggaaaatggcaacatcggataattaaaattcaggactgaatgtgagaaaaagcagcttacaaacagacttggataagggagaggcacaaagacagggagagatagaggaacaggggaaaagcccagccagataagcaagagagaaaggtgaacaggcagggtggaactgatggcagagtggaacatggcacagtgacaaagaaatgggtcttgacctagatagccagctggaagagatcacgccaccctcagtaattttttttccaattatactctttgttatctcccaaagctcccactaaaaagggaagaatcttttagttttgatttttatttatttgagatggagttttgttcttgttgcccaggctggagtgcagtgacttgatctccactcactgcaacctctgcctcctgggtttcaagcgattctcctgcctcagcctcccgcgtagctgggattacaagtgcccgccaccacgtccagcttatttttgtatttttagtagagatggggtttctccatgtttgccaggctagttttgaactcctgacctcaggtgatccactctcctcagtctcccaaagtgttaggattacaggcgtgagccacagtacgtggccagaaccttttatttgtataaaatgattaacaatgcatattttatttatcttgcaaattaaaaacattcagatttactgtccacataattttgccataattaaaggtcacatataccaacatgctgaggagaaaaatcctaattttacatactattagttattattcaaagtaaagaatgacagtttaccagtgaggtcaaattcaacgttaaggcaaggacctacaggcatttatgattacatgccatagtaccaatcatataatttatataacattgctatcagactaaaaacacattcttagttaaagataacttaccatttagagtcaaaatgcaggaatcttagtcctgtttccatttttgtcccccttgcttcacttggtatgtcatgctctatctcttctcctatgcagactttaagtcagtagccatcaatctgaagaattccttcctctgctgccacctaccagtttagttgtctgctgcagcagaagggtatatagaaaaagttcttgcttaccattcagattaaataagaaaaaattcctttgtttaacatttcgtatttttgcacatacaccaactttttaatgtttctccaagaccttccctccaaaaataaaaaacaaaaatctcaatcacataaaatcaaacactgtatgatccatgttcatgctaagctgggaaaatttccaaaaaaagtagaaagaaagtggtaagatttagccactcagcagctgccacctcaagaagccattttcttgtctgtttccttctttacctacccctacaacctatgaacaaataccataacttaaaaatttaggtagtctacaactcctacaaattttaagttcagagactacccaaagaactgtggaagatgcagcaatataaaagttttttaaagtaattctagaaactaagggtgttaggtgctttacctgcttgagttttcaatgttctggactgcttattgcccaatggctctgaatacattaaaacacgaacacatacgccacctacatttaaaatagggtagcatttgtatgcccatataagcagtgggtatattttttgcaaaagagtaataaattcattaagtcttttaaaaaggactgaccatagatgcacatttcctcaaactgtatacatacatacataaaagaattaggggaaaaggggagacagaatgacaaatgtaatagcagttgtagaactgggcatcaacacagcataaacgtcttctgtttgttcaaatcctgagattcatttctattcccattctttttgtcatctaggtctatgtttcaaatttattctacattagctattaagggacagtctccagtaaatgaactagaaatagcagtaatggcttgtttttgttccaccctcccactgccttcatcaagataaaaatatgtagttttgccaactttaaaaaaatcaggaaataaaacaaatactgacataagcaccaaagactagtcaacagtggcactgaagtgacattgcttctactttctcattccttcccccgatctcaaaccccaccctttgacctctgtatatgggatgagcctgagcaggagagttggtgatgtcaggactgcgccgttcccacggatgctcctagaggcctgctgtgcttctgggaactgaggcacagggatgtctgtctgactgaaacctaaaacaacaacagttcaccccacccctcatgttcccaaaccccacaatagcagccaggtatatatgctatataaggctcacctaataagtttgaatatggtaaaatctaaaagcaagatcattcttaacaagtcagtggtattcaaacaggcagctgactggaggttgtttaactctccatgccttatacaatcacatagtctgtatgctctaatgttagccactcttgctgagtacaaggctctcctgaatgagcctttttttattttttagtatacatcacaaattcttgcatgagtgcagctggaagtaaattccaattcaaattccctctgttagtaaattccaattcaacagataaatatttttgtcttaagatgcttaaagggaatgactgtccttataagagtcaactgaagcacagaacaggttaatcacttatcacatgtcttccttcagctacaagaaatggcattacacgccaagaattcctattcactaactagtgacttgctggatgtacagcctctttggatagtacgtccaaagccacaggatgaaattatgcagaagtctatcttgaaaaggtcctgattactttcactaaaattctacctattagaaagatgacaatatcccaaaataataaaagctcagaactaaaactttaggaagtataggagaaaggaagaatgggtaggtagactggggtaaagacggaggagaggatagtttagtttattacctaacagaaaggctattaaaatggacgagttgtagtcctatccctgacattttatgtccttggttaatgtgcttagccatcttgtgcttcagaaatgtcctcctatctgttcaaacctgtaatttttgaaggtttaaaccatgattttctgataatctcaaactgctcacatctccttgttagaactagtatcttagaaatgctaaaacgattagttctgaaatcacattgctcctaaaagaactaaatttttttgtattatcttcgtcttactattccctttcacttttataaagtcacagagagaagcactaaggtaaaatgaatgctatgttgagtttttaccatatatataacctagagcctaattttacctttcaaaactctagttttccatacctgtcaactcctaattgatgtctttatactgtgagctcactgtgtattcggaacaccaacccctgaaaaagcttaagccagagtagcacaatggaagaaacaaacaaacccaaaacaaaaacaaagccaaaaaattcacactctgaaatacttaattatagacatatatgcaagaaatggagtcatctaaatggctaaacaaaattcccaagtcttgagtatatcataaccaagtcaaactttacccccaaaagctcttctttaatcatattatttgctagatacatttatgcattatttttaagtgagaattatgacaaacccatggttactttttaaagtacgtaaagaaaggaagttttaaaaaaagaaagttagcctagtgatggaaagaaaggagaaagagttaaattacctgtaggcagactggggctgtgcctgaatccaaaccggtgcatttaccattcattatacagctgcattattgggggaaggggagtttagaagggcactgaccccgaaagttctcaatacttctcactcatcatcaggaagggggaagaaggaaagttttttctctgggtatttttttgtttgtttgtatttgtttttttggctcctgaaaaggctggtaaagaacagtaacagtgcaagcagttagaatatttctttaaaaacaatgtaaaaaatgcaaaacattaaggatcttcaaaggccaaactttcattaatatagaaagaattttcactagagttaggcagccaccccaaaacagcatggcaaaatggcattggtataaaggaaataaaataccacacaaaaatccaaaacaaaactaaaaacatttcaaattaaacctggaagactagaagattccaacagcagatttctgtccactactgaaacattccaaaatccaagctccaaaggtgcctaaatgtattttaaatgaaactttgttttgtttttttaagaagaaaaaaaaaaaaaaaaaaaaaaaaaagaaagcaagcaagcagtcagtgaacctggttataaatcctgcaatatattacattttttaaaatcctagtacaacaaaaacaaatcttaaataaaattgaacaaacaaacaaataaaaacagtagcagcagtggttacctgtctgagcacctacattttcttaggaggggatcgtgtctcaccagccaaatagcccataaaccttctcaaaaaaagtgagccaggagaaaagtataacacaagatttgatttcacaatgtctctaagccccacaagccccaaactggggattcactgaatgaaacaaatttgcttctccattgctttcttcttgagaaaaagagatgattttcaaagtcaatgccttcaatatgttctcaaagtctgataatgtgcttgatgaatgccaagtctcttgttgggtttttctactgttccagggtagttttcttattggtaacatatacaggaagatttcaatgttcattggagaaaagccagcagaaatgaccaatcaattataggcaccaaaaaagaaaaaaactattaaaaattttaaatagaatagttcatacttgtatgtttagatatataaagtccagttttcatcatgggtgacataaaaacaatatcagaaataatcatttttgaaatacaatttagaattacaattttaacaatatacaaaaattttacaattcagattttatcattacacatatttgatatatacattctctctcataatagcaatgaagattatacaaaagttattaaacaattatgaaaataagtttaacctaaatatctgctgctgtttgtttccttaaggtacttccagaatgatttgctcttattctctacctcaatcttgaaggaattcaagaagatatccatgtttttaaaatctaagataactactgctcttttcattctaacatgtgagtgtacgttttaatatcatgtgaatgcataatagtgaataaagctaatgaactaatttcacatatttcctataatatagttggttaatttggtataagttaagaaaagactaactacatttttcctgatgccttaccccaccaacacaaacatgaactacatacttgtgatatgtaactattcaaagtgtatgtgtcataatacacatggcaaccagatggtctctatatgaacatatgaatgataatttaattaagcagttctttcttcctcatttatttctctataccaaatagtatgcatcctccacagtatggtcattcagcgaaagaagtaccaagtatttctttctgttaatgagtcagaggtattaatatatgtatgtgagtcccccatttaccctgcgcaagataagttcttttaaatgcaattagaatatcctaagataaattacaaactcctcttatgtatccttttctctgaggtgaaatgagacactgcacagatgagaggtactattctattcatcaacaatcaacctttcactcaattttaatattatttaattctatggaaaaaacaaattttattacattcctttttaaaacgggggaaaaactgtacaagtaagcatgatcaaacctctgttatagctggttaatactgatcttttattattgcctcgaagtctctctagtagtgtccaagaaattatgtttaaggtccatctgaaggaaaatagcactggagaggcaagaaagggcttgggtaaaagcttcagaggattcgtagggagatggaaaacttgctgtttaaaaaattacgttgggctctgcagcatctccatttcttaacataccatccaaacccatcaatgggattagttttacccatgttttaaaggctcatattatatgcagtttgggggcttttataaattctgcaagtaaaggaatataaagagtggacagtattgaaggcttaagagtagggctataagagactcaatactactaaataagtccccaaacaaaaacatccaacccacccccaatcccaaatcctatatgtaaaaagagaaaatgcatagccagaagcattaaagaaaagcatgtagccttgaataaactgtacactgaacaggctagaaacaaaaggaaaaaaacaaacaacgtacatatacacaaaaaggcctaaaaaagcatctactcaccctatgttttaaggtgaatacctctaccccagtggagtctacttatgaaaacaactcatctgttttttaaagtcaaaaactctgtttcccatcatgctccattttctaaattatcctttttgattagttgatggaaacaaaaagcaaaacacatacacatgcatgcgtgcacacacatacacatatactccctcgtaaaatgtgaaaaatgcaaatatataacgctggcattcgaaatcacttcagctttatacttagaactcataggctcttgatttgcccccaaaaatatttttccttgtccttatttaaatgcccaactaccaaaacaaaaagggaaaaaataaaaggctttaaatgtacatgtttcaagtcagtgtcttgttaacaaaaaaggtagcattttcttcactttggccattgttaaagatgcaggcatagagcaggaaatgttagactagcatgtattaaaaaaaaaaaaaaaagcaacattaacagagcacatctttcaaaaaagactaaaacactaacaaatacaagtgaatgcacatattttaaactagtgtaattttatctacattgaattaatgttattttgtataccggacattgcaatactgttcatttccatttcatcatgcaaacatgccaattttgtcattaagaagcctttattgggttatattcaatttgacctcccaccaaattaagcgggaaaaaacaaaaaaataagaaatcccagtaaaagagcccctcaagatttcataaactacaaactaaagctgctagttaataaggaaatggcagaattttcagagctgtataatacaaaaattcctgtaatttaagcagatgttttcctcactgatgacaaatcttccaacacaatgtgaagttatgctacttggatatttgtagcaaaaccatttttttttgtacaaaaacaaaagcaagggaccatgaaaaaaaaaaagtatttgttcctcatggcctatgagcatacacattttttagcaatttaaaagggtaactatgagagcctgacatttttctataccccacctattctgcctctctatttgtaggatttgtaaatgaaagtaacatcttactagcagaggtctcatctatctcccactctctccaactaatcctactaattttctctcatcttcctgagcatcctccatgaacagcattgcaagttggttttaaaaatagaaaagaagaaagaaagttttacaagggttttgttggttaattaccagtggagtcagtccaccagtagtttgatttcattggctagcagctggttcatgttgaacaggccccctgggagcttggtgagcagctctcgctccgtgctttcagggtcgctgtcaacagagctggaacttgcactcatgttgtcaacagcagtgctggctgggggacccagctccggctcactagtctcactggcagtggacaccacggagagcagggacatacgccgggtgagccggccagagggtagaagggaggcggcatagtctgctatgataccagctacatctagattacaagccttatcaaaggcgatgaaacctacatttgcattggcctcacagacgcagaaggagccgtcatctttcatcagcaggtcaatgccacacacatccatccccaggatattagacacctg

SEQ ID NO: 5984 - DNA, 1282 bp, Homo sapiens
aattaaaaaaaaaatttgattttgaggcagggtctcactccattgcccaggttggagtgctatggtattaccacaactcaccgcagcctcagcctcctggacttaagcgatcctcactttagccttctgagtagctgggaccccaggaaggcacccccacacccggctcatttttcctgttttttgtagaggtggagtcttcctatgtttcccaggctggagtttctttttctttaaaccatctgatttggattccttccatttagaaatgatacatcccaggtgtgagtcttggaagatgcctggggcattgcccatgactgtagcccctgtgtctgcttgtcttattaaaggaccaggggcagggtgcaagcacaggtgtcaggcgacgaaaagagagttggctcccagccccacacagcacaacagtacaggtcacacaagagggccggcgtgagcagtgaagagaactccccaaaaccgagtgccagcttggatggtttctttttcttcttcagccttacagcaggtccaggttctactgaccagtgtcctgcatttggtagtaaccgaatgacagtcaataagatgttgaattaaacatacaaaaaggaaaaacagatcagggcatgagctaggcaaactccagccccatgtgccgtcaattctccccgcataaaggcagcacccagagtccgtaggctcaaacactgaacagacagagaaaagctcacaggcttcccttcccaacaggtgtggcaaagggagggaaagcactgaaagacttgaagattgtcaactattgggtctgaagccagggcacccagtagttccttccagccgtgtcagtccgtcctgcacgggtgtctgttcagttcgagccaatgaagttaaaagtgaaggaaggaaagcagaaaggaagaaggaaaaagacaacaaataggggacgcgagggaagggaaaacattgtctggggcaggagtggtgaggagtcttgcagagaccagaggaaaacttaccagtcgcgagactagaggaaaactcgccagtcgcggtggcagcgctgaatcagtggggcctccctccggctcgcaggctcacaagcctcccctgcagggagggaaattactccttgtgctcctacctggctcaccagataatctgttatggcaccaagcagattttccagacaaggcttttagttgggggcttgtgcttgagcgcacggggagacggcagagactctgcggctggctctctggaagagccgggagagacgttt

SEQ ID NO: 5985 - DNA, 1282 bp, Homo sapiens
aattaaaaaaaaaatttgattttgaggcagggtctcactccattgcccaggttggagtgctatggtattaccacaactcactgcagcctcaacctcctggacttaagcgatcctcactttagccttctgagtagctgagaccccaggaaggcacccccacacccggctcatttttcctgttttttgtagaggtggagtcttcctatgtttcccaggctggagtttctttttctttaaaccatctgatttggattccttccatttagaaatgatacatcccaggtgtgagtcttggaagatgcctggggcattgcccatgactgtagcccctgtgtctgcttgtcttattaaaggaccaggggcagggtgcaagcacaggtgtcaggcgacgaaaagagagttggctcccagccccacacagcacaacagtacaggtcacacaagagggccggcgtgagcagtgaagagaactccccaaaaccgagtgccagcttggatggtttctttttcttcttcagccttacagcaggtccaggttctactgaccagtgtcctgcatttggtagtaaccgaatgacagtcaataagatgttgaattaaacatacaaaaaggaaaaacagatcagggcatgagctaggcaaactccagccccatgtgccgtcaattctccccgcataaaggcagcacccagagtccgtaggctcaaacactgaacagacagagaaaagctcacaggcttcccttcccaacaggtgtggcaaagggagggaaagcactgaaagacttgaagattgtcaactattgggtctgaagccagggcacccagtagttccttccagccgtgtcagtccgtcctgcacgggtgtctgttcagttcgagccaatgaagttaaaagtgaaggaaggaaagcagaaaggaagaaggaaaaagacaacaaataggggacgcgagggaagggaaaacattgtctggggcaggagtggtgaggagtcttgcagagaccagaggaaaacttaccagtcgcgagactagaggaaaactcgccagtcgcggtggcagcgctgaatcagtggggcctccctccggctcgcaggctcacaagcctcccctgcagggagggaaattactccttgtgctcctacctggctcaccagataatctgttatggcaccaagcagattttccagacaaggcttttagttgggggcttgtgcttgagcgcacggggagacggcagagactctgcggctggctctctggaagagccgggagagacgttt

SEQ ID NO: 5986 - DNA, 7073 bp, Homo sapiens
gactgtcttgttggctccctgaagaggcttgcagagatgtttttattagcgaaacttgggaattgacatcatgagtaaggtatgcaggctgggctgggcaaagcacatgagaggtaggagatgcgggtcagcgtatctggttgcgctggttctcttggttaatgggccacttggtggtctggctggcggcaagaagactgtcaatcagttgttcagtgttccttcctgaggtgggatactccataaccttggtttcatagttagatttcctaaggccagttcctagaactttaagtagaaggcatggttaagtattatgaagaagcaaccccattccatttctgttctatctctatttccccctgagagatttcaccctctattcttaaggagaaagggctgaagatctcatcttctgaagcgacttcctgctgaacagggatgtcgtccctgcctaactttagggggtggggaaatctctcactggctgtcctaaagacctgtagggactggggtgctcctgggatgttatgggttggaattcttgggccatcattagcttgacttggagctattgaaacctgaaagacacaaactttaccaaaaggttaaaaacacaatacgccaaaagtaatagcaattaaatgaccacttagggtccgaagaaaggtaaaaaccatgtcatactttgtaggtatccactgatggagccccagatggtttgagcagtagagtcattacgattatgtagccaggtagcctcttggtgaatctttacttttattttcttttggagacagggtctcactctgtcatccaggtaggagtgcagtggtgccatcatggcttactgcagcctcaaccttctgggctcaggcaatcctcccacctcagcctcctgagtagctgggaataaaggcacatgccaccaaggccacctaatttttttttctttttttgtaattttgtagagatggggtttagccatgttgcccaggctggtctcaaactcttaggctcaaacgacccacccaccttggcctcccaaagtgctgggattacaggcatgaaccattgtgcctggtcttggtaaatcttttgaacttgcagtttagccaatcctgaactgttaatgtaagaacaacagatgtggtttagttactgtgcatacccgcccttgttcagccagaagatattccagggcaaatctgttatccaagacagcattggctagggagtgcagggaggcttgatgtccttttatggctctgcctgtactagttgccagtgtttcaagggtttgaaagtttctcaaagctgtctgacagtatgcaaagccatcccaaggggctattccaactcctgccaaaattagccctattgcctttttagatttcaccacatgtgtgatattatgaactgttattctactgggacttaaagtacctaacatgcattccttattgcgttgtacattatccacacaagggcacgctagtgcaagtaacagaaaggtgaaattggctgaagggtagctgttgatcagatggcagtctgggtgtccacaaaggaacagaataccccatgggtgcacaaacttacacaaggcgagaggagttcaggtgagcagctaagctgtggagagaggtatgactgttttggcatgggggaaaagatagccttcctgagcccaagtttgattagggtttttctttactgctaagagaaaacccggtgggatttcaaagtaggcagtccaacttctcttttttccaccctttttggtgaccaaagcatttagcagcccaatgaggtttatacattcaaaggaaagggagacacttaggtccaccataagaggtgcagaggttattttaggtttccatacctcttttgtgaagttggtagttgagcttttagggagtgcaagaggcagcccctctgagcctggggatgatggtagcacacccagcagttggacaaattattacctgaagctataatgccggaaaggttgtcaagagagtttgtttctcattttagtaggcctagcctaccctgtgccctgatggggaggagtaggaacaaagtaaagagtagcatctttatacccagcagggacaaacgaagtctttacctgagggaggaggctgagcaaagcaacagaataatagtaaaccaattagtaatacaaggaaaagtattggactcaagatctctaaccacattacttctccgatgatgaattggctctcctgaatttgaggtcttccacaggttttcaggagtaaaatgggccatctgggcgagtctggaaacatttaggagaaagcatttctgatcgggagaggtgtacccagctagtgattccttgtgagttggctgcagttggagtggtcaggatcacccagtaagggccctcccatttaagcaaggggtggtcctccggggagcctgcccttcaagcctttaggaggacttggtcccctggattaacttgtaaaggggttttcccatccttagtggggactggcaggattttgtttccatattctgaagtcaccttttgaatctgtcctaaatcgatactgtaattttttatgtaattcttcacctaacaggaggtcagtggtgaggaaaggcctctggtagatcatctgagaagaactaagtcttaggctgcacgaaggggccctgcggaccctgagaagactgggagcatcttaacccaggactcgtgcatctcctgaaagagtttggctagagtcgtctcaagtgtatggttcatcttaactttccctgatgattggggtgccagttcataatctattcctaaggttgtggagaggctctgagtaatcttacccatgaaggagagcctgttaccactctgaggggacttggggagtccaaattgagaaattacttcctttagtgaaggtttacagacttctactgctttttctgtacaggtagggaaacccttgacccgtccagtaaaagtatccacaaacaccaggagatatttgtaccctagatttggagtcatttgggttaaaacaacctgccagtcttctcccagataagttcccctgtgttgaaccagtttaagtcaagaagggggaattggatgggtgtggggattatttcgggaacacaattcactgacaaaggttacttgttttacactttttcttagtttctttctggtgaatattttatggacagaattccataaaacatctctccattaatgagtggcatcatggagatgcttagtaactttcaactggtcagttcctggaataaaacttgtcaccatctgtgaaccatccagcactgttttcctggtacccctgccccttagcttcctcttgctcttgttgtgagtattgtaggtgattaggaaggttggtagggtctgtcattaaggccaacacattgctggattcctataaccaggttgcctgttttgtggccctatttccttggctgatgagggaccagtccctctggtggcctttgcagtgaatgactgccacctggcagggaagttgtgccgcttccaggagaagttggattggatccttacgtttgcctggggaatttttaactgttaacattcccttttccttccatatggctgcatgggcacacagcaggagaaacctatactttgagttggtgtataaatttactccctccctttctcccagttgtgaggctctgttaaggcctctagtgctgctttttgtgccattttggggaggaagggctttagtttctgtagtctccttcaggcttactactgcatgtcctgccttttgggtctccctccacaaagctactgccatcaggatatcattccgtctttgcattctcaagaggcttatctcacaagctaggcctgctggagtctgttttgtgggccctgtgcattgatgctgtgagtcctcatcatctgtggttgggagtgaggttgctgtgttcaaagtctgacatacccttaaagtaatatccagggtgtctaataagagagcttggtagttggtcagcctccctgcagtgagccaatggtgtcccttgacttctaacccagtctgaacctggtggggagtcatagcttctgtatattgtccctgtgtcagcttagatgcttcactaaacagcagggcagtggctgccactgccctccagcagccaggccgcttctgtgcaactggatttgtctgtttcgaaaaatgagccactggcttctgaacaggtcctaacctttgagttaagactcccaaagctattcctagtctctcacgaacatacaaggtaagtggtttttctcagggagtccaaggacaagggcttgacccagctcagtttttagaggttcaaaagatagttgacatttcttctcccagtacaagggctctctttcttcccccttttgggtctcacataggggtttagccgtcaggccataatttggaatccaaatactacagaagcccaccattcccaagaaaccctggggctgcctttttgtttgtgggaccagcaatgaagtgattgctttttccagtccacaactagtgttcgggctcctggggtcagaatgaaccccagatatcggaacttctgtaaagaaatctgggccttggatggggctgaccttgtatcaccgctcagccaggaaattcaaggttttaatgatattaaaatctgaatcctgccatgtttggctgacaatgaacaagtcatccacatattgtaataaaagtcccattctgtaggcttagctccctgcattcccaaaaaggtgggggccttcccagaagccctggggaagcacagtccatgtgtactatgtggctttctgggtatcagagatttctccattcaaagcaaaaagatacagggattctgggtggagagggctacacaaaagaaagcatccttgaagtgtagtagagtgaaaaactgagcatctccaggtatctgagcacagacaagcttgggaccagtgttgggtggatgggaatgactgcctcattaacccccttcaagtcctacacaaactgatattctccattaggctttttaacagggaggaccgaggtgttgcctggggactggcagggtttagcccttgctataggaatttgtggagtaatggctgaaccccattcagtgccacaggttttaggaggtatgatttcctccatggatagcccatcccaggcttcaggtctgtctttactggcggaactttattagcctgtcctaggactgaagtgtccgatagggaaggggtgatgtgatccttgctttctttgggtatgttttgggtctcaagttcctgtccatttaagagtgctagcaggtggattccctgttctggctctgcctctacctgcagtctgtcctcttccagggagatggtggctcccattttgcttaataagtctctacccagcaatggagtaggacattccggggggcatacagaaatgaggagaaaaaagcctagacatggcctcacaagcaagagggaaagtaaattttcttaccttaggacacctgtctattcccattaccctgcaattgcaattggagaggaggcaaataggctgggtcaggaccgagcaggcagctctgctgtccacgaggaactgttttcctacctgccacatcaagggtgacctgaggctccgtggtgtgatgacgatggagtgtgctgcagtcagagccagggtgctgtcaggcggtgtgtatcaatctcatctgaaagcttggtgaggagtggcggctggccagggttgcctgccggctgtcctgttttaaggaggtcagggcagcctctcttccagtgaccccctccatcctgcagtaggcacattggctccatccaaggttggctgtcttcgattagttggtctcctgagaatcctagggtcaccctgagatggtggatgaattagggcagccagaagctgtgctgtcttggtcagtctcctcttcttacctgccatctgtgtcctgtccgttattgaaaaccttaaaagccgcctctgccaaagtcaacagcagggtctggggtctggcctccaaattttctgtaatttccttctaatgtccggagctgactgaaggataaaatgcatggcacgcgatgcttcccctctgctgcctctgggtctgcatgggtgcatttcccaagggcctcagggactcgattgaggaagactactgggatctccttctttctctgggtaattttcttgaccctgtcatagtgtacaggttttactatacatttccttcttccttcagtcaggcaggtgacaaagtggctcattctagctttttctaggttttctccatagtctcactcacgtggagactatgcctgggaccgcatctccccctaaacagatgactgcatattggtctttagtgaccacctggctattggcatattccttagcctttccaaatatgtgttgcttttcatcagtactgcaaagtgaccataacatcctgccacgtcaatgaaaaggcaagatttagtttaacaaattcatctctaaacttaccaggatcctctgaaaatctaccaaagtgttttttacatagtcctagatccaccaccaaaaaaaggaacttggatccttgtcactcccccgtttccatccatttctctgaggggaaaacagccctgggccagtggggaagcaaaagagggtgcctgtttggagtccgattggagcgctgttggggacagcacaggggctcccctccccaggaggcctgcttagggtagggagggagtgctcggggcctgaggctgtggaggtccgcttcttcaggttccttcaggaggaacctggaaataggggccacacacacctgacaagaatccagtagctctgggtcctagcataacttcataaaagcttgtagctaggtatctctccccatttctctgtccattcacagaataggtcgggcggtaagatagtgttaaaactagaagatccacttctgcccatggccatttttcttgatctaatgtgtac

SEQ ID NO: 5987 - DNA, 331 bp, Homo sapiens
tgtttactactttattccgagggcatgtagaaagttacctggccttgcccaggcacagtggcttatgcctgtaatcccagcactttggaaggccaaggctggtggattgcttgagcccaggagttcgagaccagcccaggcaacatggtgaaacctcgtctctactaaaaatacaaaaattagctaggcatgttgggtgcatctatagtctcagctacttgggaggctgagatagaaggatcacttgagcccaggaggtcgaggctgcagtgagctatgatcacaccactgcagtccagcctgggtgacagagcaagactgtctcaaaaaa

SEQ ID NO: 5988 - DNA, 7072 bp, Homo sapiens
gactgtcttgttggctccctgaagaggcttgcagagatgtttttattagcgaaacttgggaattgacatcatgagtaaggtatgcaggctgggctgggcaaagcacatgagaggtaggagatgcgggtcagcgtatctggttgcgctggttctcttggttaatgggccacttggtggtctggctggcggcaagaagactgtcaatcagttgttcagtgttccttcctgaggtgggatactccataaccttggtttcatagttagatttcctaaggccagttcctagaactttaagtagaaggcatggttaagtattatgaagaagcaaccccattccatttctgttctatctctatttccccctgagagatttcaccctctattcttaaggagaaagggctgaagatctcatcttctgaagcgacttcctgctgaacagggatgtcgtccctgcctaactttagggggtggggaaatctctcactggctgtcctaaagacctgtagggactggggtgctcctgggatgttatgggttggaattcttgggccatcattagcttgacttggagctattgaaacctgaaagacacaaactttaccaaaaggttaaaaacacaatacgccaaaagtaatagcaattaaatgaccacttagggtccgaagaaaggtaaaaaccatgtcatactttgtaggtatccactgatggagccccagatggtttgagcagtagagtcattacgattatgtagccaggtagcctcttggtgaatctttacttttattttcttttggagacagggtctcactctgtcatccaggtaggagtgcagtggtgccatcatggcttactgcagcctcaaccttctgggctcaggcaatcctcccacctcagcctcctgagtagctgggaataaaggcacatgccaccaaggccacctaatttttttttctttttttgtaattttgtagagatggggtttagccatgttgcccaggctggtctcaaactcttaggctcaaacgatccacccaccttggcctcccaaagtgctgggattacaggcatgaaccattgtgcctggtcttggtaaatcttttgaacttgcagtttagccaatcctgaactgttaatgtaagaacaacagatgtggtttattactgtgcatacccgcccttgttcagccagaagatattccagggcaaatctgttatccaagacagcattggctagggagtgcagggaggcttgatgtccttttatggctctgcctgtactagttgccagtgtttcaagggtttgaaagtttctcaaagctgtctgacagtatgcaaagccatcccaaggggctattccaactcctgccaaaattagccctattgcctttttagatttcaccacatgtgtgatattatgaactgttattctactgggacttaaagtacctaacatgcattccttattgcgttgtacattatccacacaagggcacgctagtgcaagtaacagagaggtgaaattggctgaagggtagctgttgatcagatggcagtctgggtgtccacaaaggaacagaataccccatgggtgcacaaacttacacaaggcgagaggagttcaggtgagcagctaagctgtggagagaggtatgactgttttggcatgggggaaaagatagccttcctgagcccaagtttgattagggtttttctttactgctaagagaaaacccggtgggatttcaaagtaggcagtccaacttctcttttttccaccctttttggtgaccaaagcatttagcagcccaatgaggtttatacattcaaaggaaagggagacacttaggtccaccataagaggtgcagaggttattttaggtttccatacctcttttgtgaagttggtagttgagcttttagggagtgcaagaggcagcccctctgagcctggggatgatggtagcacacccagcagttggacaaattattacctgaagctataatgccggaaaggttgtcaagagagtttgtttctcattttagtaggcctagcctaccctgtgccctgatggggaggagtaggaacaaagtaaagagtagcatctttatacccagcagggacaaacgaagtctttacctgagggaggaggctgagcaaagcaacagaataatagtaaaccaattagtaatacaaggaaaagtattggactcaagatctctaaccacattacttctccgatgatgaattggctctcctgaatttgaggtcttccacaggttttcaggagtaaaatgggccatctgggcgagtctggaaacatttaggagaaagcatttctgatcgggagaggtgtacccagctagtgattccttgtgagttggctgcagttggagtggtcaggatcacccagtaagggccctcccatttaagcaaggggtggtcctccggggagcctgcccttcaagcctttaggaggacttggtcccctggattaacttgtaaaggggttttcccatccttagtggggactggcaggattttgtttccatattctgaagtcaccttttgaatctgtcctaaatcgatactgtaattttttatgtaattcttcacctaacaggaggtcagtggtgaggaaaggcctctggtagatcatctgagaagaactaagtcttaggctgcacgaaggggccctgcggaccctgagaagactgggagcatcttaacccaggactcgtgcgtctcctgaaagagtttggctagagtcgtctcaagtgtatggttcatcttaactttccctgatgattggggtgccagttcataatctattcctaaggttgtggagaggctctgagtaatcttacccatgaaggagagcctgttaccactctgaggggacttggggagtccaaattgagaaattacttcctttagtgaaggtttacagacttctactgctttttctgtacaggtagggaaacccttgacccgtccagtaaaagtatccacaaacaccaggagatatttgtaccctagatttggagtcatttgggttaaaacaacctgccagtcttctcccagataagttcccctgtgttgaaccagtttaagtcaagaagggggaattggatgggtgtggggattatttcgggaacacaattcactgacaaaggttacttgttttacactttttcttagtttctttctggtgaatattttatggacagaattccataaaacatgtctccattaatgagtggcatcatggagatgcttagtaactttcaactggtcagttcctggaataaaacttgtcaccatctgtgaaccatccagcactgttttcctggtacccctgccccttagcttcctcttgctcttgttgtgagtattgtaggtgattaggaaggttggtagggtctgtcattaaggccaacacattgctggattcctataaccaggttgcctgttttgtggccctatttccttggctgatgagggaccagtccctctggtggcctttgcagtgaatgactgccacctggcagggaagttgtgccgcttccaggagaagttggattggatccttacgtttgcctggggaatttttaactgttaacattcccttttccttccatatggctgcatgggcacacagcaggagaaacctatactttgagttggtgtataaatttactccctccctttctcccagttgtgaggctctgttaaggcctctagtgctgctttttgtgccattttggggaggaagggctttagtttctgtagtctccttcaggcttactactgcatgtcctgccttttgggtctccctccacaaagctactgccatcaggatatcattccgtctttgcattctcaagaggcttatctcacaagctaggcctgctggagtctgttttgtgggccctgtgcattgatgctgtgagtcctcatcatctgtggttgggagtgaggttgctgtgttcaaagtctgacatacccttaaagtaatatccagggtgtctaataagagagcttggtagttggtcagcctccctgcagtgagccaatggtgtcccttgacttctaacccagtctgaacctggtggggagtcatagcttctgtatattgtccctgtgtcagcttagatgcttcactaaacagcagggcagtggctgccactgccctccagcagccaggccgcttctgtgcaactggatttgtctgtttcgaaaaatgagccactggcttctgaacaggtcctaacctttgagttaagactcccaaagctattcctagtctctcacaaacatacaaggtaagtggtttttctcagggagtccaaggacaagggcttgacccagctcagtttttagaggttcaaaagattgttgacatttcttctcccagtacaagggctctctttcttcccccttttgggtctcacataggggtttagccgtcaggccataatttggaatccaaatactacagaagcccaccattcccaagaaaccctggggctgcctttttgtttgtgggaccagcaatgaagtgattgctttttccagtccacaactagtgttcgggctcctggggtcagaatgaaccccagatatcggaacttctgtaaagaaatctgggccttggatggggctgaccttgtatcaccgctcagccaggaaattcaaggttttaatgatattaaaatctgaatcctgccatgtttggctgacaatgaacaagtcatccacatattgtaataaaagtcccattctgtaggcttagctccctgcattcccaaaaaggtgggggccttcccagaagccctggggaagcacagtccatgtgtactatgtggctttctgggtatcagagatttctccattcaaagcaaaaagatacagggattctgggtggagagggctacacaaaagaaagcatccttgaagtgtagtagagtgaaaaactgagcatctccaggtatctgagcacagacaagcttgggaccagtgttgggtggatgggaatgactgcctcattaacccccttcaagtcctacacaaactgatattctccattaggctttttaacagggaggaccgaggtgttgcctggggactggcagggtttagcccttgctataggaatttgtggagtaatggctgaaccccattcagtgccacaggttttaggaggtatgatttcctccatggatagcccatcccaggcttcaggtctgtctttactggcggaactttattagcctgtcctaggactgaagtgtccgatagggaaggggtgatgtgatccttgctttctttgggtatgttttgggtctcaagttcctgtccatttaagagtgctagcaggtggattccctgttctggctctgcctctacctgcagtctgtcctcttccagggagatggtggctcccattttgcttaataagtctctacccagcaatggagtaggacattccggggggcatacagaaatgaggagaaaaaagcctagacatggcctcacaagcaagagggaaagtaaatttccttaccttaggacacctgtctattcccattaccctgcaattgcaattggagaggaggcaaataggctgggtcaggaccgagcaggcagctctgctgtccacgaggaactgttttcctacctgccacatcaagggtgacctgaggctccgtggtgtgatgacgatggagtgtgctgcagtcagagccagggtgctgtcaggcggtgtgtatcaatctcatctgaaagcttggtgaggagtggcggctggccagggttgcctgccggctgtcctgttttaaggaggtcagggcagcctctcttccagtgacaccctccatcctgcagtaggcacattggctccatccaaggttggctgtcttcgattagttggtctcctgagaatcctagggtcaccctgagatggtggatgaattagggcagccagaagctgtgctgtcttggtcagtctcctcttcttacctgccatctgtgtcctgtccgttattgaaaaccttaaaagccgcctctgccaaagtcaacagcagggtctggggtctggcctccaaattttctgtaatttccttctaatgtccggagctgactgaaggataaaatgcatggcacgcgatgcttcccctctgctgcctctgggtctgcatgggtgcatttcccaagggcctcagggactcgattgaggaagactactgggatctccttctttctctgggtaattttcttgaccctgtcatagtgtacaggttttactatacatttccttcttccttcagtcaggcaggtgacaaagtggctcattctagctttttctaggttttctccatagtctcactcacgtggagactatgcctgggaccgcatctccccctaaacagatgactgcatattggtctttagtgaccacctggctattggcatattccttagcctttccaaatatgtgttgcttttcatcagtactgcaaagtgaccataacatcctgccacgtcaatgaaaaggcaagatttagtttaacaaattcatctctaaacttaccaggatcctctgaaaatctaccaaagtgttttttacatagtcctagatccaccaccaaaaaaaggaacttggatccttgtcactcccccgtttccatccatttctctgaggggaaaacagccctgggccagtggggaagcaaaagagggtgcctgtttggagtccgattggagcgctgttggggacagcacaggggctcccctccccaggaggcctgcttagggtagggagggagtgctcggggcctgaggctgtggaggtcagcttcttcaggttccttcaggaggaacctggaaataggggccacacacacctgacaagaatccagtagctctgggtcctagcataacttcataaaagcttgtagctaggtatctctccccatttctctgtccattcacagaataggtcgggcggtaagatagtgttaaaactaggagatccacttctgcccatggccatttttcttgatctaatgtgtac

SEQ ID NO: 5989 - DNA, 331 bp, Homo sapiens; identical to SEQ ID NO: 5987

SEQ ID NO: 5990 - DNA, 153 bp, Homo sapiens
ggcacaatctcagctcactgcaacctctgcctcccaggttcaagcaattcttctgcatcagcctcccaagtagctgggattacaggcacccacaaccatgcccagctaatttttgtatttttagtagagacggggtttcaccatgttggtcag

SEQ ID NO: 5991 - DNA, 182 bp, Homo sapiens
ccaggctggagtgcagtggcgcaatcttggttcactgcaacctctgcctcctgggttcaagtgattctcctgcctcagcctcctgagtagctgggattacaggcacaagccaccacacccagctaatttttgtatttttagtagagacggggtttcaccatgttggccaggatggtctcaat

SEQ ID NO: 5992 - DNA, 134 bp, Homo sapiens
cctcccaagtagctggaattacaggcacccgccaccacgcccagctaatttttgtatttttagtagagatggggtttcaccatgttggccaggctggtctcgatctcctgacctcgtgatccgcctgcttcggc

SEQ ID NO: 5993 - DNA, 163 bp, Homo sapiens
ctgcaacctccgactccttggttcaagcaattctcctgcctcagcctcctgagtagctgggattacaggcacatgccaccacgcccagctaatttttgtatttttagtagagacggtgtttcaccatgttggccaggatggtctcagtctcctgacctcgtga

SEQ ID NO: 5994 - DNA, 110 bp, Homo sapiens
ctgcctcaacctcccgagtagctgggattacaggcatgtgccaccacgcccagctaatttttgtatttttagtagagacggggtttcaccatgttggccaggatggtctc

SEQ ID NO: 5995 - DNA, 365 bp, Homo sapiens
ggcatgggcaaggacttcatgtctaaaacaccaaaagcaatggcaacaaaagacaaaattgacaaatgggatcttattaaactaaagagcttctgcacagcaaaagaaactaccatcagagtgaacaggcaacctacagaatgggagaaaatttttgcaatctacccatctgacaaagggctaatatccagaatctacagagaactcaaacaaatttacaagaaaaaaacaaaccccatcaaaaagtgggtgaaggatatgaacagacacttctcaaaagaagacatttatgcagccaaaagacacatgaaaaaatgctcatcatcactggccatcagacaaatgcaaatcgaaaccacaatgag

SEQ ID NO: 5996 - DNA, 2201 bp, Homo sapiens
ctgtatctacccaaccactttctatacctctcttccaaccaaaagtcttaatatgggaatatccctcaccacgatcctaatactgtcagtagctgtcctgctgtccacagcagcccctccgagctgccgtgagtgttatcagtctttgcactacagaggggagatgcaacaatactttacttaccatactcatatagaaagatcctgttatggaaacttaatcgaggaatgtgttgaatcaggaaagagttattataaagtaaagaatctaggagtatgtggcagtcgtaatggggctatttgccccagagggaagcagtggctttgcttcaccaaaattggacaatggggagtaaacactcaggtgcttgaggacataaagagagaacagattatagccaaagccaaagcctcaaaaccaacaactccccctgaaaatcgcccgcggcatttccattcctttatacaaaaactataagcagatgcatcccttcctaagccaggaaaaaatctgtttgtagatctaggagaaccattgtgcttaccatgaatgtgtccaattgttgggtatgcgggggagctttatgagtgaacagtggctgtgggacgggatagacattcccccttacttacaggcatcccaaaaccccagactcactttcactcctcaggaatgcccgcagtcctggacacttaccaacccagtatgagggacggtgtgcatatcccgcaagtggactgataaaacccatcgcgccgtaggtgaaaacccgtcaccaaaccctaacagtcaatgcctccatagctgagtggtggccaaggttaccccctggagcctggtctccttctaacttaagctacctcaattgtgtcttgtcaaaaaaggcctggtactgtacgaacaccactaacccttatgccgcatacctccgcctaagtgtactatgcgacaatcctaggaacaccagctgacaatggactgccactgacggattcctgtggatatggggaacccaggcttactcacagctaccttatcactggcaaggtacttgcttcctaggcacaattcaacctggattctttttacttccgaagcaggcgggcaacaccctcagagtccctgtgtatgataaccagagaaaaatgatccttggaggtaggagggagccaaagattgtgagaggacgagtggcctctgcaacggatcattgaatactatggtcctgccacttgggcagaggatggttcatggggttatcgcactcccatatatatgccaaatagagcgattagactacaagctgttctagagataatcactaaccaaactgcctcagccctagaaatgctcgcgcaacaacaaaaccaaatgcgcgcggcaatttatcaaaacaggctggccctagactacttattagcagaagagggtgcgggctgtggtaagtttaacatctccaattgctgtcttaacataggcaataatggagaagaggttctggaaatcgcttcaaacatcagaaaagtagcccgtgtaccagtccaaacctgggagggatgggacccagcaaaccttctaggagggtggttctctaatttaggaggatttaaaatgctggtggggacagtcattttcatcactggggtcctcctgtttctcccctgtggtatcccattaaaactcttgttgaaactacagttaacctcctgacaatccagatgatgctcctgctacagcggcacgatggataccaacccgtctctcaagaataccccaaaaattaagtttttctttttccaaggtgcccacgccacccctatgtcacgcctgaagtagttattgagaaagtcgtccctttccccttttctataaccaaatagacaggaatggaagattctcctcggggcctgaaagcttgcgggatgaataactcctcctcctcaggcccagtcccaaggtacaaacttgcaccagcagcaagatagcagaggcaggaagagagctggctggaagacacgtaccccctgaagatcaagagggaggtcgccctggtactacatagcagtcacgttaggctgggacaattcctgtttacagaggactataaaacccctgccccatcctcacttggggctgatgccattttaggcctcagcctgtctgcatgcaggcgctcattaaaacagcatgttgctccaca

SEQ ID NO: 5997 - DNA, 168 bp, Homo sapiens
cctctgccctatcttataatgctaaaagagttgcttctttatttttatttatttatttattttgagacagggtctcactatgttgcccaggcgggtctcgaacatctgagctcgtgaccctcccatgtcagcctcccaaagtgctgcgattccaggcatgagccaatg

SEQ ID NO: 5998 - DNA, 334 bp, Homo sapiens
gaggtgggagggcagaggtttccaaatatttattgttcatctactatgtgcctggcaccgaggagatgtgaaagcaagcatagttggatgtggctcctgcttccatctagtgtagaaagaacaggtatcaaacaaccatacagagaaaggtaagcagagaagctttattatggacttaattgcccctggaaggaggtcagagaagatttcccagaaccaaagatctttaagtctcacatctgaagaatgaaagggagttaatcaggcaaacaggaacgggaacaatgtaccagacatcctgaacagcaacggcaaaggcctcatggcagggtgg

SEQ ID NO: 5999 - DNA, 334 bp, Homo sapiens; identical to SEQ ID NO: 5998

SEQ ID NO: 6000 - DNA, 334 bp, Homo sapiens; identical to SEQ ID NO: 5998

SEQ ID NO: 6001 - DNA, 415 bp, Homo sapiens
caacagtgacaagtgagggcgacagtatgtacccttgaaggatgtgataagaggagcagtttgccccgtgatcttcctcccaacgtactcatcatagtaacatcaggcaaatcccaactgagggacattctacaaaacacctgaccagtactcctcaaaactgtcatggtggccaaaaacaaagtctgagaaactgtcccagctaggaggagcctcaggagacatgacagttaagtgaatctgggatcctggaatagaaaaaggacattgggtaaagtttatgaacacgtgaataaagtttggactttagttaataatagcatatcaatattggttaattaattatgacaaatataccttattaatgtaagatgctaataactcaagaaactgagtgtggaatatatagaaattc

SEQ ID NO: 6002 - DNA, 472 bp, Homo sapiens
ataagtagatgatgactggtcactgattttttgtctagaccccctgatgggctccaagccagctgagtctcaatcatgtgaagaggaacagggttttcatttgagcgaaaaactcacaccactcattcttgggggtgtaactgaaaccacaaatctagcatgttctaaggaacattatcaggcacagtcaggatccagttcaagatatatctagttgaccaaacacattccttatataggcagtcattcaagagctcctacgctcagaaactgctatcagtacatgacgttccttgttattcagtgttcttttcctaattttcaccattttaatgtttatttcctcttcaatatatgagtatattaagtatgtaatcaaagtatataagttaagaatagtaagtgtgcaaactcttatgtgcttccctgtcttcacatggcaaaaaagtaaatatttctattttggctgaaa

SEQ ID NO: 6003 - DNA, 415 bp, Homo sapiens; identical to SEQ ID NO: 6001

SEQ ID NO: 6004 - DNA, 472 bp, Homo sapiens; identical to SEQ ID NO: 6002

SEQ ID NO: 6005 - DNA, 415 bp, Homo sapiens; identical to SEQ ID NO: 6001

SEQ ID NO: 6006 - DNA, 471 bp, Homo sapiens
ataagtagatgatgactggtcactgattttttgtctagaccccctgatgggctccaagccagctgagtctcaatcatgtgaagaggaacagggttttcatttgagcgaaaaactcacaccactcattcttgggggtgtaactgaaaccacaaatctagcatgttctaaggaacattatcaggcacagtcaggatccagttcaagatatatctagttgaccaaacacattccttatataggcagtcattcaagagctcctacgctcagaaactgctatcagtacatgacgttccttgttattcagtgttcttttcctaattttcaccattttaatgtttatttcctcttcaatatatgagtatattaagtatgtaatcaaagtatataagttaagaatagtaagtgtgcaaactttatgtgcttccctgtcttcacatggcaaaaaagtaaatatttctattttggctgaaa

SEQ ID NO: 6007 - DNA, 2000 bp, Homo sapiens
tacactagaaaaatcaagttttttattttaaaatattttcaaaggctaaggccatagcaaaacaacccaagggtggttgaatcaaactcagggaattagaggagcatcagccaatgcaagcaggtctatataaaatacacatcatttataaatgcacacagcagaaagcacagtggccccagaggaccaggcagggggacaacagagagaaacagagcactatctggagggacaggcacacccgcaacactcaaagccctgggccccaagtgcacctccaaagtcacctacgctgcagcatggctcttgccctttctgagcctgggtatagctgaagaccaagttcaccagcatcttggcacatccacctataactggcacctctcatggcctctgacaaccaagcaaggctcagagaatggatttttatctctgtctttcagcaaggaccagggagaagtgctgaagcaagaagggttattttcctaaaaaaaaaagacggatgaaagggtgaaaggggctggttccaaaaaaaaaaaaaaaaaaaggatgaccattcatggaacagtgagtttcacctgagacatacagatttggtgcaagcaacacaaaaggccaggctctaaatttcatcctaaaaactgggatggggagagcatgaagagaccacttactggtagtccctccaattctcatttgggtttgtcataaacaggacagacagtcgtctgcttcacaataaataatttccacctggatttcattccctgattaatctctcagtgtctgaagaggggaaaacagtggctgcttctgacaccgcccaccccatcaccagcaactttccctgatacttctggcctcctcactaagcccttccagaacctccaaagccactatcttagcagatgggagtcccagggcgatgaggccagagttgtgggacacagagaagaagagaaggccttgatagaggaagaggaatatccaaggcaaagccaccaccacgtccaacctcctcatcctctacctttcctgtccccagaggtatgagatagaccccctggcctggttcctgcactgtgctaggcccacagtggacacttccaccttaatggagaataggccccatggagtggaggtccctcctccatggcctgcaacccaatgactatgggggtgacacaagtgacctctgccctgtgatggctcaacaccatcacacgcaactgtccagacaagcccccctcaacgggctgctgttggccatgcctgagatgcgggcaggcaggcagggagtggacagcaagacctcagatccaagcctccacccttcccttccctatttccagggcttgggacaccttagaaatgtttgagcacacaagggcaaaacccagtaccaggtctgtgaccacagtgatcaaaggccctgctccacttgtctcaccggaaagtgacagctgaggacacagaattcaggtacctctgttcttcacagccactgccaccatctccgccgtgggcagcatctccccataatgcagccagccacctcatgaggggccggcacagagccctggcccagagcatggaaattcatctctggctggaatcctggccatgagccctcccctctgcattcacagattctcagcaggcccctgcccaagcctgacaggtgcctggctgcccgcagagaagccctgtgggaacacagagtgttgggagggagcagagcccacatgggtggtttgtgttctgacctctgaccccaccataggagtgagctgtgtggcagagccacattccaaatgcgaaagcatggcctctgtcctttgaggtggcctccagtgttctgcctgtgtgccagaactgtttccaaggacccagtttgtttgtttgtttgttttctctaagtgtttgctgaagctttgtgtacagaattcctcagttggttccaaaaaatctggctttttgcttgagtccaaaaattgtag

SEQ ID NO: 6008 - DNA, 469 bp, Homo sapiens
tcagggaaagggcccagaatgcagacggacgtgggcagaagggccagtgataactttacttcccccaagagtgggccagggtgggactggtgtaccctgcacgctgcccaaccttgcttagggtcagaagccagctcaaaacaggaccaagtccagccaggcagcctggcctgaggttcttggctcctgtcctcaaccctcaatatcaaaggcattagaaagagaaaaggcctcacctgtgcccagggactgggtcatcccaactcaaggagcataactgctgctctagccgagaaatacggaacgccaggtaggatgaggacatgaccaggaagcagatcctgaagaaagcggcaatacggagttaaatatttcttccacagaaagagcatttctggaagttcaccggaaatagtggggaccaagctacccctgcagttggaagaattaaagagccctttgtcctgca

SEQ ID NO: 6009 - DNA, 292 bp, Homo sapiens
ttttttttttttttttgagacggaatcttgctctgtcgcccaggctggagtgcagtggcgcaatctcggctcactgcaacctccgcctcccgggttcaagcgattctcctgcctcagcctcctgagtagctaggattacaggcacccaccaccacacccggctaatttttgtatttttagtagagacggggtttcaccatgttggtcaggctggtcttgaactcctgacctcgtgatccacccacctcggcctcccaaagtgctgggattacaggagtgagccacaacaccc

SEQ ID NO: 6010 - DNA, 377 bp, Homo sapiens
ccctaaggttagggaagaaagaatcgggctcacgaatgccagaggcagtgatgtcccatcctggaggagaggaaacagtgactaaaagctggggacccacagaggggttggcagcttctcttgtcgggacaggtgtcctttgctgggcctctggatggccctgccctgactggggctgctcctccctcctgtcctgggaccgcgcagagcccacgctctcactgctgcctcctgctggccgctgcctccttagaaagctgtgaccaggcagctaagagcctctgggctgcagggtcagcctctcccaagactgaagtgcagaggctggacttggggctctctcccccagcttctacacctgggctccaagtctgagt

SEQ ID NO: 6011 - DNA, 1203 bp, Homo sapiens
gtccaggagagggcaatagagggaagactgaggctgaagaattgacggctctggacccaggacagacagacagacagacagacagacagacagacagacacgcacacacacccatctctgtctagcaagcagcctcctaagatagctgttctccctatcatgacggtgtagccaccatcctgttgtatactaggagagaacttaacccacctgggggaaaatagctccccaagagctggcaccagtaccactgatggccctgcttcctctgagtgagatgcccaggaggaggagccctagggaagaagtcagggacagggaccaggataccactctgtcactgtgtgaccctcagcaagtcactaacccttggcctcatttttcctgtcttgtgaaagaggacaataattcctacttctcaagattgttttcaagataaaataacattagcattgtacaatgatgcaaatgcctcattaccattattccttaagttgttttccagctctaatgttgtttccaacattacatttaagaccttaggattctgtttcttgcttttgtcatatctcttcccaagtgtcatcactatatggatgttgagggcccccgatgacagtccctttggtaaggtcctcttttgaggaggggagggtacagggtggactcatctcagtgtgaacttggcaagtcactgtccctctctgatcttgtttcctcatctggagaaggagtgagagaggagaaaggaagaaaccagtcaggcaggcagttagggtgggttctcggtagaattcttttaaacaaaagaacagcctgaaaaatcaagctgcaggcacagatatgggaacttgcacaggggggcttgcctaagacatgcccacagcctcatagataagacagactacacaggtgacttgcccaaacatgcctgcaatggaaaatttcatcccctgacatgtgcagtaaggggaacaaagcaatatggagtaagtaactcaagccaagggcccacatgtacattagaaggacagcagggagctaccagaaattcatgccttatgcagatgagctgcccagtcctcatcggtttcttataaaagcctttacattcaactgtaaaaatggcaaccctctttcaggcctcctctccacagcagagagctttcttctctcactcattaaactttcactccaacctca

SEQ ID NO: 6012 - DNA, 438 bp, Homo sapiens
taaattagtaccatatcaattttctgtgatgatgtataccaactataaagcactatgttggtttactacttcagtaaattattcttagtgaattattttctaaattaaaaaaaatgacttggcttttggtattgataatagtattcacaacctgcatctgttaagatgtttgatctttaacccacacaatgtaagggtactgttgtcattgttctcaggtaggtgattctgccttccaagagtatatgtttctttaatcagtttaaaagataaaggcattttgggttttaagacccctgctttacatctcaggtaatgtgtagattgtacttctctggaaccaaatgtagttttctacactcagttgtaaatgttaatctttctcaaatgtgcacattctttaaaagtgtgttcctaagtagaaatacacctaaatga

SEQ ID NO: 6013 - DNA, 438 bp, Homo sapiens; identical to SEQ ID NO: 6012

SEQ ID NO: 6014 - DNA, 302 bp, Homo sapiens
cagaatggaatatcagagtacattttcatgaagtttaaaaatcaaggactgttcctgattagatgacgtatttattggtggccttcttatctaagcacatgagtagttggctctgaactttgtgtatttgaaaaaggaaaattcagtggaggcttttgtttgtgtgtgtgtggctttgaaaacaaattatttgagaaagaccataacacagtgagtagcctatatgtgcatttactgaattgttaatttaaggatatatattaatagagtatgtttaaaataaatattgttttcatcactga

SEQ ID NO: 6015 - DNA, 864 bp, Homo sapiens
cagagacccatggttttctaatctatgtgcttgaacattctaaaacgagtccagttctagtaacctaaagtaaatttgttaaccaaaatgataggtaaaaagatctatacatcttaatgaaataaaacattcctgcttttagttattatgtatgtacaccatatatgaataaacagtttccaaaaacttaaaatacaaaatatattttaccaaaaattatactgaatataatttaaccttggggaatccagaatacttagtattttcacatgaaactacaaatcatagactctgacactttgatttttaaagtactctgtccataaaagatttgtactgtttagatgggagaaacctctagagagagtaaaaatgaattacactgtatcttatatgaagtaaaaaataaatcagaggtgagaatattgttactgcgggtatgagttgttgaattcctatcatttgtgatgattggttaacttcttttaggtaccctttttacccttttttagttcagaaataattctcccagctttataaatagtacactaaacatagtttaactttttttaatgactcattttttcattaaaagcataatgtaccatgttataatgccattagcagttacttaaatgctttaaaaattgctgattagttttcaatgtcagttggtttcaatttctagctctctctctctctctcctccccccctctcattttctggttcaatcttagtaaattaacattctggatttaattagtagttctaagtttacacctggcctgagtttatgttaacatgtaaccctcaattggaaatttttggattctgggatggcagtactaaaatactttttatgt

SEQ ID NO: 6016 - DNA, 302 bp, Homo sapiens; identical to SEQ ID NO: 6014

SEQ ID NO: 6017 - DNA, 359 bp, Homo sapiens
ccaaaatgttgggattacaggtgtgagccactgtgcctggccgaaaatgtgacttccaagggccttgtaatatacacaggtaaaaagattgtggttgtaaattctctgcatataggcaaaacttacctgattaataagtaagtagttaaaagtagctttctacagaatatgacaagtaaaacaatatatatttttgtagggtacagaaagtggtgagagtgttggaaggagatcaaggagattttatgggagttgtattttaaggaatgaattagacagataatactagtaaagagaataaatagtatgttcaaaatcttagagccagaaaggaaggtagtgtgttaggagaactctta

SEQ ID NO: 6018 - DNA, 283 bp, Homo sapiens
ggaagatttgacaggcactttacatatgaaaaataataaatagttgcttttaggaaaaacagttttcaatgtcatccattaagaaccagttgcttgttaataaaaagtttctaaaatatgactgtgaagaacctacgtatgtaaattaataagggtttgaggaaaagatggaatgatataattattttgtattttaggtttgtataatcctcttcccccaccaaacttactttaaatgatttaaacattgaaagataaaaataaataaaaaaatgaagaaaga

SEQ ID NO: 6019 - DNA, 467 bp, Homo sapiens
gttcaattttataactctcagtttccagtaaaactttccgttatggtcagtagtttataaaggagcagttctgagtcattgttaagagtggaggctcgcaggcagattgcctagattcaaattttggttctacccctcaccagccatgttggttagaaggttactcaacttcaatttcctcttctgtgacatggggaatagtcataaaaatgccttcctcataattgttgtgaagattagaaataagataacatattaaaagcacttagattgggaggccgaggtgggcggatcacctgaggtggggaattcaagaccagtctgatgaacatggaggaaccccttctctactaaaagtacaaagtttgctgggcgtggtggtgcatgtctgtaatcccagctactcaggaggctgaggcaggagaattgcttgaacccggaaggtggagtttgtggtgagccgagat

SEQ ID NO: 6020 - DNA, 142 bp, Homo sapiens
acacaagttattggataattttaaatttgtgtcaaatggcttaatatcctttccacagaccctgaaaatacaaacatttgatatgtgctcgtatccaatttcaagttctgcttatattttatttgaattactgtctccttag

SEQ ID NO: 6021 - DNA, 307 bp, Homo sapiens
tggcaccaaatacagattttttcatactggagtaatcttatcatctctgtattcacaccctccacattttttcccagtgtctgtattggtcctatcaccacttccttcctttcacaccacatcctccatggaaactcagtccttggcccccccaaaaaaaaaaaagctcaagaccagaagtgtttcagaattcagatgctttcagattttggaatatccgcatatacatagtaagatatcctagggatgggacccaaggctaaactcaaagttcatttatgtttcatgtatacctcatgcacgtagc

SEQ ID NO: 6022 - DNA, 817 bp, Homo sapiens
tacatcctgtattttcttcctgaggctatttgtcgtttgtctcgaatgttaattggttattgaagcatttctacaatcgctgctttaaggtccttgtcaaataattctaaactctgtgtcatctctacgttggcatcagtggtcttttcttactgaggttgagattttcctatgagtgattttccattgaaatcctgacatcagactcaggatctgatgtaagtcttctgttagagcaggcctctgccaggtggatgtggacggtgaggtggaagttgagattcccactcagcctccacggacccctgcatgagaaggaaagttcagcctcctgccgaacttccactcccaccaccaaggctgaatcagggctgcctccgtgctgctccctatacagtctcccccacaccacaggggggtggcctcatgaccacagggcagcagtaaagttcctgagttttgcaaggtccctcttatgataccctagcagaaaggaggctgtgctctgtcaccacccagcagaagtaaaaccccaactcctcagccagtcttctctgacagcaaccctgcagagaggagcatctcatcccagcttgtcatgagtgggaatctgaagtacctgctcagcctctgattagcagggtgagggtggtgctgcagggtttcctgtgatatttagctggaggaaagtacttaccgccgaaaagttctctgattagcagggtgagggtggtgctgcagggtttcctgtgatatttagctggaggaaagtacttaccatcgaaaagttctgtgatttgtaggctgcccctttcct

SEQ ID NO: 6023 - DNA, 563 bp, Homo sapiens
ggtatatattagaaaaagacaattttgttctttactgctcaaactcaacacagaacatttctgtgaccccagatgtgtatgtttgtgtgtttttttccccacattgaccaattctccaacactagcctgttgggctataattaaattcagtcctggcatgatctacctagagcgagagtcaaattccacagatgaaggcctcagtcctacaagactgtaccctacttcagatttaatcataagtccaagtctccatctccaatacatctgatcaattggctacatattgggcttcccataaccctctcctcagcttccatcatttgatctaatggcttatggaaatcaaggaaatgctttgcttactactgcctatttatttcaatggatatgttaaaggataccaatgagcagctagatgaagaggtacagacagtgaggtttggaagggtcccaagtgcaggaacttctgtccccatggagatggaatgtgccatgctactgggacgtagatgtgttcagcaacccagaagctctccaaacactgtcctttgaggatttta

SEQ ID NO: 6024 - DNA, 266 bp, Homo sapiens
gcctgtgatttgggagctacatccaaaaaatcaccactgagactgatgatacaaagctttccctctgttttcttctagtctttttacagtttcaagtcttaggttttagtgaactacattttaagtccaagtcaaagatctgaaactggaaaaggagagttatgagtggacaaagagataaacccgtttaaagaagtacagaatagctcatgatattaaatgatgttcgttgctttatttttaaaaattgtgcctgttggacatgg

SEQ ID NO: 6025 - DNA, 1023 bp, Homo sapiens
atttgcatttctctgatggccagtgatgatgagcattttttgatgtgttttttggctgcataaatgtcttcttttgagaagtgtctgttcgtgtccttcgcccacttgttgatggggttgtttgtttttttcttgtaaatttgtttgagttcattgtagattctggatattagccctttgtcagatgagtaggttgcgaaaattttccccattttgtaggttgcctgttcactctgatggtagttttttttgctgtgcagaagctctttagtttaattagaaccacaatgagataccatctcataccagttagaagggcaatcattaaaaagtcaggaaacaacaggtgcaggagaggatgtggagaaataggaacagttttacactgttggtggaactgtaaactagttcaaccattgtggaagtcagtgtggcaattcctcagggatctagaactagaaataccatttgacccagccatcccattactgggtatattcccaaaggattataaatcatgctgctataaagacacatgcacacatatgtttattgtggcactattcacaatagcaaagacttggaaccaacccaaatgtccaacaacgatagactggattaagaaaatgtggcacatatacaccatggaatactatgcagacataaacaatgatgagttcatgtcctttgtagggacatggatgaaaatggaaaccatcattctcagcaaactatttccaaggacaaaaaaccaaacaccgcatgttctcactcataggtgggaattgaacaatgagaacacatggacccaggaaggggaacatcacactctggggactgttgtggggttgggggaggggggagggatagcattaggagatatacctaatgctaaatgacgagttaatgggtgcagcacaccaacatggcacatgtatacatatgtaacaaacctgcacattgtgcacatgtaccctaaaacttaaagtataataataataaaattaaaaaaaagaatattgt

SEQ ID NO: 6026 - DNA, 1106 bp, Homo sapiens
atgcctcctccaaggaaagacattttctctagcaatagacgaagaacattaacggttaaaactgcttggcactcctttgtgcatacccatcactaccgtcctgcatatttccccttctctcgctaatcctcttatttctggatctcagttgtgcctggcaggaggggtgaggtgaggaaagagcgcgccagccctgcagagttgagtcagcgtttactcgggtggagcaatacctgttctttctggccctctagaataattcttagaacaaggcttcctctgctaatagcaacacctgccgttaggcagcagaggagtgtgccacattagcatgctggaataattttaatacatccttctttaaaaaatgggctttttgagtaacaagcatcctaatgatcaattctgtcatttcattgggcaatctctgcattcctgacgaccaaagtttctgtctcgatcttccagtttgaaaataccatgaaaaacagcatgtcagatttcttggacaggaagaaaacctggaagaatggcagtattaccccaggtgacagagctctgtaaatctcagagttcaggagctgtggttgagctctcttaacacctgcttcctttggccaagaaagatgaaaacaacaacaaaaacccagcagccgccgtcctgagatgttctctgcagggctgtttgtggctgtaattttatgcttggccggacttctgggttacctgttacctagcttcaaggtgataattttctttgttttacctacaggttttgcttttgcagcatggctaaaacactatggaatacagatggaaattttactcttgatttggcattcatttaacaagctggtatagcaaaggattctgttactgaaaaaggcaaatcactcaggatgtatagagtaagaaagctgaatttcatgcatgtaaaattgttttcattcaatttctcaaattacatgaatccctggaaggtcaataataatgcaaaattagatttttttccttaattaaattatgtttttaataggttattacatgaccatggtaaaaaaattaaaagtacaaaatgtgtgcaataaaaaattatctccatttca

SEQ ID NO: 6027 - DNA, 324 bp, Homo sapiens
gcaaagcatttcatgtgtgacataaaattttcccgtttcgcctcttcaggtgtgagccatgggaagaacgtggattggatggactctcagggggaagagcagcgcctttggcagaagatggccaacaaccctggaactccctttgagggtgtactcatgcttcgttccagcatgggaaaatgtaggctctaaagggaccagttctccaagaatgaggccaccaggacctatctggctgtcttttcctaccattagcaaactgagacctgggattctgcttccctgccatttctcacctgacagtgttgggacatgaggggagag

SEQ ID NO: 6028 - DNA, 1169 bp, Homo sapiens
ccttcactgagtttttcttatctccttttgcagtggttaactattgtcacaataatgctgaatgaaaaaacacaccaaatgtcagtggcttaaaatgaccatcctttttctcacagttatgaagattggctatggcacctctgcttcctgctataggcctgaggttctagggcttcttatgcctcatcctctttaagccaaagggatagccagagcatcttgatggcagaagtgcaataagatgagccccactgctcgggtacattttcagcccctggttgtgtcatgtctactgatatctcattggtcaaaggaagtcagagggccaagatgaagaggcagggaaatatgcactgcccacagtgaagccatgacaagagtgaggatgcaggaaggcatgaagaattggggccaacagttcaatctaccataccttctctcacctggaattccagatgcttgagctacgaaacttagatgcaaagaaagttaaagctagaaggaacctcaggcccagttgctcattttgcagattccaaatgtgaatttcagagagctgagataacttgcccaaggccatatagaggctgtgactaaatctggacttaaatccagactatcaatcttaggccagtgttcttttttcaatatagtccttggcataatgctatgcttattaggtagataaaagggcttatgtcaagaaatttggagcagagtctgattacttgagcatgaacatacccgaccaaggtatgttctggagtcatattctagcctctgagctcattttttcatgcgagttcatataaaatcctcgaaagtttagaaactaggttttagtagtaacggagctagaatcatcttcgggcttattcctgctagttgttccatatttctagatttcatcttgaattttgaaaactgatttaagaatatatttagtattattattagtaagggaatacgcaatccagtttcaattttattcagaagtaggtcacctaattctagaaaatggttattagtctagtgtcgcttagcaaggtacttaaaagaaaatctgcacatatccttgtgctgcccttcttaaaaacagaaaacaaaaagtgtaagatcatcattgcttcccacataggaaaaataaaatgtcttcagacttgatgtga

SEQ ID NO: 6029 - DNA, 528 bp, Homo sapiens
aaataaagcactcatatatttcaaatacaaggaggagaaataaaataacatgccaaaaaaaatatgtgaagtaataatggtcaagaactttttctaaaattcaaactccatgttcagaatggtcaaagaatggcaagcaaggtaaacacaaagaaagcaaaacaaaaatacataggcatatcgtatgcaaactgtaggaaaaaaagataaagagaaattttggaaagaagacaggaaaaaacaccttatttgtagagacacaggataagaatcacaatgaacttctcatcagaaatcatttaagcaagatgacagagaagataaatgtttaaattgttgaaagaaaaaatatcccacccacctaggattccatatgcaaaaaaatagtccctcaaaagtaaagtagattttcagacaatctgaaacctagagaattaatcacctgtggacctgcccagcaatgaatgttaaaagaaactcttcttgcagaaggaaaatgatacaagtcagaaacttagatctgccaaa

SEQ ID NO: 6030 - DNA, 873 bp, Homo sapiens
tgtacttatggtttttaatatttatacagagaaaaatagaaacagatgttgttgctgagtcaaacctgggtctgctttcctgggggtgaagtaaagccaaacatccacactgaggttttgcagtgggagaaaagagggtgtttatttgcagggcaccaagcaaggagaattgggcagctcatgattaataaatacacggcctccctgagggattacaagcaagggtttttaaaggcaggggtaaatctcaggaaagcagaagttacagtcgaaagtgtaaatcgacacttggaggttatacattggtttggcctaaaaaaggtggaatatcttgaagcaggagctcacaggtcataggtggaatcaaaaattctctgatttgtgactggttaggaaagtgaagctttgtctgaaatcctggggtaagccgaaaggaatgttaaggtctggcccgtggcatgacttcttccaggtccttcaggaagaaatttagaacaaaggagggtggtcagaattcagtcctcagtttcccccatctgaggtccacgtgccagcggattcatttggtggggctctaggtttctgaaaaacaactcaaggacacgtgttaagatgttatctttagtttctacagggaaccaaacaccttgtggctctaacttccttgactattctttttaagctacaattacctccttaccaggttgctcatttggttctcagggctagctaggtgtctgttatttactttccttgaaaaactcaagattttgtttccatgtttgcggctggggagggcagcaggcctgtaagagggtgcccctgctccgtctcaatgtgtgtgtattatacatgtatttcttcgctctgccc

SEQ ID NO: 6031 - DNA, 7010 bp, Homo sapiens
gggcaatcaacattactgcatttaataagtaatgatgaacagcaaaacaacacacaatatactctttaaatgtttcactgaagctcttcaccattttgacttcatgtaatgaggtgtttgttcacattttatatgccatttaaactgacagagttgttttagaaggagatggtagtgagtgtttaaaaaaaaaaaaaagattgagtctttatttttgaaaaaccaccaagtatctccaactcccaacttacaaattagggtggtttctacacttacttcctctcaacatgcacacactaaagcaaattcaaatcaaagaaagattttaaaatcatatgcaaaaactgttgattttaccctacatcagtgctgactcttaataaaagagaggccttggctatcatcttagggatgcaggacatgctttaattctgaggacagacaccaggagaccagaaaacaataaaaccctaaaaaaaacagtgtcaaagactgtcagagtgaccttgaaatcatttagcaatagataccaactttccatgtgagggtaaaagtaagttattcaatgtggctaaattagccatcttggttagccatcttggacctgctgggtcactggcatgttattcaaaatctataacatttctttgggaaacttttagaaggaaaatatgggtctataagttgattcatctcctacacatctttgattttaaaatgatgacctaaacccaggtcaggaaagcaacttcatttcatggcttgtttttccccttttctgcgttctgccactagcagtcgctctcattcatttgaaagtaaaatggtaaagcagtgatctctaggtctatactacttaacttactgaacctcaaagttagatttacacattcacttcgtatctccccaaaattttaagcacaacaggcatttccttttagttcaggaatttaaatgttactttatgaacataggactttatcattcataaagacgaaaactctaacaacaaaactgaaaacttgcaggcagcacgtaaagcactcaatcaatgctaagatttcattaccatgtagtattttttttttaataggatttctctgtgctctacagaggaatgggtatagccagccccttaaaccactcttgatggttctaagtgttacttacccaggagttgccttgataatggttattaggtttaactttaacagcttgaaacaatttacacttgtcttgaagtatacttaaggaatttattcagctgatttttaagtgaaggagctcagttagtcaatatcctaccatcttgaaagctcccttccaatgtaattttcatagtctttacattttaactgtcattgtttattactgttttggctatactctctacaatttcagcagcattttaaagagacaatgtgtctatgtacaatgaaaaaacaaaatggcttgcaacatcagaaatacagtttaactgtacaatattaaagagaatccgtggtacgtataacctttttctgcaacatgaacaacttacatgtaagtatcagcattatgaatgtgacaataaagaaaaagtccttacaggagtgaaatacagcatcctgaaaaatattggtttctaccctacgaggcagttagaaaacgttcacattttaacaaatctgtacaaaccacaagaaatttgcttatgggaccatcttgctgataagaactttctagaaatgtagaataaccatgaacaaattaaaaatctagtatctatgtgttctacagccctagaacccaataaactgatttaaaaactcaattatgtccaacatggatcacttttacatcttgattgttaatgactgtctgctttttaatatctatgatgtacagtcaacttgcaccttctaggtcatttaattttttagcaaagaagcaacatcatttagcagcaattagagtgccttcaagaagacttaaaaaaaatacaatatccaattagaaaagccatattttaaacatttgtacaagaataagctgctgaaacttagtaattgaaatatgacatctgtacaacaatttacaatagagctagaagggaatttatcattatcctgcatagaactggtctgcatttggttactcactgtcacctgttttgatgaacaaggcctggtaacaaaagaaaaatacctgttatcaattctaacgtgttgaaaacactggcaatattataatttagtgaattcaactgatttcaacacaagcagctcattttgtcaaaggtgtaaagtatttagaaataatagctctccctttaatataaccagtgaaagaaaacggacatgtgatctcgaggtacaacttggtaaaagtctgaataggcaaatgacaaagcctaactttgtccaaagattctaactctcacattctattactataaaacacaactgtcactgtcattcagttcttactttggtttcagcagattaactgccaaatgctgaagaatgtatccaggcactatagttcgtatgttagaaatatgtctcatatttttccatgtgtttttaaataatgaaaaactacccttcatattagaactctctagtaacaaccaaatgtatttaagtattataaacgttatttacagtgttcccccaaataaacaaaatttttttcctctatcttaacatggtattcctgtttctgtgtaacaggcagtcatccttccttcactgctcaaaattatagtcagaagtgtgcatttattcattgtccatgatcctctctcatacaaatgacactatgaggaacttcagttcacaaacagttcttaaccacgtcttgtgtaaaaaaaaaaaaaaaaaaaaaagaaaaagaaaacaaacactcaaatgctctcaaacttaagtgtgcatctggaagcaaattcaaagatatcatgccaatcttggaggaaagtcagtaagtaattatgcttgaagaagggggtgtaggggatgctgtcagcccagccatgtgtaggtttcctgaagaatttgatcttctcatgtgtgggagaaggtatgggtcatttgccagctggtgcacatcaaatcgatcttcttttcgatatgccaaacagcgtcttataaatgcctcaaaaagagaaaggaaatgttagcaattaatgatctttttcccttctaaatatcaatcaactgaatcagcagaaggatggacacatttaagacataagtagatctcattttattggaagttcaaaccttaaaaaaaaaattctgtagctagaaaattctcactccaaatgcaactcactgcttgaagcccctgcagtggttcactttacagtctaaattactactgcaaccatttgaacttatactggaaagttgtttctgcttacgaaattctgaagacttttttctagcatttttcttctgctaaacagtcctcccaccctcatcccattttgttatcacttcagtttagcaaagggtaagatgccattttcaaccattatttttttttcctactgacataaagactttctttagatgaagagatcactgaagggacactttcattagggacattgtttcccaggttaaccctatgcatcattacactcctggaaaagctaaataaacagaatataatcactattttttttttctcaaaccaattttactcagtttttctttgagaatagcctcttacaaaaaaaaaaaaaacctttcctgaagtgtaacacatttttagaaatgcacacaaatcgttaagtgcatagcacaaagtaaatacatctatgtaactggcaaccagatcaagaaaaagaacctctgaatccccctcatgcccagttccaggcactggctctgtccccagtcgaacctgggttaacctttatcttgacttctaaaaccatagttgagttttgattgtttgaattttatataaatagaattataaattatgttctcctttgccaggcctctttcacccaatattaaattttgaggttcatccttttttggggggggagggaacagataaaatattctcaggaggtaactggtaattgtttccctttcttaatgctgacactagaaattaatacataccattaaacagaagtataatcacattaaaaggtaactattttgcactttctttgctttgaaattcattagaagtatatttttctctaaaaatatacctagctattctcattttaccatagcttactgtttattggaagtcaatctgatcccttagaggacttatcttttttatctttaacaaagtttcagagatcactttgaaaaatgattaagagggaaaaaaacatcaagactgatatgttagagtttgaggagtggaaaggctatcaatagcaaggttaaggttaagtctgcaacaaataatgtacttaaagatgcccacaccaagtcagggaaagtacttggcaaaggtatcttctgtagggatacagaatatagagatattatatattacattaaaatattaaaatttatatcatataattgtatcatattaatattatatccccccaacaaccccttaacccttcctggattccagatctctaaaaggtgactgtggtgcctattaagagcctaaggagagaaccaggaatggctaaatgagactttgcctttggcaactccactcctcctggtcttttcagtcagtattaaacaaacagatcatgaatcaactaaattcatttaatttctgttctcaatgaggctacagacagaaaataagacaagatttagatgtcagcacagttaaaatatttttaaaggagtcatatttatcttacaaaaataattcattttgctttcaaataagaatatttatctcttttgtttttttgagaatgggtcttgctatgtcgcccatgcaggagtgcagtggtgcgatctcacctcactgcaacctctacctcttggtctcaagcgatcctcccagctcagcatcctgagaagctgaaactaaaggcacgggcccctacaccgggctaatttttgtatttttagtagagatggggtttcaccatgttgcccaggctggtctcgaactcctgggctcaggcaatctgcctgcctgggcctcccaaattgctggattacaggtgtgagccaccgcgcatggcctatttggtttttttgagacagggtgtcactctgtcccccaggtttgagtgcagcggtatcgtcatggctcactgcagccttgacctccctgagctcaggtgatcctcccacctcagactcccaagcaactgagactctagatgtgtgccaccacgcctggctaatttttgtatttttagtagagaccgggtttcaccatgttggtcaggctggtctcaaactcctgacctcagatgatctgcccgccttggcctcccaaagtgctgggattacaggtgtgagccaccacgcccagccttattattacttttaatatttcttatatacttatatatctcagtattaacataagcagataaaataatacataaaaggtaatgatgagcccagatcttgtgatttttccctaattttcaaagtagcagctgatgaacataaacaatcagagaccatagcttaaaagataaaaactatagcaaccagaggctgatgcaactccttctctgaaagtaaatcaccagcccctgctggacagatcccctgcagcagcgagtcttgtgactttacttactggaaagtacttaccttgttgtcagcacaactgatgaaagaaaagttacttcacaaaactcatttacaaaaatttaataccttggcttcactgcttacaaccggttttacagggaactggacttctgtggcttttaatattgtattttcttgaagaatgtcttgttgagattgattgtgaccaaatggcttaaaaaaaaaattaaatgttgagatacttttctcacaaaatatttaaacacagatatcatttctgtttaagcgaattcccaaaaccgaaaatccaaatatcttgtgttctaaaatcttcctcagttatttgaaacctgagatgaattctcatacaaacaagctataattgatagcaggccaagaaagcctacctaacagatcttcaacatagattaaacactgtaagaagaagaaaataatgctgttgcaatataagataaaaacataaatttaaaactttattctgaataaacaatgaagttcagttagagaagagatgaagtagtaatgaaaatgtctatgacaatttccaaagaataaaatactgtgtgcatcacaggcgaatttaaatgaaggagctctggatttggagtgaggagatcccacacaaatcccttaacctctcttcccctattgatgaagggatggggtgggatgtgggctagttaatatttatggtaacctgcacttccaacttcaatataaaaagaagttgggaaataagactaagtttgatggtatttccctgatgagcaacggggaaactgcccacccaggccaaactgtgtgtgtgggtggggtggggggtgtaagaggaggtcaagtgaatggtggataatgaaaagtattgactccagtattcccaatagcagacaaatattagcatgttaacagatagttacttcttttcttaaaaaaaggaaagaaagcaaaaagtaggtcaagtaaactggtgtgacattaaaataattctgatccatggaaattttaggaagaaatagaggagaagcctggctttctttagaaggatctaaattgactttaagttagtgaaattttgcttttaagaaggaaaaattcaacttaatttatctctgtagagctgaaggctggtagaattcaatttacctttctaccataaagacactgaaagaagatgactccaaccgaccatacatcaaccttgttggaaatctttggtggctcttttccaactacaaaacactcaggaggtaaatacctgtaagt

SEQ ID NO: 6032 - DNA, 10331 bp, Homo sapiens
ggaacacaggccactacagaagtacatggtatggtcagacgaaatggtgaagacgggagaggcccagattcatgcccaccttgtccggccctatgtgggcattcatctgcgcattggctctgactgggtaacttcccccttcctctctcactggctaacttggatgtgtccctgagcatggccctggcctgtagggatcggccccgcgtcccagccagagcagagatctctcacttgttctggttcgtgggattgtgtcccatcatcccactgcagcacatatcaaaatgtaactccagagtgcctgccagccaggtctcactttagcagcagctgtttttatcctcattttacagatggataaactgagagatcaagccagaccccaggtcaggcagcaagccataaagaggccacagtccaggagtcccctgtcctagctcagtgtctggctggtagactccgtgttgaaaaactgactgtggagatgaggcatggctcccaagaaatgaagatgtcatcctaacagaatttggaggctgtttaaatgtgcagaatccttgtattccaatgaggttttcacctctgtgtgaaaataacagaatcaatatagatggtcaccttgatttacctaagaagatatatagatatgttagaaatgctcattgcagaaaacttgaaaaatactaaaattaaaattcactcatagccaattgatgaggtaatcttacatttacccactaaactctcctctttcccccagcccccacaaagaaagggagccagagccaggatgtcttatgagtggctccaaccagacattcaaggaatagtaattcccatctatactttcctacaacatcaagagatataagattctattttttataaagctagcataacactaataccaaactcagataaggtcagctcagaaaattatagcctgttcttgcttatgaacacaaatgcataggccctaagtgaaatattaacaggtcaaagccaataacatattagcacacaacacaaaacacgtaaaaatctatcgcaagaatgtaatcaaatttactatattaacacccaaagaagaaaaatcatatgatcatctcaatagaggccaagaaagcatttgataaaagtcaccacctgttcatgataaaaactcataactaaccaggaatagaatggacccaccttaacttgataaaggctatctctcgaaaccacagcagatagcatacctcctggggagctattggaagtgttcccactgtagttgggaatcatataaggctgcccgttagtactgccactgttcagaattcagtgaatgtcccagataatgcagtaagaccaagaaaagtaatttttgtttcaaaatgccaggctttctgtgctgtgcccaccgcccagaaagaaccactgttaactcctcctccttcaatgcttttttttttgagacagagtctcactccattgccgaggctggagtgcagtggcaagcaaaatcacagttcaccgcatcctccaccttctgggctcaggtggtggtcctcccacctcagcctcctgggtagctgagaccacaggcgcacatcaccacacctggctaatttttgtattttttgtagagatggggttttgccacgttgcccagactggtctccaattcctgagctcaagctatcagcctgcctcggcctcccaagatgctgggattacaggtgcgaggcactgcgcctggtcctcagtgttttctttaaaaatgtagttaggctgggcgtggtggctcatgcctgtaatcccagcactcagggaggccgaggcaggcggatcacgaggtcaggagatcaagaccatcctggctaacgtggtgaaaccccgtctctactaaaaatacaaaaaattagctgggcgtggtggtgggcacctgtagtcccagctacttgggaggctgaggcaggagaatggcgtgaacccaggaggtggagcttgcagcgagcagagatcacaccactgcactccagcctgggcgacagagcaagactccctctcaaaaaaaaaaaaaaaaaatgtagttaggccaggcacggctgctcatgcctgtaatctcagcactttgggaggccaaggtgggtgggtcacctgaggtcaggagttcaagaccagcctggccaacatggcaaaactccatctctactaaaaatacaaaaagtagccgggcatggtggcgggtgcctgtagttccagctactcgggaggctgaggcaggagaattgcttgaaccccagaggcggaggttgcagtgagtggagatcacaccactgcactccagcctgggtgacagagtgagactccgtctcaaaaaaaaaaaaaaaatgtagttaggttcttcctgtatagcctgtctttttccacttaccaggtcttgcttctggggttccagggcagttgccagtatttaaccctgttccccgctctccgtagaagaacgcctgtgccatgctgaaggacgggactgcaggctcgcacttcatggcctctccgcagtgtgtgggctacagccgcagcacagcggcccccctcacgatgactatgtgcctgcctgacctgaaggagatccagagggctgtgaagctctgggtgaggtcgctggatgcccagtcggtctacgttgctactgattccgagagttatgtgcctgagctccaacagctcttcaaagggaaggtatgtgtgggccaagtgggagtgcagtaggaagggaatgaaaggaggagccaggatggtcccactgcccactgcatgcttcacgggctcccctacaagccttttgcctggacctaccattcctcttcagttcctaccctccttcaaaccccagctcagaggcctcctccgtagtctttccaggttttcatccactcctggagctcacgtatccctgctgggaccttcgtggccctatatcatttcttctctcgggcactttctggactgtatgagactggtgtagaaatatgtcttatttcctcccaggagctgtgggctccttgaaggcagggtccaaggctgactcactgttaacattccttgatgtctagcctggtgcttcgacctctttgggactgaaaccctgccttaccatcaccagtgtctagtacagtgcctgacacttagtaggcagtcagtttgttgaatgaggatgtagagagtgggctctggggagagatccagtatagtggaggagttaatagcagagactctggagtcagagaacttgaatttacccactctgcagccttgaaaaagttatttgacctctctgtgcttctgtttcctcatctataaaatgggactgaatagtacctatctcatagggcagttgtgaaggtcagatgtaaagaaattgaaacagttcctgctacaaaataagtgctcaataaagttagctatcatcagtagtagaaattggtggctgatgaatgaaggaaaggatctttgtgcttagcaaactgttgaagaagccgtgaatagtgagtattcagtacatgagtaaatactagaatgttcttggtcagtgcttactatatcagtgaagagtaatactcaggcaatgagtgagtacgtattgataaaatgactgaattagtattaagcattccataggactttgtaggatgagtgaaaaccgtaaatgctgtgcaggccttaagaggcagacactgggtaccgctggctttatatcaagggcctccccttctctttcaccccagacacaggaagctccagtgcagagaggaagtgctaagtcagcacattctaatctcctccccacctactgaacagaaaatcagagctggggctgggcacagtggctcatgcctgtaatcccaggccaaggcaggagaattgcttgaggccagaagttcgagaccagcctggcctaacatagcgagacccccatctctatttaaaaaaaagaaagaaagaaagaaagaaaagcagaagaaaaatataattaagagaaaatcagagctgagagatctcaggggttgtctaacccaacccctctattttatagctgaggaaaccaaaattccaagaaaggatagagtttacccaagcagtcccagagctaattataatgggcatgacacagagtgggtaagtttcagaatgtgagtggaattgtttgggggattttggccatgattaaactggtattatttctttgctacaatccagatagcaagatgatgatttttgttacatcagaaatctctgtggaacagcaaagcactttcagccccaactctgcccacattccccccacctacctacaacccccaactacctctatactaagctgaagcatttggagagtcccagggagtttttttgtgagtttttggagtcagtgtatctgttacaccttgaacctcttgccattttctatttcctgtccctatgccagtcttctcatccctccccacccctcaactcccttctccatgggttcagaggccacctttatcctgaactaagccttcctcctccattaagctggtccagtgctgagtaagggtaccagtaaataagatgtggtcccgctctccagggctcacattctagacccaggaaaagagactgcagagagctataacgtgggccacaaggtggattcaggagcttgctagagagatgggcaggtccattcattcacctgtccactcaccagatttttactggggcaggctctgtgctgggcctggccagcagtggagagcaaaccaacacagctctagccccagtcaggggcaggagatgatgctaatcagagaatcactaaggagtggaaactataagcagagatgtgtgctccaaagtagagcagcagggttctgtgagagtgaagagcagaggatgctggcctaggctagagggccagggagcgcttccccaaggaggcaccactgaagccgagatgcgaaggagaactaggagctaaccaggtaaagggaggtacaccccaaacagcacagcacgcacaaaggtcctgaggagggcgggagcctgggtaggggctggatgatgggggtgggataagaagaggcccagcgaggaccttgtaggccacgttcacaatttgtcacccttatctgaagggcaatagggcatcattaaagggtgttccacttggagggcgggaaggacaggtgtgaggttatctcgaaaagtttcttctggctgctctgtggtgagcagaccaggagaggcagtgaggggaccagggagaggctgttgcagtccatcaggcaagagattgtgatgattgggcccaaggagtggccctccctcaagagaagggctcacctttggggaatatctcaggggtagattggacggaccttgggcttggatttggggtacatgggagatggaggcatccagcccagaattggaaggtgtggagctctctgttcccctctctggtttggtggggaagtccaccaggccagggctttaggaaaaatagaatttgagcttagccttaagagtctggtcaggccaagcacagtggctcacacctgtaatcccagctatttgggaggctgaggcaggaggatcacttgaatctcagagttcaagaccagcctgagcaacatagcaagactcctcctctaaaaaaattgttttaaattaaccacgtgtggtggtgcacacttgtagtcccagctacttgggaggctgaggtgggagattgcttgagcctgggaggttaagacccacctgggcagtatagcaaaagcccatctcaaaaaattaataaaataaaagagtctggtcggtattttaatgggtgttgaagcagcattccaggcagagggaacagcacaagtgaagacatgaaggtgtgaatggtgtgtttggagctgaggctcctggagcccggaagggtggggtgggcctaggcagcagctgggcaatgcttccctcagacactgaaccacatcttcctcttctctgcccctccttttgtgtctgtaactgcagctcagggaataaggttgggggtgtggatggcaggccttggcctgtagccaccccagcttatatgctctgtgcttcttcctgcaggtgaaggtggtgagcctgaagcctgaggtggcccaggtcgacctgtacatcctcggccaagccgaccactttattggcaactgtgtctcctccttcactgcctttgtgaagcgggagcgggacctccaggggaggccgtcttctttcttcggcatggacaggccccctaagctgcgggacgagttctgattctggccggagcaccagaccctctgatcctggagggaccagagtctgagctggtccttccagccaggcctggcagccagaggtgctccgggattgcaaactcctcttctcacctgccaaagatggagaagagtgccagggacccctcaaggagggagacgctccatatcccagggcataggacttgcaggttcctaggagcaggagcatctcccatcgcacgtgctttctgctcttctgggaatttctcacactggcaaagcagtccagcctccgtcttctggtccactctgctctgagcagcctgggatgctgaactcttcagagagatttttttatagagagatttctataattttgatacaaggtcatgactatcctagaactctctgtggtttttgaaaatcattgaattctattaatgtaggtacctaaagtgaccttaactgaatgtggatgaggctggggctggtgtgggtcttttggctgcttttcaaggtgtcccccaatgtggccctcaagagccatccccactgcctggccagagccattgttgtcccctacttcctaggccatttctggggcttgggggatgaatgctgtcctgtgctgtaaacactatgcaaatggaagttatcggttgtggtgctgtgcagcgctctgtgggcgactaagtgccactcacgcagcatgttcctggcaaggagcacataccatcaagccacactatcatggtattgttctcacagtcttttggtggttgatggccactgcaaacctggcaccatcagatctcttctgatctcttgccccagtggggcctggttggtagaatgttggcattcggttgatatccaaagcctgttctcccagccgtcctcctgcagctggagccttcaggccgtattctcacgagggaacgtttgccaaggctctgacctcacagaagatgcccagggcccagaagccatcagaattatcagtggagaagcaccttttgactcttcccttccaatgtaatctctgccaacaccatgaggcttaaggtgctctaagtcatgagtgttttggtctcaaatgctgcagttttaataatctgtgactcctgagagcccatggttttttgaccttgtggttctaaaattccttgtctgacccctgtagatcttttccttgccatgtcacctcccttggcctttgatcctggaaaggtggcagagcctccactgagccaggcccagagctccttgcagtgccttcttccttgtttacctgtgggaggaaacactttttttgtcaggggcagcctggttcagagctcagaggtcacactgtatcaaagatctcaaacagcaaagtcagcatttgctgtatagagctgccacccaactctaagcaggagaaactgtacagaaagggctttgctatttttcccttttgggaaaacaatgaagtgttttaagtcctgggtggactgagagatggtttgcctgtccagacttgctctcaagcctcatccagagaaggagctgcagatgagggagcccgtacactccctgccaccactaggttgtaagcctgtagctggctggctgatttcattttggaattcatttgccatccacagccttacactaggcacacactttagagtctggggctccagtggggcccgcctaattttttttccccccaagacagggccttgctctgtctcccaggctggagtgcagtggcatgatcatggcttactgcagccttgatctcccaggctcaagcgatccttctgcctcagcctctctggtagctgagactgcatgcccagctccaaatcaccttgattcatatcagcagtaataatcacttgtgttctgaaagaaagggcaccagaagttctagcaaaattcagttgtgttctgtgagctagcactttttcctctgacccaattttcttacctataaaatggtgataaaaaccgacaggttgttcaaaggcccagatcagctaaagcatgtatataagagcacgttgtaaacttgaaagagacaaaggcacaaatgtggctgttgattaatttgactgcttctcgttgctcgtcacctccatgccaggcactgtgcttgctaattgctttatgggggcattctcttatttattccccagccctgggaaataggagctgtcattatccttctctttctgcacaaggaaaaattaatgccctgagaattgtcataattttcccaaggctgcccagctggtggtgttaagccagaatttgacctcccagagccagtttccattagctgccatgctctgctgcctctaattcacagaatgcactttctaccctgtgtgccatggagacctcctatggaaaaatgatcagccaccttaccttctactgggtacctgctgtgagtctgcctatgccagaaggattaaggaggggaggttacccaagaaacaaagcctacatgccgcttacagcccccgttggatggttgctcagtacaacagtcttgcattcagcaggtgtttgttcatcacctactatgtgtcaggctctatgctaggtactggggatacaggagagaatcaagcgtaaagtctttgttctcaaggaatttgcattctagaaagtagaagatgtaataaatgtactgtgggacatgttaataagtgctataaagaaatataaagggtttgggagcaaaaagagggagtggatctattttagatgagcccaggtaagacctctctgaagagctgtcatgaaggagggagggagcacattcctggcagagaaaacagcacgtgcaaaggccccgagactggagtgtgttcctgaagagcagccaggaggccagcatggctggagaggcaggcataggcagggaaccgagcagcaggtcagagcaggcgagctgacattctgcagcctggacggccatggcaggaagcttttagttggagagatacaggaagcctcctagggttctgagcagaagaggggcatgagctgattcacattctgaaggacctctctagctggccagtgctgaggaggttggagagagaaagggtgaaagcagagagaccagtgcagggctgttaacagggttgcaggcgagagactggggtgctgggctcccctagactaggactccagtgccctcctctcccaagagacaaaggccattgcattgaaggaggtgggaaatgattagattctgaacatatgtaattatttttcagtctttttcaaagatacaaatatttacatagttttaatcatgtaatatatacaatttaatgtcctagtgttttacttaatagtgtatcatgttttccctgttggtatgtagcctggataaatgctcttaattataaaaaattctgtcgaggagtgttccatagtttattgttttcctattatgagaatttaggccaagtgtggtggctcatgcctgtaatcccagcactttgcgaggccgaggtgggcagatcacttgaggtgaggagttcaagaccagcctggccaacatggtgaattatctctactaaaaatacaaaaaaataataataatagccaggcgtggtggcacatgcctgtattcccagctgcttgggaggctgaggcaggagaatggcttgaacctgggaggtggaggttgcagtgagccgagatggtgccactgcattccagcctgggcaacagagcgagactccatctcaaaaaaaaggagacttcatgtgcccccaatttttcactattgttatttgaaaaaatatttttatttgtaagagtttttctttatttaaaatgttcattaataaagttgttggacgggaagcaaaaaaaaaaagttgtttaagataaattcccagaagtgaatttgttagatcaaacacttaaaactttttgttatggaagaattcaaatataaataaaaaattgtgagtaataaaatgaactcacagtttcaacaatgac

SEQ ID NO: 6033 - DNA, 302 bp, Homo sapiens
tgatattcatctcctccagtgtgggggatgttttcccctctctgacactgcacaagctggtttaggaggtcctgggcaggcactggcagaaggcaagaattatcttttcagtttttctcaatcctgctaacaatgcccaaagagaaagtctcagttcagtgctattgtgtcattaactcctctctactgcttgctaataatctgtccttgtaacagagtagacctcagagtcagacaatcttagttttctggaatttagtaacactattactaagtaaataaatgaattatttatttattta

SEQ ID NO: 6034 - DNA, 518 bp, Homo sapiens
agaatggctgttcccatttcatacttttaaggaaaggattttggctggcagaaggcacttcccccctccagctggagggaagaagtatacagagatctagaacttgaaagtgcattgtgaacatggaacagcaaggggtttcgtgctgctgagaggtagtctgggtttagctgaagagggaacacaggtttgctcctcatttgttcagtcaagaagtattgaccgggcgcggtggcccacacctgtaatcccaacactgggaggcctaagtaggcagatcacttgagtccaggagttcgagaccagcctgggcaacatggcgaaaccccgtctctacaaaaaaaatgtaaaaaattagctgggcctggtggcacttatctgtagtcccagctactcaggaggctgagatgggaaggtcttgccttgagcctggaggcggagattgcagtgagccgagatcacgccactgccctccagcctgggtgacacctgggtgacagcaagatcctatctcaaaa

SEQ ID NO: 6035 - DNA, 425 bp, Homo sapiens
ctcccgcctcgtccaggtccacgtagggcccggcgcccttggaaacatctcatccacggccagctacatcttgggctgcggcgctctaggcccacttccggccacggggccgcttcctatttttctattttttaacaactccccatattaatattcattcactcattgactgttaagcccttctatgtatcaggaattgttctaggtactaggacatatcagttaagaaaacatttgttaatccttgccttcatgtagtttattagattgtgaacagatcagaaaaaaacatgtaaaaaattataaaatgttaggtgatcaaagttatggtgaaaaacaggaaagggaagaggcagaaggagtgttgaggtgcagtgttaaatagagtagtcagagaagacctctctgaaatgtcatttgagtta

SEQ ID NO: 6036 - DNA, 464 bp, Homo sapiens
taattgtaaccctgcctagctaccaagttagcagggaaattcagagtagagaatatttggtgactgcttaacctctgtcacaatccacatgttttttccctagcatcgtataatactgtccaaactctgttgtaatttttttttttttggcatgtgacattgctttcttttaattgaagtgaaggcaaaacctggtcacgttcagagattaacagcctcatccaggtggtcaagtacaattttgtctttcttggttaaccaggtcctaatttcaacgtatttccatatgttctttaaaatcacctgaaactgccctgcgcaggctcacaccacggctctgtaccaagggcttggacccgcctgcagccagacggcatctcactagatgtcatcatcatcaaagagatcttcaaaaccatttaaaaagtctacatgaacagccttttcattagttgccaagtcca

SEQ ID NO: 6037 - DNA, 157 bp, Homo sapiens
ccgggcgtggtggcgggcgcctgtaatcccagctacttgggaggctgaggcaggagaatcgcttgaacccaggaggcggaggttgcagtgagctgagattgcgccactgaactccagcctgggtggacagagtgagactccatctcaaaaaaaaaaa

SEQ ID NO: 6038 - DNA, 5704 bp, Homo sapiens
aaaaggtacaactaccttgctgatgctgtacatatggctcacttgtgcccagagagagaataaagccatgtcgaaactatctacgattccttgagtgtttttccagctacctgccacttgcccacccactcccctcagatctcagttagaacatgacaattgggctcatgaacaggatcctgaggtgagtgaccctttggtcccccctgattccgggtcggccatgaggctgcagcgtgggttgtggtacctggtagcagctgtgctgtttggatgggctttggtggaaacctgggtggcgatagatgggtcccctgcaagcatggagaaggctctgaagctgctggaagcacagagcactgagaaggagtgagcttttgctggtagagttggatgggcattttgactgtgctatgagaagcacacacccagtccctgagggatgcagtgcaggtaagcgcccttcaggcagaggtggggcacctggaaacccagctacagagcttggaaaaggaattagaggctgctgtgaatgtaggcatgggtccattgtctcagccagagatccccacttggtctgatacagagaaagaagaactcttgttgtgggctcacccagtggtccaccagaaggtagatcatgaacagctgttggggccccaagagaaggctcagggacccccccccacccaccgtaatgcaacatacttcatatactgcctataccccaactgagttgtgggaattaggcaagcagtgccgccagcatccaggggaatgtctacctgcctggatgcttcatttgtgagacaagagagcagatagtatctcctgttctgcctctgagatggaaaagctggcctctatcacgactcacccctccctctgtcagtggttgcaggtgaacaagcagttggcacaagggcaaagtgatcacatcctgattgagtggctatggacagccatacagactgtgtggaacaacgctggtgaaatacccaaaccgtgagtaaataccagtctatgtgatttggtgcaagtcattcgggagacgggtatgcggcaggctatgtttgacctgaatacccagggaccaggagatgaatgcttcagctaccacatgggagaatcttgtgttgggttctgcacccctgagtgcctttgactccctagctactgtcctcaacctgtacatagggtaccacatacatgaagtgaccactgctatggtgactctcagggaagcagaaggccatcggcaggaccgaggggtccatgctgtaaagaaggggaagatgccccacccacagggggtccccccatggtaaaaagggggcgccaacgagtgacacactcacagacatgtatagattttattttggccgggttgactgagagaaaattgataagcaacccaatgaagtgcttttaactttgtggagacagttgtctctggaggagcaattccagaaaatgcccaagggggagaaggacattgctgtgtaacctggtcccacccaggcgcttcagttcaaagatgacttgctgcagccaagtggaaatgtagagccttttttgcttgattagggaactggccaaggtgcccagcttgcggggacactaaatgactggaggccacatgtggaattagtgatccaccagtcccccaccgatgtacagcgggtgctggtggatactggcacagattgcagccttgtttatgggaacccggataagtttcttggcaaacctgcttacattgacagttatggcagctggtcagtgaaagtgaaacctgtatctctataccttggcatcaccgtttggctccctgcttatgcgctgtgtatgtctctcctgaatacattctgggggtgagtgtttcacaaggtttggcagctgtctcatctatcatggatttgatagactgctcgatgatggaattggaacaataccactatgtggtagacttggctaatgcattcttttccagagagccaggaatactttacctttatgggacagcgacaatggattttcacagtgttgccacagggctatatgcacagctgcaccatatgtcataatctcattgatgatattatgttaacctctgattctcttgcagatttagaagcagtaatgcctctcttgcctgggactgggatggtgtggctgagactgccttactggcagccaggtgcgctattcagcagccacaagccctacaagtaattaaccaggggcacctgtttgagctggaggtgcatgtggccacagacggttttggttgaggcttgtggcaatgcacagagcgcctaagaatgccagtaggcttttggtcccaactatggaaaggagctgaactccggtattcattgatagagaaacagctagcagctgtatatgctggccttcgggctcatgagagcatgacaggacaggctgcagtcatcatatggacaacttacccaataacaggatggatgcgtctatgtgtaatgaccacctggagtgggatagcacagatgtccactttggcaaaatggggcaactccttgcagcagtggagtaagctgagtacaagtcccatagcagcagagttgcaagaggtcttgggacgtgtagtcctaatgcaagataaggccatgcggcctgaggcacccctagatcctgagtcttcaccatttaaggaagggcatcccaggattcctgagggggcatggtacacagtagatgaggtgctactgctgcctggaccactgttgcagtccaacctagtactgacaccatatggtttgaaactgggtgcggacaaagtagccaatgggctgaactcagagcagtgtggatggtgatcaccaaggaggtgacacctgtggtaatctgtactgatagctgggcagtctactgaggcttaaccttgtggttaactacttggaaaatacagaattggctagtgagccacagacccatttgaggccaagccatatggcaagacctttgggaaataggtcatcaaaaagaggtaactatttatcatgtgtcaggccatatgcctttggccacccctagtaatgatgaggcagatgccttggctaaggtcagatggtcagagtcagcaccaacacaagatgtgaccttgtggctacaccggaaactgggacatgcagggggtaaactgatgcaacaattcaataagtgttggggtctgtcccttcccaagcaagacatttgtgaggcttgtcagaaatgcctggcatgtgttcagacatatcctaaaaagaggcagctgcccggtgttatacaacaagtaacaatagggtgagtgcccttgaccaggtgggaagtagactacatcgggccgctgccaaagtcgcgagggtatacgcatgcactaacggctgtagacatggccacaggcctgttgttcacctacccttgcagggtggccaaccaacagaacaccatccaggccctgcaacacttatgttccctgtatggttgtcctctggccattgagagtgataggggaacacatttcactggacaacaggtacaatgatgggcacagcaaatggacataaagtggggattccatgtgccatacagcccacaagctgaggtattattgaatgatataatgggatcttgaagaatggattacgcttgcatgtcaaacccctgtctttgcggagctggagttccaggctggacctggtgctccaaaccttaaatgaatggccacagaaaggtggcccggccccagtggaggctttgtttcactaggccaccacccccattcaattggagatacataccaaggatgacctcctccgatcaggtatggggacaaatggtaacctgttgttgcctgccccaacaaccctgaaggcaggggaacagaaaacctggctgtggccatggaccctccaagctctccactgctggtggttggccatcatagctccctgtggggagggcctacagtatgacttgcatgtcactttttgagtgttcaatacatggcttccaaggttgactgtttgtagaggaacagccagggaaggagccctcctctgagggacatatgtactatctgatgggcctattatgagctacgctgtgactttggcatggatacaggattcaaaggaaccatggagatttgagaaggtgtggtaccatcacccagggcaaaagcccttggtggctgcattgttatccagggatggaaagttagcctatattttgcctgagggatgtgatttacctctgttagtacctgtgcctgctctgtcatttcaaccgtaggttaacatgctccaattgcattgtggactgaccccacacctatgctgaggtgaccaatgtttccaactgttggacctgcactgcctttccagcagcagctgcagacagctttccctgacacatacatcccgtgtctgcagagaactggacatgcctggagacttgagatcccatggctgatgcctggaacacaatgtggcaagctttggacaaaggacacagcaagacccatggctggaccgtagcattcgtgatgagtggggctggctagtaggggaacatgtagtagcccaagcccaggcattgcagtgcacagagcaacattggggtaacaggatgggtacctgtcacggcctgtgcaaacataacatgtgtcaccacactgaaggtatggtggaacaagtggcctcaccaaggtcggaccccaatggactttttgcctcttgggagcttatgggtctatgaggacacagtagcctttcctatcagcaaactggagtggatgttgtatctgggggtggccttatgtacctgctactgttctccccacattgcccagatgcctgtataactgggaggcactgtgctctcagtttttgcgaatgtgatgagccccctggtgtttctaccctttggcaatgactatccctggagcaggtgtcaaaactgtagaagcacaatttactgctcttgcggagcacaccgctcaggctctgaattacacctgagtgtccctcctcctgttaatgaatgaggttgatcagatcaaaaagtggtgttgcaaaaccaagtggccttagacataactgctgcccaaggagccacctgtgcccttttaggaacacaatgttgtaccttatccctgacaatcagcagaacataacagcagccctgcaaaggggtcttccaggagattaaggtgactgagagcctcactgtcaaccccctgcagagatggtgagcatccctaggttctggcgtacattgggccctaatagtcataagtatcatagctgagatcctagtagtgagctgttgctctctgtattgttgttgtgggttatggactcagggctccgccatataggcatgtgtccctgcctggaggacgccctcagcctagggggtgtagtgtaagggaaatggctgtgctttagtcaggagtaggctgaggcagccttctggtgcagcatgactcagtgggtttggagtgcaagcacacaaccttgctcgttatgtaaccacaccacatgaggcacattaggtaacaactcacatgagctcgtgtttggctcagagccactattgtctgtaaaaggtataccttgctgatgctgcacatatggctcgcttgtgcccagagagagagtaaagccatgttgaaactgtc

SEQ ID NO: 6039 - DNA, 761 bp, Homo sapiens
taaatttcaagtttaatgactacaagctaagtcatcctgatatactgttctcaaaacagacataagatgctcaatgtgatctgagtagttcaggcctgacaactaagattccttttcctctggatggcaactgaatgagcaccactcagattttcttctgtaattttcctttttcagtgctttctattctgactaatcctcctttaattaatccatatatatatatcaagctaaattaatgtctgagctgaatgtggtggctcacatttgtaatcccagcactttggaaggccaaggcaggaggattgtttgaggccaggagtttgagaccagcctggccaacatggtgaaaccccatctctactaaaaatgcaaaaattagccaggcatggtggcacatgcctgtagtcctaactactcaggatgctgaggcataagaatcacttgaacctaggaggtggagattgcggtgagctgagattgtgccactgtactccagcctgggtgacagagcaagactctgtctcaaaaaaaattaattatttaattgattggttaatgtcgttgggaaaactttagtaaaatgctgctggcccaatcattgtcttagtatcgatattatgtggaatagaacaaaatagacctaaaactgtgtctgaaatatgtaatttctgaaacaaagttttctttaaacaaatcttaggaatcaaagagagaaacagatcttgaccctctgttttgttgtttgcttatttttagaa

SEQ ID NO: 6040 - DNA, 1959 bp, Homo sapiens
catggattgaaagactcaatattgttaatatgtaattctccctaaattgatctacagattcaatataatcccaattgaaatccaagcaagctttttttaaaaatagaaattaacaatctgattgtaaaatgtatgtgaaaacacaaaagacctatgctagctagccaaaacaattttgaaaaagaacaaagttggataacttacactgtgcaatttcaatacttaactaaaaagctacaataatcaagacatggaatcggccaacatacaatcatatagtccagtgggagagcatatggaaagtctacatatagacacatatggtcaattgattgttggcacaagtgccaagataattctatgggaaaggacaatcttttcaactaatcatactgggactattggatatccatatagaagaaaagaacctcaaaccttatttcacctatacacaagattgaatccaatggatcataaacctaagtgtaaacagtaaagctttgtttagaagaaaacaaagaaaaactcttcatgactgtgggttaggcaacagttttgtagaggagacacagaaagcactaaccaactggatattatcaaacttcaaatttttgctcctcaaaatacaccactaagaaactaaaaaggtaagccacagactggggaaaaatacctacactatttgcaaaaaataataatgacaaaatatgtgaacatacacataataaaagaagatacatgtttggccaaatgcatgtgaaatggtggtcaacatcattagtcatcagagaaatgcaaattaaagtacaattgtatgcctcctagtagaatggtgaaaattagaaagactgatgattccagttgttcgggaagatgtggagtactggaactctgatgccttgttgctgtctttgtttagtgttggtataacagaatacctgaggctggatattttactttaaaaaagaggtttattgggcttatgattgtggtgactagaagagtcaagattgggcagctgcatctgatgaaggcctcatgttgcttcaactcatgacagaaagcagaaagagagagtgtgtgtaaagatcacattgtgagagaggatgcaagagagagaagccaaggaagccaaactcatttttaacaacttgctatcatgggaactaattcattctctcagagcaagaactactcacctctgtaggagggcattcatctattcttgagggatccatctccctcacccaaacaccttccactagcctacctcccaacaccaccacactggggataaaatttcaatatgcattccagtagggacagaccacatccaaaccattgcagttggtgaaaatgcaaaatgtacaagcactttggaaaacagattggcagtttcttatgtagttaaacatatatttaccatatgactctacatttacactaaaaaatagttacacgacagaaataatgagtccacaaaaaagcattcatagcagctttatgcatagcagccaaaaaatgaaacagcccaagagttcaacaacaggttaactgacaaacaaattgtggtacctatatttacataatagaaccctgctttggtataaaataaaccatggatacatgcaaaatgtagataaatctcaaatacattattctgagtgaaagacgtcagaccccaaaattacaaatggtatgattcaacatatatgaaattctaaaaacacaaaactgtagttacagaaagcaaaacaatggtggcttggggtatcagatgaggaggatggacttgaaaagagcacaggatggacttttggagtgataaaaatctgtatcatggttatagtgatgattagatgagtgaatgaatttgtcaaaattcatttgtctgtacacttaaaatgggtatggttgtatacaggttaaacatcaataaaaaaatcttaaattgctgta

SEQ ID NO: 6041 - DNA, 202 bp, Homo sapiens
ctcagctcactgccagctccacctcccgggttcatgccattctcgtgcctcagcctcccgagtagctgagactataggcgcctgccaccacgcccggctaattttttgtatttttagtagagacagggtttcactgtgttagccaggatggtctcaatctcctgacctcatgatccgcccgcctcggcctcccaaagtgctg

SEQ ID NO: 6042 - DNA, 219 bp, Homo sapiens
gataaaccatgccgcaataataaccttgtactagtcatttttaacatgtgaaagtatatctgcaagatacatttccagaaatgggattagccaatcatatgatattaagccaaccttttgatctctttgagctgcatttgttaactaataaattaagctcatatttacctcataggatcattattataatgaaataaccatataaacaattattgtaca

SEQ ID NO: 6043 - DNA, 9591 bp, Homo sapiens
gccctccgcacccccccctgcccccccaccgttcgccgctgcaggcggtcggccgccgcgatgaaggcgagctcgggggatcaggggagccccccgtgcttcctgcgcttcccgcggcctgtgcgggtggtaagtggcgccgaggccgagctcaagtgcgtggtcctgggggagccgccgcctgtagtggtgtgggagaagggcgggcagcagctggcggcctcggaacgcctgagcttcccggcggacggcgcggagcacggcctgctgctgaccgccgcactgcccaccgacgcgggggtctacgtgtgccgcgcccgcaacgcggccggcgaggcctacgcggcggccgccgtcaccgtgctggagccgccggcctccgaccccgagctgcagcccgccgagcgcccgctgccatcgccggggtccggggagggcgccccggtcttcctcacggggcctcgatcccagtgggtgctgcggggggcggaggtggtgctgacgtgccgggcggggggcctccccgagcccacactgtactgggagaaggacgggatggccctggacgaagtgtgggacagcagccacttcgcgctccagccgggccgcgccgaggacggccccggcgcgagcctggcactgcgcatcctggcggctcggctgccggattccggcgtctacgtgtgccacgcccgcaacgcgcacggccacgcgcaggcgggggcgctgctccaggtgcaccagccccccgagagcccgcccgcggaccccgacgaggcccccgcgccggtggtggagccgctcaagtgcgcgcctaagaccttctgggtgaacgagggcaagcacgccaagttccgctgctacgtgatgggcaagcccgagcccgagatcgaatggcactgggagggccgcccgctgctcccggaccgccgccgcctcatgtaccgcgaccgcgacggcggcttcgtgctcaaggtgctttactgccaggccaaggatcgtgggctctacgtctgcgccgcgcgcaactcggcgggccagacgctcagtgccgtgcagctgcacgtgaaaggtacggcggagcccgggacctagggaggggcctcgagtgtcctccgaggccctccgaactccagccctcctcggtgcccagcgctgcccccaagactggaggagaggtggtccgcgggaatattaaaataccaaacccgcccgcctctcactccccagggattcggatttagtaggtctccagggtactcaggaacttcttagcaaactccttaaatgattccgaggcagatggtggaacaccactaaggagtgattgatgtacaaatccggagggccctagaactcttcttccctagtggttttcaacgtctttgttattttactcctccttcccccactgaattcacaaccagagccccaatatatgagacagataaaggagtagtttatgggcgtaaattgctgagtctacgtatataacaggtacttctaaaccatcagtgagaataaggaggctattttattgaatacaggaatttgaattaaaggctgcattcatgagaccaggctctgaaccctgtggggacggcctggctgcatctgtcaccttgagaaacaagtgattcagtggaaagctagacttgagggaggacaaatgtcctgcgtgtttttactattctttgattaaactgctccccacgtttgcaagaagaggaaggtgaaggagagaaggtttatatttcaaagttgaatcaccaacaatatccaataaatggttacattctcataaacagaaaattccaaaggaaaaaaaagcacaccccaaactcaccagaaggtaacgctccccataataggatttcatcacaacgcaaaagagtacaccttcactagttattgtccagttttttctcttagaggaaaaaaagttggtaaattctcctgagtccttcctagcatgcagtcaaggcatgttgcccccaggctgcggtggtggcctcactgttacagttcaatgctcacagattcatcaggttggtgctgatctggacctccatcaggaaagaaaagcccggagggaaggctagaggagcttccccgagttgcatacacacacgcacacaaaaacttgcttctccagcagccctagttaatcctctgatttccaacatcctgttttcttttcttttctttttttttttttgaaatacacttttgaaaaggttaaaatagctaggcacagtggctcaccctgtaatcccagcactttgggagactaatgtgggcggatcatttgaggtcatgagttcgagaacatcctggccaacatggtcaaaaccccatctctactaaaaatacaaaatcattatccacgcgtggtggcgcctgcctgtaatcccagctctacttgagaggctgaggcaccacaattgcttgaacccacgaggtggaggttgcactgagccgagattgcgcgactgcactccatcctgggcaacagagcgagactccatctcaaaaaaaaaaagagttaaaatattttaaattctactcatacccttgcagaatatgtgaaatgactggggcggggggagccagggaacagtttggaaatcaccaatctagggcctggaggaccccagggaacagtttggaaatcatcaatctggtccaaccccttctctccctttccccattttacaagtaaggagactgaggcccagaagcattgaaatggacttgcttaaggtgatgtggctagtgtcagggctggatgagaactcaggtcatcttaggaaccaccactttccttctggtagttttctgtgattccacagtgcccgctggctctgcatgaagagcacacagcatgagctaatgcgcttctaggtatcctactcctagtctgggccttctccagagccctctcttgtctctctctcccctctccacagagccccgcctccggttcacacggcccctgcaggacgtggagggccgtgagcacgggattgccgtgctggaatgtaaagtacccaactcccgcatccccacggcctggttccgtgaggaccagcggctgctgccctgccgcaagtacgagcagatcgaagagggcactgtccggcgcctcatcatccacaagctgaaggcagacgatgatggtatctacctgtgcgagatgcggggccgggtgcgcaccgtggccaacgtcacagtcaaaggtcagctggcccgtggggaagaggctgaggcggaggcaggcaggtgctcagattccaggttgatggattcctgtccgcatctcagggcccatcctgaagcgcctgccccggaagctcgacgtctggaaggagagaatgctgtgctgctagtggaaactatagaggccggggtcgagggacgctggagccgtgatggggaggagctgccggtcatctgccagagcagctcaggccacatgcatgccctggtccttccaggggtcacccgagaggatgctggcgaggtcacctttagcctgggcaactcccgtaccactacgcttctcagagtaaaatgtgagggcaggaaggcctctggacaggcgaggcagggcaggaggttggccagatgccggagctgggttggtgaagtagatttaaggtggaagggctgtggaggcccaagcaaggccggaacacatccctgccttggtctcaggtgtcaagcacagtcccccaggaccccccatattggcagagatgttcaagggccacaagaacacggtcctgttgacctggaagcctcccgagccagctcccgagaccccattcatctaccggctggagcggcaggaagtgggctctgaagactggattcagtgcttcagcatcgagaaagccggagccgtggaggtgccgggcgactgtgtgccctccgagggtgactaccgcttccgcatctgcacagtcagcggacatggccgtagtccccacgtggtgttccacggttctgctcaccttggtgagttggtcctgccagacccacccatcacttctcctcccttccccagccctcagtgctggtcctctcacaggcttgccatccgcccagcctctgccctctgccacaccttctagttctgacagctgcactctgtccctgcctcagtgcccacagctcgcctggtggcaggtctggaggatgtgcaggtatacgacggggaagatgccgtcttctccctcgatctctccaccatcatccagggtacctggttccttaatggggaagagctcaagagtaacgagccggagggccaggtggaacctggggccctgcggtaccgtatagagcagaagggtctgcagcacagactcatcctgcatgccgtcaagcaccaggacagcggtgccctggtcggcttcagctgccccggcgtgcaggactcagctgccctcacaatccaaggttggtgccagtggggacctgagtgggcagaaagggtcaagacacagaagtcctgttggcaaaacgaggcagatgctgtttttatttcttgtatctgggccaggagagcaaggagcatccatgatgggctgaggttgagggctcagaggtccggaaggccaatttcaacccacatgcaacatccagggcaccccttgttatcttgatatatgtcagcatcatatcccaattctctggagtgctttgtggtttacagaatcctgtcagatttgtcatctcatttgaaagacacagaccctggctgctagtccctgcctgcctcctgccatgttgtctaattgttgacattgtcatcgcaactttctacgtgccaggcgcagtcctaatcaccttacatacattaacacaatcttctcaatggccctataagataggttctttttttttttttgagatagagtctcactctgtcgcccaggctggagtgcaatggcgcgatctcggctcactgcaacctccaccttgtgggttcaagagattctcctgcctcagcctcccgagtagctgggactacagacatgcatcaccatgcccggcttgtttttgtattttagtagagatggggcttcgccatgttggccaggcttatctcaaacttaagataggttcttttgacattcccattttatagctggggaaacaggcagatacgttaagtgacttgctcaaagtacggagctaatgagcacaggtgctgaattatgaacccaggcagtcgggctcctgatcacactgtgccacctgttgaaagggggaaggaggggaatgaggcatccctgaggagaacagctggaggtggggcgctcaaagttcaaggatcacgctagcatttgccatgtcaccattgctggagtttgtaagaccaatcaaggaatctgtcggcacccatgcacggggtcttggggtgattcactgtcagcatcgcaggcagaggggccaggtgagacctgaccagcaaccagagcagcatttccaaaatgggatcccagttcactgacatcagaaccacctggagggctggtttataatgcagatttcctggcccctgcgtgcttgggaatccaagaattctgcatttttagcaggctccctaggaattcttatgcacagccaaagcactgctcttaagggttggtgtggaagcctaagcctatttttaaaaaccccaacaacagcagttgttccctctgatgcatccgacactgagcccatgcaccggagggaggggtgcttatctgtacttctccccacacagagagcccggtgcacatcctgagcccccaggacagggtgtcgttgaccttcacaacctcagagcgggtggtgctgacttgtgagctctcaagggtggacttcccggcaacctggtacaaggatgggcagaaggtggaggagagcgagttgctggtggtgaagatggatgggcgcaaacaccgtctgatcctgcctgaggccaaagtccaggacagtggcgagtttgagtgcaggacagaaggggtctcggccttcttcggcgtcactgtccaaggtcaggaagcatgccagcctgggctcctccagccaaggctgattgtggggccgcataagccatgccctctggtctgctgcctacttgggggagtcctttacagggagagtccagtggcccaggggacatgtttcagataactctgcacttgcttttttgtttcttgttttttttggagacaggctctcactctgttgccctggctggagggcagtggcgtgatctcagctcattgcaacctccgcctcctgggttaaagcgattctctcacctcagcctcccaagtagctgggactacaggtgcgcgccaccacgcccagctaatttttttattatttggtagagacggtttcactatgttggttaggtcacccctgacctcaaatgatctgcccgcctcagccttctaaaatgctgggattataggtatgagccaccatgcctggctttctttctttctttctttttttaagatgagggtctcactgttgcccaggctggccttgaactcctgtgctcaaacgatcctccttcctcagcctcctgagcagctgggattataggtgtgtgccacgcacagcgtgcctttgcctcctaaacccctgatacactaacactgtctcgctgtccacatagcctctgctgggttgggtgggggaacaaaatgcaattaaggggaggagagatgggagcaaacactttttggacacttactctgagccaagcactatgctaagtattttcaatatacactctttcatttaatcttcacaactcgatgaggggcaatatatctccagttcacaggcaaagaaatggaggctgtaagaggttatgtgacctccgtcacaccatagcttggcgacacacacaggattgttctgttcctgctgcctcagatagagtcaaacagaagcatcgagtgcagtcaccccgtggttctcacaaggcagtccgtaggctggctgctttaggaagctcctggaagctggttataaatccctggactgtccagagccccagtatccagggtggagcctgaagatcctttcctaacaagtgcagactctctgagagagcagcttgggaaccatggatcccactcatctcactgagtgggagtcctgttttccacactgtggcccctgcctgaatgcacccagtgacagggaacccactacctggagagtggctgtctcactgttgccacttgttggatcatccttcacctcctgcccaccctggggtctttctcgtaatagaggcagtaagcatggccctgatgtgacttgtgacagtgacctcccttcagcctagacaaatggtggctgccactctgtgaactctctgtgcttccttctctctatgtactcaccccgccacctctgatcctttggggacctacagagcactctggtgccacatgatctcctgccatgcctcacctgccatgccctcagcattccttgtcattgtccctgagtccctacacagcaggaccttagccctcctccagtgtcctcttgtgcagaaacagtgtctcctggccacacagctagtttggactcattgtgcgggggtgtctgtgcaatgccatctctgcttcccacccagatcctcccgtgcacatcgtggacccccgagaacatgtgttcgtgcatgccataacttccgagtgtgtcatgctggcctgtgaggtggaccgagaggacgcccctgtgcgttggtacaaggacgggcaggaggtggaggagagtgacttcgtggtgctggagaatgaggggccccatcgccgcctggtgctgcccgccacccagccctcagacgggggcgagtttcagtgcgtcgctggagatgagtgtgcctacttcactgtcaccatcacaggtggggggccaggtgggcctcggaggcacaggggaaggtgcccctgctcccactggaacagctgccacaccttcactcccaggccactgttccccgcccctactgccctccccctggcagatcggacctcctccctttctcctcaagctatggtctagtcacattcaggaaacgtgttatcataagcacattggtcttggctaaggaagcctggctttctctattctcctgaaaacctgtaccaagggaaatctctggggacagtgagtctattgcacggtagggcacagtctatggctggtggtctcatgcactatgggggcaaaaacatcttggaggatgatacccccagctcctccccccaaccctcctctcatcagttccacccttcataccgtccctgtcccaacccagagaatgtggagcgtttctacagccgaggctgaccccgtggtcccctctgtgcagctcctgcgcagcagaaagtctgctgtgcttttgtgacagctgtattcgtgtgtctctagctgtgagtaactgtcagctgctgtgagatttggtctcaggaaggtccctcttcaacacatggcctactttccaggggtagggaacacaacggggtcagggaggacggcagggcacacccctcatgcccggcagtggctgtccctgtcctccagacgtctcctcgtggatcgtgtatcccagcggcaaggtgtatgtggcagccgtgcgcctggagcgtgtggtgctgacctgtgagctatgccggccctgggcagaggtgcgctggaccaaggatggagaggaggtggtggagagccccgcgctgctcctgcagaaggaagacactgtccgccgcctggtgctgcccgctgtccagctcgaggactccggcgagtacttgtgtgaaattgacgatgagtcggcctccttcactgtcaccgtcacaggtgtgggcccagcccagctccccggggtcacagagacagccctgagccctggaggagctggccacatagccccagctagcaccccggggaggagggaggtgtgggctgcaggtgcatgtgccagggttcttgctgagatgagcccagggcccctattcaaggaaacaagcccctccccggtgcccaaggccaggcctagctctgctccacagctcatttactgagcactttccctgaatcaggcactgggagtagcaggtgagtaatgcaaatacggtccctattctgaatgagctgccaggctaggtgaggaggcagctgttaaccaggggtcgcaaacgggtagtcctggggccctgcgcattccacacatgtgctttgtttggtctgcagagtcttaccaaagtcaggacagttcaaataacaatccggagttatgcgtcctcttgaaaaagccgaagacccggcggctctggtcccgcttccccccatggcgacgaacagctggcactgagtagcagctgcccccatagtttggggcccacattcctctgtcccacctccctgccattgctttttgcctctccccagactgcttcagccgctaacctaacctggcccctgtgggcatttgagtttgcgacccctgtgttaaaccaataaacatgcaaataaatgtacagtgacacctggtgataa

SEQ ID NO: 6044 - DNA, 12415 bp, Homo sapiens
  SITE (10652): n equals a,t,g, or c
gccctccgcacccccccctgcccccccaccgttcgccgctgcaggcggtcggccgccgcgatgaaggcgagctcgggggatcaggggagccccccgtgcttcctgcgcttcccgcggcctgtgcgggtggtaagtggcgccgaggccgagctcaagtgcgtggtcctgggggagccgccgcctgtagtggtgtgggagaagggcgggcagcagctggcggcctcggaacgcctgagcttcccggcggacggcgcggagcacggcctgctgctgaccgccgcactgcccaccgacgcgggggtctacgtgtgccgcgcccgcaacgcggccggcgaggcctacgcggcggccgccgtcaccgtgctggagccgccggcctccgaccccgagctgcagcccgccgagcgcccgctgccatcgccggggtccggggagggcgccccggtcttcctcacggggcctcgatcccagtgggtgctgcggggggcggaggtggtgctgacgtgccgggcggggggcctccccgagcccacactgtactgggagaaggacgggatggccctggacgaagtgtgggacagcagccacttcgcgctccagccgggccgcgccgaggacggccccggcgcgagcctggcactgcgcatcctggcggctcggctgccggattccggcgtctacgtgtgccacgcccgcaacgcgcacggccacgcgcaggcgggggcgctgctccaggtgcaccagccccccgagagcccgcccgcggaccccgacgaggcccccgcgccggtggtggagccgctcaagtgcgcgcctaagaccttctgggtgaacgagggcaagcacgccaagttccgctgctacgtgatgggcaagcccgagcccgagatcgaatggcactgggagggccgcccgctgctcccggaccgccgccgcctcatgtaccgcgaccgcgacggcggcttcgtgctcaaggtgctttactgccaggccaaggatcgtgggctctacgtctgcgccgcgcgcaactcggcgggccagacgctcagtgccgtgcagctgcacgtgaaaggtacggcggagcccgggacctagggaggggcctcgagtgtcctccgaggccctccgaactccagccctcctcggtgcccagcgctgcccccaagactggaggagaggtggtccgcgggaatattaaaataccaaacccgcccgcctctcactccccagggattcggatttagtaggtctccagggtactcaggaacttcttagcaaactccttaaatgattccgaggcagatggtggaacaccactaaggagtgattgatgtacaaatccggagggccctagaactcttcttccctagtggttttcaacgtctttgttattttactcctccttcccccactgaattcacaaccagagccccaatatatgagacagataaaggagtagtttatgggcgtaaattgctgagtctacgtatataacaggtacttctaaaccatcagtgagaataaggaggctattttattgaatacaggaatttgaattaaaggctgcattcatgagaccaggctctgaaccctgtggggacggcctggctgcatctgtcaccttgagaaacaagtgattcagtggaaagctagacttgagggaggacaaatgtcctgcgtgtttttactattctttgattaaactgctccccacgtttgcaagaagaggaaggtgaaggagagaaggtttatatttcaaagttgaatcaccaacaatatccaataaatggttacattctcataaacagaaaattccaaaggaaaaaaaagcacaccccaaactcaccagaaggtaacgctccccataataggatttcatcacaacgcaaaagagtacaccttcactagttattgtccagttttttctcttagaggaaaaaaagttggtaaattctcctgagtccttcctagcatgcagtcaagcatgttgcccccaggctgcggtggtggcctcactgttacagttcaatgctcacagattcatcaggttggtgctgatctggacctccatcaggaaagaaaagcccggagggaaggctagaggagcttccccgagttgcatacacacacgcacacaaaaacttgcttctccagcagccctagttaatcctctgatttccaacatcctgttttcttttcttttctttttttttttttgaaatacacttttgaaaagggttaaaatagctaggcacagtggctcaccctgtaatcccagcactttgggagactaaggtgggcggatcatttgaggtcaggagttcgagaacagcctggccaacatggcaaaaccccatctctactaaaaatacaaaatcattagccaggcgtggtggcgcctgcctgtaatcccagctctacttgagaggctgaggcaccagaattgcttgaacccaggaggtggaggttgcagtgagccgagattgcgcgactgcactccagcctgggcaacagagcgagactccatctcaaaaaaaaaaagagttaaaatattttaaattctactcagacccttgcagaatatgtgaaatgactggggcggggggagccagggaacagtttggaaatcaccaatctagggcctggaggaccccagggaacagtttggaaatcatcaatctggtccaaccccttctctccctttccccattttacaagtaaggagactgaggcccagaagcattgaaatggacttgcttaaggtgatgtggctagtgtcagggctggatgagaactcaggtcatcttaggaaccaccacttcccttctggtagttttctgtgattccacagtgcccgctggctctgcatgaagagcacacagcatgagctaatgcgcttctaggtatcctactcctagtctgggccttctccagagccctctcttgtctctctctcccctctccacagagccccgcctccggttcacacggcccctgcaggacgtggagggccgtgagcacgggattgccgtgctggaatgtaaagtacccaactcccgcatccccacggcctggttccgtgaggaccagcggctgctgccctgccgcaagtacgagcagatcgaagagggcactgtccggcgcctcatcatccacaggctgaaggcagacgatgatggtatctacctgtgcgagatgcggggccgggtgcgcaccgtggccaacgtcacagtcaaaggtcagctggcccgtggggaagaggctgaggcggaggcaggcaggtgctcagattccaggttgatggattcctgtccgcatctcagggcccatcctgaagcgcctgccccggaagctcgacgtcctggaaggagagaatgctgtgctgctagtggaaactctagaggccggggtcgagggacgctggagccgtgatggggaggagctgccggtcatctgccagagcagctcaggccacatgcatgccctggtccttccaggggtcacccgagaggatgctggcgaggtcacctttagcctgggcaactcccgtaccactacgcttctcagagtaaaatgtgagggcaggaaggcctctggacaggcgaggcagggcaggaggttggccagatgccggagctgggttggtgaagtagatttaaggtggaagggctgtggaggcccaagcaaggccggaacacatccctgccttggtctcaggtgtcaagcacagtcccccaggaccccccatattggcagagatgttcaagggccacaagaacacggtcctgttgacctggaagcctcccgagccagctcccgagaccccattcatctaccggctggagcggcaggaagtgggctctgaagactggattcagtgcttcagcatcgagaaagccggagccgtggaggtgccgggcgactgtgtgccctccgagggtgactaccgcttccgcatctgcacagtcagcggacatggccgtagtccccacgtggtgttccacggttctgctcaccttggtgagttggtcctgccagacccacccatcacttctcctcccttccccagccctcagtgctggtcctctcacaggcttgccatccgccagcctctgccctctgccacaccttctagttctgacagctgcactctgtccctgcctcagtgcccacagctcgcctggtggcaggtctggaggatgtgcaggtatacgacggggaagatgccgtcttctccctcgatctctccaccatcatccagggtacctggttccttaatggggaagagctcaagagtaacgagccggagggccaggtggaacctggggccctgcggtaccgtatagagcagaagggtctgcagcacagactcatcctgcatgccgtcaagcaccaggacagcggtgccctggtcggcttcagctgccccggcgtgcaggactcagctgccctcacaatccaaggttggtgccagtggggacctgagtgggcagaaagggtcaagacacagaagtcctgttggcaaaacgaggcagatgctgtttttatttcttgtatctgggccaggagagcaaggagcatccatgatgggctgaggttgagggctcagaggtccggaaggccaatttcaacccacatgcaacatccagggcaccccttgttatcttgatatatgtcagcatcatatcccaattctctggagtgctttgtggtttacagaatcctgtcagatttgtcatctcatttgaaagacacagaccctggctgctagtccctgcctgcctcctgccatgttgtctaattgttgacattgtcatcgcaactttctacgtgccaggcgcagtcctaatcaccttacatacattaacacaatcttctcaatggccctataagataggttctttttttttttttgagatagagtctcactctgtcgcccaggctggagtgcaatggcgcgatctcggctcactgcaacctccaccttgtgggttcaagagattctcctgcctcagcctcccgagtagctgggactacagacatgcatcaccatgcccggcttgtttttgtattttagtagagatggggcttcgccatgttggccaggcttatctcaaacttaagataggttcttttgacattcccattttatagctggggaaacaggcagatacgttaagtgacttgctcaaagtacggagctaatgagcacaggtgctgaattatgaacccaggcagtcgggctcctgatcacactgtgccacctgttgaaagggggaaggaggggaatgaggcatccctgaggagaacagctggaggtggggcgctcaaagttcaaggatcacgctagcatttgccatgtcaccattgctggagtttgtaagaccaatcaaggaatctgtcggcacccatgcacggggtcttggggtgattcactgtcagcatcgcaggcagaggggccaggtgagacctgaccagcaaccagagcagcatttccaaaatgggatcccagttcactgacatcagaaccacctggagggctggtttataatgcagatttcctggcccctgcgtgcttgggaatccaagaattctgcatttttagcaggctccctaggaattcttatgcacagccaaagcactgctcttaagggttggtgtggaagcctaagcctatttttaaaaaccccaacaacagcagttgttccctctgatgcatccgacactgagcccatgcaccggagggaggggtgcttatctgtacttctccccacacagagagcccggtgcacatcctgagcccccaggacagggtgtcgttgaccttcacaacctcagagcgggtggtgctgacttgtgagctctcaagggtggacttcccggcaacctggtacaaggatgggcagaaggtggaggagagcgagttgctggtggtgaagatggatgggcgcaaacaccgtctgatcctgcctgaggccaaagtccaggacagtggcgagtttgagtgcaggacagaaggggtctcggccttcttcggcgtcactgtccaaggtcaggaagcatgccagcctgggctcctccagccaaggctgattgtggggccgcataagccatgccctctggtctgctgcctacttgggggagtcctttacagggagagtccagtggcccaggggacatgtttcagataactctgcacttgcttttttgtttcttgttttttttggagacaggctctcactctgttgccctggctggagggcagtggcgtgatctcagctcattgcaacctccgcctcctgggttaaagcgattctctcacctcagcctcccaagtagctgggactacaggtgcgcgccaccacgcccagctaatttttttattatttggtagagacggtttcactatgttggttaggtcacccctgacctcaaatgatctgcccgcctcagccttctaaaatgctgggattataggtatgagccaccatgcctggctttctttctttctttctttttttaagatgagggtctcactgttgcccaggctggccttgaactcctgtgctcaaacgatcctccttcctcagcctcctgagcagctgggattataggtgtgtgccacgcacagcgtgcctttgcctcctaaacccctgatacactaacactgtctcgctgtccacatagcctctgctgggttgggtgggggaacaaaatgcaattaaggggaggagagatgggagcaaacactttttggacacttactctgagccaagcactatgctaagtattttcaatatacactctttcatttaatcttcacaactcgatgaggggcaatatatctccagttcacaggcaaagaaatggaggctgtaagaggttatgtgacctccgtcacaccatagcttggcgacacacacaggattgttctgttcctgctgcctcagatagagtcaaacagaagcatcgagtgcagtcaccccgtggttctcacaaggcagtccgtaggctggctgctttaggaagctcctggaagctggttataaatccctggactgtccagagccccagtatccagggtggagcctgaagatcctttcctaacaagtgcagactctctgagagagcagcttgggaaccatggatcccactcatctcactgagtgggagtcctgttttccacactgtggcccctgcctgaatgcacccagtgacagggaacccactacctggagagtggctgtctcactgttgccacttgttggatcatccttcacctcctgcccaccctggggtctttctcgtaatagaggcagtaagcatggccctgatgtgacttgtgacagtgacctcccttcagcctagacaaatggtggctgccactctgtgaactctctgtgcttccttctctctatgtactcaccccgccacctctgatcctttggggacctacagagcactctggtgccacatgatctcctgccatgcctcacctgccatgccctcagcattccttgtcattgtccctgagtccctacacagcaggaccttagccctcctccagtgtcctcttgtgcagaaacagtgtctcctggccacacagctagtttggactcattgtgcgggggtgtctgtgcaatgccatctctgcttcccacccagatcctcccgtgcacatcgtggacccccgagaacatgtgttcgtgcatgccataacttccgagtgtgtcatgctggcctgtgaggtggaccgagaggacgcccctgtgcgttggtacaaggacgggcaggaggtggaggagagtgacttcgtggtgctggagaatgaggggccccatcgccgcctggtgctgcccgccacccagccctcagacgggggcgagtttcagtgcgtcgctggagatgagtgtgcctacttcactgtcaccatcacaggtggggggccaggtgggcctcggaggcacaggggaaggtgcccctgctcccactggaacagctgccacaccttcactcccaggccactgttccccgcccctactgccctccccctggcagatcggacctcctccctttctcctcaagctatggtctagtcacattcaggaaacgtgttatcataagcacattggtcttggctaaggaagcctggctttctctattctcctgaaaacctgtaccaagggaaatctctggggacagtgagtctattgcagggtagggcagagtctagggctggtggtctcaggcactaggggggcaaaaacatttggaggaggagacccccagctcctccccccaaccctcctctcatcagttccacccttcataccgtccctgtcccaacccagagaatgtggagcgtttctacagccgaggctgaccccgtggtcccctctgtgcagctcctgcgcagcagaaagtctgctgtgcttttgtgacagctgtattcgtgtgtctctagctgtgagtaactgtcagctgctgtgagatttggtctcaggaaggtccctcttcaacacatggcctactttccaggggtagggaacacaacggggtcagggaggacggcagggcacacccctcatgcccggcagtggctgtccctgtcctccagacgtctcctcgtggatcgtgtatcccagcggcaaggtgtatgtggcagccgtgcgcctggagcgtgtggtgctgacctgtgagctatgccggccctgggcagaggtgcgctggaccaaggatggagaggaggtggtggagagccccgcgctgctcctgcagaaggaagacactgtccgccgcctggtgctgcccgctgtccagctcgaggactccggcgagtacttgtgtgaaattgacgatgagtcggcctccttcactgtcaccgtcacaggtgtgggcccagcccagctccccggggtcacagagacagccctgagccctggaggagctggccacatagccccagctagcaccccggggaggagggaggtgtgggctgcaggtgcatgtgccagggttcttgctgagatgagcccagggcccctattcaaggaaacaagcccctccccggtgcccaaggccaggcctagctctgctccacagctcatttactgagcactttccctgaatcaggcactgggagtagcaggtgagtaatgcaaatacggtccctattctgaatgagctgccaggctaggtgaggaggcagctgttaaccaggggtcgcaaacgggtagtcctggggccctgcgcattccacacatgtgctttgtttggtctgcagagtcttaccaaagtcaggacagttcaaataacaatccggagttatgcgtcctcttgaaaaagccgaagacccggcggctctggtcccgcttccccccatggcgacgaacagctggcactgagtagcagctgcccccatagtttggggcccacattcctctgtcccacctccctgccattgctttttgcctctccccagactgcttcagccgctaacctaacctggcccctgtgggcatttgagtttgcgacccctgtgttaaaccaataaacatgcaaataaatgtacagtgacacctggtgataagtactgtgagggccaagggcagagggctcaagagcacagagcaggagggtcagggaggcctgggagaaagtcacccttccacacacgggagccagcagcacgcagacacggccgcttccctctaggactgcacagcctggcaggaaagccagacgcattccaggatcttagagcatgggttgttgagggccagtctagggaccctggggctgggagccaccaccctggccaggcaacaggaagtgctttcaaagctgatactggagctaagtggggtggggtgtgggggaatattcaaagcgggagaagcacaggacaactgtggaagtgacggaggttcagtgccggagacctcggggtgacggctcacagcgcccagcccagtgtgtgtctggggctgggggtccatagggctaggcagctctggggggcacagaaccccagtggctgcactggagcccccatcctactgcggccacagtcctgtcctctcccagccctgccctgaaagtcacgccccatgcagagctgtttagggcccccctgctccttgcaccccagctaatgcactctacacacacaagcccacaatgcctaagaggccttctgcacatattctgccctgtcgtaatcatcttcaccctctcccacccagccatggccagacagaatggccacagccacacaaactccagcccatgctcaggctccccacaaacaccagtctcttcacagggaagttcacacaaacaccacctctgctctaggccagagcgaatcaagtctgacaccaagctgaggtcccggggctgggcagccacccggtcccatcactgcaccctgtcctcaccccactgccctcatcaccttccccactcctcaggcagctgcattctggtctctcctggccttgctcggccccagaggaccagcctgcatcccccagaccgttagagcaagcaagcccatgggggaggtgggttgtgtgggtcaaggcaggagtatctgtggaggttggggggctgagtgggagcttgtggttacgtcggtccatgcatgcccntataaaccacccccagcccccacccccccaaccctggcccctgattgggaagctagcagttcctcagcccagccaccagggggccagaggctaatggagcagtagtcgccccaaaacttgaagattctggggggacctgggggcagcaggggtgtgggcaggcctgggctccatgcgctggtcacctctaatattgacatggttccctttctgcagaggagtgaccagaacttggagatgagctcccagaatcagcatttagcacccctggggaactctcagacagacgttgaatgcaaaaagcattactgagttcctgcaagccttggcttggaattcctgccactacctgtggggtctgagcctccctttaacagagggtatttcctcctcctgccccagagtgggtgtagccagctgtgaccttaaggaagttgtataatcactctgtgcccagtcccttatatggaaaatggggacaaaacactaccttcctcttaggattgccgtgagagttaaatgtttcaagtgcttgggactgttcctggaccttaggaagtgtcatatcaatgtttgctattgtagatccaccatcccttatccatggttccaaaattccaaaactctcaaaatcaaaaggctttttgtaagttttgtattccaagtcatttcaggaaaacctgagcttgattgctctgaagctatttctatgctttaattatcctgctgagggtgaatatagctatagctgtatatctataagatatgagtgtcttatagatatatgcttgtatctgtaagattctgtatctttcaatctatcctgcttagggtgaatgtagtatgtgttataccacagacatgttaacgtgaccgatgaagggggaggctcccgtgggggctgaggaaggtatgtgatagatgagaaacgcatcatttctggaatccaaagcattctggattctgtaacaccctctggccccagggatttcagagaacaaactgtggacctattattgcttattattattttacttattattctcattattatgtgggtgatagggacttcatgctgccgaatggctccagagaggctgacggtgagcttgtgacaggctgtggttgtccccaccctgcagaacccccagtgcggatcatataccctcgcgatgaggtgaccttgatcgccgtgaccttggagtgtgtggtgctgatgtgtgaactgtctcgggaggatgcccctgtgcgctggtacaaggatgggctggaagtggaggagagcgaggccctggtgctggagagggatgggccacgctgccgcctggtgctacctgctgctcagcccgaggacgggggcgagtttgtatgtgatgctggagatgactcggccttcttcactgtcactgtcacaggtgggcagtctctgcagcacagagaggaggtagagaggtagggggctaagggacagacacccacctagccccacctcccccaccccatccccagccttccccttatccagcttcctcatgtttggccatcagaatcctgcttagccacatcaggtcaggaccagaggcctggtgggagggtgcccagcaattagaaccattcgttcattcatccattcgttcaatactcattgagcaactactatgtgcttggcactgttttatatgctggggatacagcagtgaaccaataagactaaacctcttgtcttcacagagtttaaactctggtgagggtggacagacaaa

SEQ ID NO: 6045 - DNA, 20565 bp, Homo sapiens
gccctccgcacccccccctgcccccccaccgttcgccgctgcaggcggtcggccgccgcgatgaaggcgagctcgggggatcaggggagccccccgtgcttcctgcgcttcccgcggcctgtgcgggtggtaagtggcgccgaggccgagctcaagtgcgtggtcctgggggagccgccgcctgtagtggtgtgggagaagggcgggcagcagctggcggcctcggaacgcctgagcttcccggcggacggcgcggagcacggcctgctgctgaccgccgcactgcccaccgacgcgggggtctacgtgtgccgcgcccgcaacgcggccggcgaggcctacgcggcggccgccgtcaccgtgctggagccgccggcctccgaccccgagctgcagcccgccgagcgcccgctgccatcgccggggtccggggagggcgccccggtcttcctcacggggcctcgatcccagtgggtgctgcggggggcggaggtggtgctgacgtgccgggcggggggcctccccgagcccacactgtactgggagaaggacgggatggccctggacgaagtgtgggacagcagccacttcgcgctccagccgggccgcgccgaggacggccccggcgcgagcctggcactgcgcatcctggcggctcggctgccggattccggcgtctacgtgtgccacgcccgcaacgcgcacggccacgcgcaggcgggggcgctgctccaggtgcaccagccccccgagagcccgcccgcggaccccgacgaggcccccgcgccggtggtggagccgctcaagtgcgcgcctaagaccttctgggtgaacgagggcaagcacgccaagttccgctgctacgtgatgggcaagcccgagcccgagatcgaatggcactgggagggccgcccgctgctcccggaccgccgccgcctcatgtaccgcgaccgcgacggcggcttcgtgctcaaggtgctttactgccaggccaaggatcgtgggctctacgtctgcgccgcgcgcaactcggcgggccagacgctcagtgccgtgcagctgcacgtgaaaggtacggcggagcccgggacctagggaggggcctcgagtgtcctccgaggccctccgaactccagccctcctcggtgcccagcgctgcccccaagactggaggagaggtggtccgcgggaatattaaaataccaaacccgcccgcctctcactccccagggattcggatttagtaggtctccagggtactcaggaacttcttagcaaactccttaaatgattccgaggcagatggtggaacaccactaaggagtgattgatgtacaaatccggagggccctagaactcttcttccctagtggttttcaacgtctttgttattttactcctccttcccccactgaattcacaaccagagccccaatatatgagacagataaaggagtagtttatgggcgtaaattgctgagtctacgtatataacaggtacttctaaaccatcagtgagaataaggaggctattttattgaatacaggaatttgaattaaaggctgcattcatgagaccaggctctgaaccctgtggggacggcctggctgcatctgtcaccttgagaaacaagtgattcagtggaaagctagacttgagggaggacaaatgtcctgcgtgtttttactattctttgattaaactgctccccacgtttgcaagaagaggaaggtgaaggagagaaggtttatatttcaaagttgaatcaccaacaatatccaataaatggttacattctcataaacagaaaattccaaaggaaaaaaaagcacaccccaaactcaccagaaggtaacgctccccataataggatttcatcacaacgcaaaagagtacaccttcactagttattgtccagttttttctcttagaggaaaaaaagttggtaaattctcctgagtccttcctagcatgcagtcaagcatgttgcccccaggctgcggtggtggcctcactgttacagttcaatgctcacagattcatcaggttggtgctgatctggacctccatcaggaaagaaaagcccggagggaaggctagaggagcttccccgagttgcatacacacacgcacacaaaaacttgcttctccagcagccctagttaatcctctgatttccaacatcctgttttcttttcttttctttttttttttttgaaatacacttttgaaaagggttaaaatagctaggcacagtggctcaccctgtaatcccagcactttgggagactaaggtgggcggatcatttgaggtcaggagttcgagaacagcctggccaacatggcaaaaccccatctctactaaaaatacaaaatcattagccaggcgtggtggcgcctgcctgtaatcccagctctacttgagaggctgaggcaccagaattgcttgaacccaggaggtggaggttgcagtgagccgagattgcgcgactgcactccagcctgggcaacagagcgagactccatctcaaaaaaaaaaagagttaaaatattttaaattctactcagacccttgcagaatatgtgaaatgactggggcggggggagccagggaacagtttggaaatcaccaatctagggcctggaggaccccagggaacagtttggaaatcatcaatctggtccaaccccttctctccctttccccattttacaagtaaggagactgaggcccagaagcattgaaatggacttgcttaaggtgatgtggctagtgtcagggctggatgagaactcaggtcatcttaggaaccaccacttcccttctggtagttttctgtgattccacagtgcccgctggctctgcatgaagagcacacagcatgagctaatgcgcttctaggtatcctactcctagtctgggccttctccagagccctctcttgtctctctctcccctctccacagagccccgcctccggttcacacggcccctgcaggacgtggagggccgtgagcacgggattgccgtgctggaatgtaaagtacccaactcccgcatccccacggcctggttccgtgaggaccagcggctgctgccctgccgcaagtacgagcagatcgaagagggcactgtccggcgcctcatcatccacaggctgaaggcagacgatgatggtatctacctgtgcgagatgcggggccgggtgcgcaccgtggccaacgtcacagtcaaaggtcagctggcccgtggggaagaggctgaggcggaggcaggcaggtgctcagattccaggttgatggattcctgtccgcatctcagggcccatcctgaagcgcctgccccggaagctcgacgtcctggaaggagagaatgctgtgctgctagtggaaactctagaggccggggtcgagggacgctggagccgtgatggggaggagctgccggtcatctgccagagcagctcaggccacatgcatgccctggtccttccaggggtcacccgagaggatgctggcgaggtcacctttagcctgggcaactcccgtaccactacgcttctcagagtaaaatgtgagggcaggaaggcctctggacaggcgaggcagggcaggaggttggccagatgccggagctgggttggtgaagtagatttaaggtggaagggctgtggaggcccaagcaaggccggaacacatccctgccttggtctcaggtgtcaagcacagtcccccaggaccccccatattggcagagatgttcaagggccacaagaacacggtcctgttgacctggaagcctcccgagccagctcccgagaccccattcatctaccggctggagcggcaggaagtgggctctgaagactggattcagtgcttcagcatcgagaaagccggagccgtggaggtgccgggcgactgtgtgccctccgagggtgactaccgcttccgcatctgcacagtcagcggacatggccgtagtccccacgtggtgttccacggttctgctcaccttggtgagttggtcctgccagacccacccatcacttctcctcccttccccagccctcagtgctggtcctctcacaggcttgccatccgccagcctctgccctctgccacaccttctagttctgacagctgcactctgtccctgcctcagtgcccacagctcgcctggtggcaggtctggaggatgtgcaggtatacgacggggaagatgccgtcttctccctcgatctctccaccatcatccagggtacctggttccttaatggggaagagctcaagagtaacgagccggagggccaggtggaacctggggccctgcggtaccgtatagagcagaagggtctgcagcacagactcatcctgcatgccgtcaagcaccaggacagcggtgccctggtcggcttcagctgccccggcgtgcaggactcagctgccctcacaatccaaggttggtgccagtggggacctgagtgggcagaaagggtcaagacacagaagtcctgttggcaaaacgaggcagatgctgtttttatttcttgtatctgggccaggagagcaaggagcatccatgatgggctgaggttgagggctcagaggtccggaaggccaatttcaacccacatgcaacatccagggcaccccttgttatcttgatatatgtcagcatcatatcccaattctctggagtgctttgtggtttacagaatcctgtcagatttgtcatctcatttgaaagacacagaccctggctgctagtccctgcctgcctcctgccatgttgtctaattgttgacattgtcatcgcaactttctacgtgccaggcgcagtcctaatcaccttacatacattaacacaatcttctcaatggccctataagataggttctttttttttttttgagatagagtctcactctgtcgcccaggctggagtgcaatggcgcgatctcggctcactgcaacctccaccttgtgggttcaagagattctcctgcctcagcctcccgagtagctgggactacagacatgcatcaccatgcccggcttgtttttgtattttagtagagatggggcttcgccatgttggccaggcttatctcaaacttaagataggttcttttgacattcccattttatagctggggaaacaggcagatacgttaagtgacttgctcaaagtacggagctaatgagcacaggtgctgaattatgaacccaggcagtcgggctcctgatcacactgtgccacctgttgaaagggggaaggaggggaatgaggcatccctgaggagaacagctggaggtggggcgctcaaagttcaaggatcacgctagcatttgccatgtcaccattgctggagtttgtaagaccaatcaaggaatctgtcggcacccatgcacggggtcttggggtgattcactgtcagcatcgcaggcagaggggccaggtgagacctgaccagcaaccagagcagcatttccaaaatgggatcccagttcactgacatcagaaccacctggagggctggtttataatgcagatttcctggcccctgcgtgcttgggaatccaagaattctgcatttttagcaggctccctaggaattcttatgcacagccaaagcactgctcttaagggttggtgtggaagcctaagcctatttttaaaaaccccaacaacagcagttgttccctctgatgcatccgacactgagcccatgcaccggagggaggggtgcttatctgtacttctccccacacagagagcccggtgcacatcctgagcccccaggacagggtgtcgttgaccttcacaacctcagagcgggtggtgctgacttgtgagctctcaagggtggacttcccggcaacctggtacaaggatgggcagaaggtggaggagagcgagttgctggtggtgaagatggatgggcgcaaacaccgtctgatcctgcctgaggccaaagtccaggacagtggcgagtttgagtgcaggacagaaggggtctcggccttcttcggcgtcactgtccaaggtcaggaagcatgccagcctgggctcctccagccaaggctgattgtggggccgcataagccatgccctctggtctgctgcctacttgggggagtcctttacagggagagtccagtggcccaggggacatgtttcagataactctgcacttgcttttttgtttcttgttttttttggagacaggctctcactctgttgccctggctggagggcagtggcgtgatctcagctcattgcaacctccgcctcctgggttaaagcgattctctcacctcagcctcccaagtagctgggactacaggtgcgcgccaccacgcccagctaatttttttattatttggtagagacggtttcactatgttggttaggtcacccctgacctcaaatgatctgcccgcctcagccttctaaaatgctgggattataggtatgagccaccatgcctggctttctttctttctttctttttttaagatgagggtctcactgttgcccaggctggccttgaactcctgtgctcaaacgatcctccttcctcagcctcctgagcagctgggattataggtgtgtgccacgcacagcgtgcctttgcctcctaaacccctgatacactaacactgtctcgctgtccacatagcctctgctgggttgggtgggggaacaaaatgcaattaaggggaggagagatgggagcaaacactttttggacacttactctgagccaagcactatgctaagtattttcaatatacactctttcatttaatcttcacaactcgatgaggggcaatatatctccagttcacaggcaaagaaatggaggctgtaagaggttatgtgacctccgtcacaccatagcttggcgacacacacaggattgttctgttcctgctgcctcagatagagtcaaacagaagcatcgagtgcagtcaccccgtggttctcacaaggcagtccgtaggctggctgctttaggaagctcctggaagctggttataaatccctggactgtccagagccccagtatccagggtggagcctgaagatcctttcctaacaagtgcagactctctgagagagcagcttgggaaccatggatcccactcatctcactgagtgggagtcctgttttccacactgtggcccctgcctgaatgcacccagtgacagggaacccactacctggagagtggctgtctcactgttgccacttgttggatcatccttcacctcctgcccaccctggggtctttctcgtaatagaggcagtaagcatggccctgatgtgacttgtgacagtgacctcccttcagcctagacaaatggtggctgccactctgtgaactctctgtgcttccttctctctatgtactcaccccgccacctctgatcctttggggacctacagagcactctggtgccacatgatctcctgccatgcctcacctgccatgccctcagcattccttgtcattgtccctgagtccctacacagcaggaccttagccctcctccagtgtcctcttgtgcagaaacagtgtctcctggccacacagctagtttggactcattgtgcgggggtgtctgtgcaatgccatctctgcttcccacccagatcctcccgtgcacatcgtggacccccgagaacatgtgttcgtgcatgccataacttccgagtgtgtcatgctggcctgtgaggtggaccgagaggacgcccctgtgcgttggtacaaggacgggcaggaggtggaggagagtgacttcgtggtgctggagaatgaggggccccatcgccgcctggtgctgcccgccacccagccctcagacgggggcgagtttcagtgcgtcgctggagatgagtgtgcctacttcactgtcaccatcacaggtggggggccaggtgggcctcggaggcacaggggaaggtgcccctgctcccactggaacagctgccacaccttcactcccaggccactgttccccgcccctactgccctccccctggcagatcggacctcctccctttctcctcaagctatggtctagtcacattcaggaaacgtgttatcataagcacattggtcttggctaaggaagcctggctttctctattctcctgaaaacctgtaccaagggaaatctctggggacagtgagtctattgcagggtagggcagagtctagggctggtggtctcaggcactaggggggcaaaaacatcttggaggaggagacccccagctcctccccccaaccctcctctcatcagttccacccttcataccgtccctgtcccaacccagagaatgtggagcgtttctacagccgaggctgaccccgtggtcccctctgtgcagctcctgcgcagcagaaagtctgctgtgcttttgtgacagctgtattcgtgtgtctctagctgtgagtaactgtcagctgctgtgagatttggtctcaggaaggtccctcttcaacacatggcctactttccaggggtagggaacacaacggggtcagggaggacggcagggcacacccctcatgcccggcagtggctgtccctgtcctccagacgtctcctcgtggatcgtgtatcccagcggcaaggtgtatgtggcagccgtgcgcctggagcgtgtggtgctgacctgtgagctatgccggccctgggcagaggtgcgctggaccaaggatggagaggaggtggtggagagccccgcgctgctcctgcagaaggaagacactgtccgccgcctggtgctgcccgctgtccagctcgaggactccggcgagtacttgtgtgaaattgacgatgagtcggcctccttcactgtcaccgtcacaggtgtgggcccagcccagctccccggggtcacagagacagccctgagccctggaggagctggccacatagccccagctagcaccccggggaggagggaggtgtgggctgcaggtgcatgtgccagggttcttgctgagatgagcccagggcccctattcaaggaaacaagcccctccccggtgcccaaggccaggcctagctctgctccacagctcatttactgagcactttccctgaatcaggcactgggagtagcaggtgagtaatgcaaatacggtccctattctgaatgagctgccaggctaggtgaggaggcagctgttaaccaggggtcgcaaacgggtagtcctggggccctgcgcattccacacatgtgctttgtttggtctgcagagtcttaccaaagtcaggacagttcaaataacaatccggagttatgcgtcctcttgaaaaagccgaagacccggcggctctggtcccgcttccccccatggcgacgaacagctggcactgagtagcagctgcccccatagtttggggcccacattcctctgtcccacctccctgccattgctttttgcctctccccagactgcttcagccgctaacctaacctggcccctgtgggcatttgagtttgcgacccctgtgttaaaccaataaacatgcaaataaatgtacagtgacacctggtgataagtactgtgagggccaagggcagagggctcaagagcacagagcaggagggtcagggaggcctgggagaaagtcacccttccacacacgggagccagcagcacgcagacacggccgcttccctctaggactgcacagcctggcaggaaagccagacgcattccaggatcttagagcatgggttgttgagggccagtctagggaccctggggctgggagccaccaccctggccaggcaacaggaagtgctttcaaagctgatactggagctaagtggggtggggtgtgggggaatattcaaagcgggagaagcacaggacaactgtggaagtgacggaggttcagtgccggagacctcggggtgacggctcacagcgcccagcccagtgtgtgtctggggctgggggtccatagggctaggcagctctggggggcacagaaccccagtggctgcactggagcccccatcctactgcggccacagtcctgtcctctcccagccctgccctgaaagtcacgccccatgcagagctgtttagggcccccctgctccttgcaccccagctaatgcactctacacacacaagcccacaatgcctaagaggccttctgcacatattctgccctgtcgtaatcatcttcaccctctcccacccagccatggccagacagaatggccacagccacacaaactccagcccatgctcaggctccccacaaacaccagtctcttcacagggaagttcacacaaacaccacctctgctctaggccagagcgaatcaagtctgacaccaagctgaggtcccggggctgggcagccacccggtcccatcactgcaccctgtcctcaccccactgccctcatcaccttccccactcctcaggcagctgcattctggtctctcctggccttgctcggccccagaggaccagcctgcatcccccagacccttagagcaagcaagcccatgggggaggtgggttgtgtggctcaaggcaggagtctccgtggaggctggggggctgagtgggagcttgtggttacctcggcccatgcatgcccctataaaccacccccagcccccacccccccaaccctggcccctgattgggaagctagcagttcctcagcccagccaccagggggccagaggctaatggagcagtagtcgccccaaaacttgaagattctggggggacctgggggcagcaggggtgtgggcaggcctgggctccatgcgctggtcacctctaatattgacatggttccctttctgcagaggagtgaccagaacttggagatgagctcccagaatcagcatttagcacccctggggaactctcagacagacgttgaatgcaaaaagcattactgagttcctgcaagccttggcttggaattcctgccactacctgtggggtctgagcctccctttaacagagggtatttcctcctcctgccccagagtgggtgtagccagctgtgaccttaaggaagttgtataatcactctgtgcccagtcccttatatggaaaatggggacaaaacactaccttcctcttaggattgccgtgagagttaaatgtttcaagtgcttgggactgttcctggaccttaggaagtgtcatatcaatgtttgctattgtagatccaccatcccttatccatggttccaaaattccaaaactctcaaaatcaaaaggctttttgtaagttttgtattccaagtcatttcaggaaaacctgagcttgattgctctgaagctatttctatgctttaattatcctgctgagggtgaatatagctatagctgtatatctataagatatgagtgtcttatagatatatgcttgtatctgtaagattctgtatctttcaatctatcctgcttagggtgaatgtagtatgtgttataccacagacatgttaacgtgaccgatgaagggggaggctcccgtgggggctgaggaaggtatgtgatagatgagaaacgcatcatttctggaatccaaagcattctggattctgtaacaccctctggccccagggatttcagagaacaaactgtggacctattattgcttattattattttacttattattctcattattatgtgggtgatagggacttcatgctgccgaatggctccagagaggctgacggtgagcttgtgacaggctgtggttgtccccaccctgcagaacccccagtgcggatcatataccctcgcgatgaggtgaccttgatcgccgtgaccttggagtgtgtggtgctgatgtgtgaactgtctcgggaggatgcccctgtgcgctggtacaaggatgggctggaagtggaggagagcgaggccctggtgctggagagggatgggccacgctgccgcctggtgctacctgctgctcagcccgaggacgggggcgagtttgtatgtgatgctggagatgactcggccttcttcactgtcactgtcacaggtgggcagtctctgcagcacagagaggaggtagagaggtagggggctaagggacagacacccacctagccccacctcccccaccccatccccagccttccccttatccagcttcctcatgtttggccatcagaatcctgcttagccacatcaggtcaggaccagaggcctggtgggagggtgcccagcaattagaaccattcgttcattcatccattcgttcaatactcattgagcaactactatgtgcttggcactgttttagatgctggggatacagcagtgaaccaataagactaaacctcttgtcttcacagagtttaaactctggtgagggtggacagacaaaaaataaaagagatggtttgtcaggtggtaacaagtgcatcagaggcaaggcagggaaaggggataggaagtggggatgggtgtggagtggggtgtgtagatctgggtgtgagtctagatctgcctctttctgtctgtgtgaccttaggcaagtcagtttcttctaaagaggcctcaggtcctcagccatgaagtgcagccagcagctgtgcacctcttgagggtggtcagagtaactgattgaaaaaacacagggttcttaggacagtgcctggcacacagcagctgctccatggactgcagctggcactgttctcaagagctgtgctgccagtggggagggctgaggatctggcgggtgaggcaggagaggcctgctggccaagcctatgtgcccctctccatgcccacccaccagccccaccagagaggattgtgcacccggcagcccgctccctggatctgcattttggggctccagggcgcgtggagctgcgctgtgaggtggccccagctgggtctcaggtgcgctggtacaaggacgggctggaagtggaggcatcagatgccctgcagctgggtgccgaggggcccacccgcaccctgaccctgccccacgcccagcctgaggacgccggggagtatgtgtgtgagacccggcatgaggccatcaccttcaatgtcatcctggctggtgggtgctcctggccaacccagggcagggaggcaagggcaagcatgggatgacaccttcctctcttctccagagcctccagtgcagttccttgctctagagacaactccaagcccgctctgtgtggcccctggggagccagtggtgctgagctgtgaactgtcccgggctggcgcccccgtggtctggagccacaatgggaggcccgtgcaggagggcgagggcctagagctccatgccgagggcccccgccgagtcctctgcatccaggctgcaggcccagcccatgcagggctctacacctgccagtctggagcagcccccggagccccaagcctcagcttcaccgtccaggtggctggtgagtacagcctgggcattaagcctgagagtggcaccaagcctgagagtggcaccccaaactctgcgggattcctgcttttccagcatgccttgcccatccctggccccacttctctcagtaccttccccgtcatgcctccccgtgccctcctcaaagccctgagcctctccctcccagtgacctccagctctgactccacagagccccctgtgcgggtggtagctcccgaggcagcccagacgagggttcggagcaccccaggcggggacctagagctggtggtgcacctctccgggccagggggccctgtacgctggtacaaggacggggagcgactggcaagccaggggcgggtgcagctggagcaggccggggccaggcaggtgctgcgggtgcagggggcacggagcggggacgctggggagtacctgtgcgatgcgccccaggacagccgcatcttccttgtcagcgtggaaggtaacagtgtacccctcacaccctgtgggctgtggcaccccaaggaccatctgccactttctagggcccccttactcctccacccccgctttgctgcttctggctccaaccagtgcgtgcatgaccatcacttggataggggctcagggctcctctttccagaaaccctcatgttgagagcagcataaaccagtggttaaaagcaggggctctagagtccacccagccaggttccagcctagattctgtgccccagtagctgtgtgacattggccaagttgttcaacctgtctgagccccggctctgaaaagaggggatagtgcttttcttataggcctgttgtgacaagtaaatgctgtaaatagggtccctggtaattgatattattagggtgccaccaaggtggggtgctaggctaggattatgaggaactgactaaaaggagtggcagggagctggcatcttgtcctttgggccatcggtgtggtcgatacatagtaggtcctcacagaaggtctgttaaatgactggggacgagggcctgcatcctgaggaggggatgaaaaggagagagaagaaaagactcagcccagctcactgccttaccgtgccccttagagccactgctggtgaagctggtctcggagctgacaccactcactgtccacgagggcgatgatgccacgttccggtgtgaagtctccccaccagatgccgatgtcacctggctgcgcaatggggccgtcgtcactccagggccccaggtggagatggcccagaatggttcaagccgcatcttaaccttgcgaggctgccaactgggggatgcagggaccgtgactttgcgggcagggagcacggccacaagtgcccggctccatgttcgaggttaggtcctgatgaggatgagatactctgtgtcccgtgcctgtactcccaaccaggattccagcagccttgcctctccacctagggacagaccagtgggatggagcaaggggccagcctccaaccccaccagactccatggcctccttcttccccaccagagacagagctgctgttcctacggcggttgcaggatgtgcgggcagaggaaggccaggatgtgtgtctcgaagtggagacaggccgagtgggtgcagcgggggccgtgcgctgggtgcgaggtgggcagcccctgccccacgactctcgcctgtccatggcccaggatgggcacatccaccgcctcttcatccatggtgtcatactggccgaccagggcacctacggctgcgagagccaccacgatcgcaccctggccaggctcagcgtgaggcgtgagtgccccgtcctctcttaatgcattacccaccctacaccacagccttttctggctgtcctggagtccctcaggcccccaccaaagtgcccctcatcgctgagaaaagtcacccatggccgtcccagcagcagcttgcccaaagcaaaacttttctttttctaatattttttatttaccttagaagtccatgtggattttgcattccattgcatatttccaagtcggctttgctataaacacaaatattctccagaaagacttgccatgggcatccttcaggcatgtattctagggatacacatacccacttaagtagcagggatggctgtcaaacagcaccccacacctcccacccaaagctggagccctctgtttcctatgtgacctcatgcaagttaacctctttgagccaagtctccttaaaaatggggctgagaccaggtgcagtggctcacgcctataatcctaacactttgggaggccaaggcaggaggatcccttgaggccaggagttcgaggccatcctgggcaacatagcaagaacccatctccacaaaaaaaaataaaaattagccgggcatggtagttactagggaggctgaggcagaaggattgcttgaacccaggaggttgaggctatagtgagctatgatcatgtcacggcattccagcctgggtgacagcaagaccctgtctcaaattttaaaaatggggttgatccccgtctcaagtgtctctgggaacattaactgagataacatgaaaattcttacacagagcttggtgaatggttgtcatttgtgacacatctcttctaacttatttcattcaagaaatcatcacaataaacctgtgtcccaatgttattcaccttgtacagctggggcaactggggtccagagaggtcaggccatttgccaaagatcacatagcacacaaactatgtggtagagcgaggttccattcctagtgtgtctgactccaaattccgtgctccttcaagtgtcacagcacccctcacccagactccacgaccccctaaccacacttctcccccttcctgtgccctcatctcctaaccctgatacagccctccccccgccaaatctgtccaccgtgctcctttcttcctgcaccctggttccgaacttttttggtcaggaccttaggttgggtgttcaggggtgtaggcagggccaagggatgaggattgactgcaacccctgcccagagctggaggcctcatcctccctctctccatctcccccggccagcgaggcagctgagggtgctgcggcctctggaggacgtgaccatcagtgaggggggcagtgccaccttccagctggagctgtcccaggaaggtgtgaccggggagtgggcccggggtggagtacagctgtatccaggacccaagtgtcacatccactcggacggccaccgtcaccgactggtactcaatggcctgggcctggccgactcaggctgtgtctccttcacagcggattccctgcgctgcgcagccagactcattgtgagaggtgtggcctccaggaccacagcctgcctgctgacctgtgtggccctacttaccccaggcatgaatactgacccccaactcgtgtgacccccactgaccatgcctgtctcagtgtggccctcattgacatccctgccagagtgtgatccccctgactcataggccctgtgtggccccagagtcctctgcctgggtgtggcccctgactgcccaaggctcagccaaccactgactctgctaccaagagcatgcctttgccattgtggtcactgctgtctgcccgcctgcacaccaccccactgaccactctaactgtgaccctactggctacactgtctgccgtggctccctctgcccgcctaagtgtgggccccgtgaccactccagtcccttgaatccactgactgcctacgggcgacatcactagcaagtctgcttgagtgtcccccatttttacttccagtcccaggatgttcccactgaccactccactggcatctctgcttgtttccccattgccctctggcccccagcttctcccccactgaccaccttaaagtgtgactcccagttggccactcctaacccattggccctgtggccctgcccacctacatcccccccacccccaccactgacagatccttcttggaccacttgtcccagctcgaaccccactcgctagtgtcctctactgcctgttgtgcccaagtgtatgtcctccttgtccctgcaagatgggtccccatcctgctccctctgcactgtcctccctctcccacccccagaggtcccagtgaccatcgtgcgggggccacacgacctagaggtgaccgagggcgacacagctacgttcgagtgcgagctttcccaagctttggctgatgttacctgggagaaggtcagatcccagccccagccaagcccacttcagtgtaacaccaacgataataatgccccagacagaaacagctaatattccttgagcggatgtgcctggcactgtgctaagatttgcattatatttaatcccttactccaaggacaactctaggaggtaggtcttgtcactgtaatacctatcaggaaactgatgctcagtgggaaaaattacctacccaagggcagacaacaggtagagcccatattcgaatccaggtttgcctaactccagaatccgtgcccatgtcccctgtgatcgatacctggctctgggcttcccgagtgccttggcggccctaaggtccccaaagggtgacgctttttcaaagaggctcctggcacgaccccaaaggcttggggacagtccgaccccagcctgggaacacgagacacgcataaacgcgcctcgagaccgcttggcatcaacaaagggtgcgccgcctgccagggccggggtcgcctgtgcccagccgggctcgccccgaccctctgcaactcccgcccctaggacgggaacgcgcttacgcctagcccgcggctccggctccaggccctcggcacgcgccgccttctccagctgcgacgctgcggcccctcggacgccgggacctacagctgcgcggtggggacggcccgcgccggaccggtccgcctgaccgtgcgcggtgggtacggggtgatgtggaggctgggcactgctttgggcgcgagacttgcggagctgtcttccccggaccctgatgaccgcgcgtgcttctagaaagggggcgtggagggggcgtgaccggtaactgccctctgccccgccccgctcacgccccgggctccgccccagagcgtactgtggcggtactctccgagctgcggtcggtgagcgcccgcgaaggcgacggcgctacgttcgagtgcaccgtgtcggaggtcgagaccacggggcgctgggagctcggaggccgcccgctgagacccggagcccgcgtccgcatccgacaggaaggtctgcccgcctggttaccctttcgggcccctcgctgccccgcccaggctcgaacagatcccgccccaccgggacaagccccgcccctggctccgacgggccccgccccacggccctgtgagcctcgtccctgttctttcccccgcccccagcccctagtcccggacctctaggcttcccgctccgcatccctgttccgcccaccctagcatacactaacggcgtccgaaccgacccaggggcctgctgggcccccaccttcgtccccaacgctcctcagaggtggctccggcctcgctagcgaccccctcacccccagggaagaaacacattctggtgcttagcgagctgcgcgccgaggacgccggtgaagtccgcttccaggcggggcccgcccagtccctggctctactggaagtggagggtaagcacctggggtgggagcgacagagagtgtacatcctgtctctcctgccatgggactgacggacttggggctggccccaagaacgctgcctctctcttcccttccccccgaggggctctcctgggccgggtcacagagggcagcgcgtttccccggcaagaggagactttgggtctgaggtgcaagggaacggactggtggcatagagggctaaggccaggagtggagacttcagggagggaagatgcatctctcctcctgggggccatgcgtgtccctattaacttaagcccccgccccctacccccagcattgcctctccagatgtgccgccacccccctcgcgagaagaccgttctggtgggccgccgggcggtgctggaggtgactgtgtcccgctcggggggccacgtgtgctggctgcgggagggggccgagctgtgcccgggagataagtatgagatgcgcagccacggccccacccacagcctggtcatccatgacgttcgacctgaggaccaaggcacttactgctgccaggccggccaggacagcacccacacacggctgctggtagagggtgagtaaagccaactgggcagcggcaggagggtgagggcgcctgggagctgatgggttaagccacacctatgggaggctttccagaacttggggtggcaacgggtcctgggatacgtaggaggtggggatgggggaggggaggggtagagcacacccagggctggaaagccctggaactgcttggctcagatcagctgctcctggtcagctgttcccacctttctacgccccttcttgccaggcttctcctctctcctgccactggaccatgtttgtctctcttgaacagccctgtttctaccagttcctttcctccccacttcaccaacactgccttcctccagcctgtccctcctccttcctgccctctgcccagcttgcctctgcccatctcagcaagttccatgtcagccttggcagaagcctctttctttcctcttccccataagagacatcccaccttctatcccaaatcccagcattcccttcaggtgccgcgctgtgccccacccctagctgacccccaccttcctgccgccaagacagccctaaccaaggcccagaaagggtagggcagaacctgggggcccagctctttgtgtactggtgtccaggctctgccaggggagaggaaggtggtacccccttctctccccagccccatgtggagtcattcctctgcaggcaactaggagaacctaaccaggccaggcgggtgcccttggacagcttggaaggcgtttgcccttaccctgggcaggggtagagagacaaggaacaataaaagtgctacagctca

SEQ ID NO: 6046 - DNA, 3422 bp, Homo sapiens
tgtcaagtcatatgcactgtgttctttattgagatagaagtggggtggggagggtagcccataggcagagaagtgaaaggagggaggagtgggagccatctatttcccaactctgcctttcctcccagctgatgatggtgggggcgtggccaccagccatgggattaagaaggaagaccccccacccttagatacaagcacagtgctgcgtgagaaggttgggcactgtctcatacttgaaagagtaacctccatccgaggtggtgcggacatgtaggggcctcatggtccctgggagagcagcacagcagggctgggcccctggcagcaaggagtagggctgggctggggtagggggagccccagggactggaagggacaggtttggtgggatgtgcagcccacaaccaccatgacagtagtggaagatgaaactgggagggtacacgatccaccgttcccagcccagctcctggaaggagatgttcagtgctactctgtggcagttggcatgggcagccggttcctccggaggcctctgcagcaggcgcagagcagagggagaccaaggccaggacatcaggggagttgagcgtcgggctctctcccctccactgggtggtctggtccgagtgtgggccaccaggaagggcgtggcctcaggccgggctgagcaggtacagaggggacagcgcagcagcagcaccaggacggggtgggtcagcagagagagagcagaggtggccaggtgcagcacggcccagtgagggggagcatggcccaaagacatgggcacagccacgggtcctcccggtgacagtgccagcaggcctagcaggggctcagagctattggaggctgctgtgccctgcctgtccagcccggtgtggaaccacagctgggctgaagtcacctggcggctgcgtgtatgctgggatggccggaacatgtatctgaagaggccctcctcagcctcctgggccagccctctggcagctgacttgtcctcacagctggcatctgcaggagacagaagaaaagggagagggcagccctgactggcaggacctggcacccctcctcttcagcaggagggatgtggccaccagtcatgagccaatgatgggctgcactctgctccacgccctccgggacgtggggactctcctgagttttgggagagcttctgtaggcttcccattttttaatttcatcatgaagggacttaaaaaaatagaagacattgccaacttctctctgaagtggttttaccaattaacatgcccatcagcagtgtgtaagaggccctctctccacttcaccagcactaagactttgtattagacttcaatgcttactcaccagatagtgtgaaacagtatcctgaatggtgtctacatggatggttgttatattcttttttttttttttttttgagacagagtcttactgtgtcacccaggctggagtgcagtggcatgatcacggctcactgcagcgtctacctcctgggctcaagcaatcctcccacctcagcctcctgagtaactgagaccacaggcgtgtgctaccacacctagctaacttttgtgggttttgtagagacagggtctcgctatgttgcccaggctgatctcaaactcctgagctcaagcaatctgcctgccttcaccttccaaagtgctgggattataggcgtgagccatcacacccagccatattaccattttttttttttttttgagatggagtctagctctgtcgcccaggctggagtgcagtggcgccatctcggctcactgcaacctctgccttccgctccgcctcccacgttcaagcaattctcctgcctcagcttcccgagtagctggtgccaccatgcctggctaattttttgtatttttagtagagacggggttcaccatgttagccaggatagtctcgatctcttgaccttgtgatcctcctgccttggcctcccaaagtgctgggagtacagacgtgagccaccgcgcccggcctatattactctttatatctttggcatgtcaggaatattgtaggataaattctttaaaataattccatttttaaaagacaggtttacaccaaaaaaaaaaaaaaaagaagaaggagggaaaggcaagtgggaaagggaagaaaatggagaacaaggaagagggggaagagaaggaggagggctgtaactcagaacagagggcagtcctttcaagaatgtgtagttagcatcctcacactgacacactcatagactatactaatcatcctggagcagcactcgttcatggactggcaattggaactatactgttacatggcttctctcattatctagtcacaattggtccattttgcagataaggaaactgaggcttagagaggtgaaatgacgttcaacgactaagtggccaggcttggattttgcctgatcccaaagccatccttctccccactgtgctgcgaacggactgaagtgagggaggcaggggtcctctctaagagaaaggtggaccagatgacaagaaagcccacccacaggagggcttatccattcagtcagtggaacaagggggcacatatatgttgagacaggaactcaagagaagatagactagttttccagaaaagtttcccaactaatcttttgcctgtatctctgatagcttctcagtgtcagctacctgggagtaaagaaacagggtttggagcagcgagcagaggcagagataggaggaaaggtggcaggaaggggctcaagcccaaatatctccatctttagagacccccggtctcccagcgcatacttcccaaatgcctcccacctgccatgcactctaggtacagcctctcacttaatcctgagaggtgggcattagcccattttacagatggggagacagaagcataaggaagtttagtaactggcctattgctgcaaagcaactgagtagcaggactaggattcaaacccaggtccgcctggcctgcaaacccatgctgtgccttgctttttctcaaagtcatcctgccggttcccccaccctcgttacctgtggctgggaaaaggatggcttgggagacatcctcctcttcctcgggctcagagcccctgtgtgtgaagccccccagggcatgtcttcggggcagccgcctgactccagggtccccaccttccctggtcaccgcggggggccccaaggcatccaagaacagggccctcaccttggccagaacaagttcccgggccagctccagcccctggcagctgtgcccaccctgtggggtcagcagcaagaagagcagtaggtgcagcaccatagctcacctggccctgctagtggggaactcacaccctgccccgtgccccttctgccagggtctgcccagggcctttccactct

SEQ ID NO: 6047 - DNA, 11649 bp, Homo sapiens
ttcctggcagaggccacacagtttggcacatttataaaagatgtaaaacagagtggggtgggggagacagaagcatgaggtgtctaggttggcatgacagacaccagacatgcaccgtgcatttaaacccctccccaactcccttcccaacccagcccagagcagcacccccccacccccatctcctgccactgccctcaggctggtggctttacagaggccaggggaccagggtgagggatgctacagtttgccccatagacaaggacaagaacccttagatgagtctggctgcgaggcagggcgatgggaaggaaggtagcccctccgcggagacatgcaggaggtggcccatgggaccttggcagggagtgaagaggtggggctgagcctggagaaaccctaccagtcagaaatctaaggcaagggtcccagcgtcccctccaagcctgcccacccccacacacatacacacagacacacgggcaacacactcacaaccctgagcacaccccaatggggttcacaccccgagttcctcaggagcctcttgggagcttgggagggggctttcctctcaggccaagactcgcctgagacaatcctcccttctagtgaccaggccagccctctccaggctggggagagggacagccaaagccaggaggctgagtggcagcctagcaggcctcctcgagctggcagagctggtgactgcagagtctagacagacagatatggctatacccgcactggggggcctgagcaggctgtcagaggtccccgggacccatactcatagtccgcatctgtgggtgaggccatgaaggagctcagggagctcccggtctgccggtctcggaagctctggatatagctctgtgggggagcaaacataggtgtgagtcccaccgcagaatcctgccctaaaagccacctcttcctgaattcccacaagcctgacacttctatagactgccatagacccagagtccacagccctgagaccccaccacataccatatcccacttaaaacccatactcaggaacctttcccccaattcccccaccagctggacccgccaagcccctggtgcatgggctccgatgcatggacaaacagttcatggacaaacaggccttctagatagcaaccagcccgtggggaaagcccagtcctgtttggaaagagtttccacacttccttctcattctggctggatgggctcagggagctcaccggggagaggacgtctccattgaagcgtttgatgggcactggcctgcgccgataagcagggtctggtggcccaggcctgggaggagcccggggacctctgaggggagcccgaggaggtctctttttccgccttttctccttgcgatcttcctgctgccgaatccgcatcagttgcacgcgtcggcgctgccggctgatgaccactgtggtgggatgggtagagaaggagctcagaggacggtgcgccttgtttcccttgagccctccctctctcatcccacctgtggctctaggcttccagattcctcttgtccataaccccttactcccaccctgtcacttcctttcctggtctcctacctctcagaggagacttcccgctgttgttcttttcttccataggtctttatggaaggttgctaggcttccaggtacccccttccaggctgtcatccctctcccaatcacctaggccagccatcatcatctttccactggacaatcacagctgcttcttcactggtttccccctacacttgctccctccaatgctttctacactcggcagcagaatgagcatcccaaaagctaaattagattctatcctcccctactttaaactctccagtggtttaaagtcttattgcccttctaataaaatgtggagtgcttcttatgacccagagggtccacgcaatcactctggctcccacacctcacctcccatactcctgccccacttcctcaagcaagctgagctcattccttctcagggccctcgcccttgctgttccctcttctctagctctttgcatggctggccccttagccttcaagtgcctgcttacatatcacctccttcaagcagccttccctgaccaccctaactctaatagcttccataggtcattctttcacattatcctgcacaatgtctctgtcatatcactctacacaactggaatcatgtttgtttgcatctctgttatctgtctcctgcctgccttgaatccataaggacaggaaccttgtctgtgttatctctgctgtatccctggtgcctggaatggggttggtgcggagccagcactccatatgttgttgtggaatgaatgatggcacctgggtgctatcctcccagaccctgagcaagtcagctctctaccgccatcgaggccttctgctgctgtcccccactccccagtcacttggcccccaacccatccctggccacccactcctctcatgtccaccttggcctgtgcccccttaccttccgtgtgggagtccccctcagctgtcaccctccactgcaccagaacgcccatcaggctgagcaggggccagagtgccagcagggcccagcttcgccagcagagtgggggcacaggagcagcccggagtcgctccaccacgtagcgccccagcagtagcagctcggcgaagtagtcagcggcagtggcgatcagcgcagcaccagtcacggcggtggccagggtggtgagtgggcggggccagcgcagagtgagcagggcacagagcaggccgccccccagcaacagccccagtggaccccacacggagcctggctggtagtagggtgcggagcccagcagggcagcagctgcgagcagcaggccgagcagcagccccaccaggaagaggcccacgctgcgcactagcatggccaccagcccgcagagcagcccgatgcccagagcgatgcccgcgctcgccccagcactcagctgtgtctctagcacccgctctcggtagcagaggaggaagatgaccaccgagccaaacagcaacccagtgagaaagagcactgccttgaagcagcggtaacctggaggggaacaggggctagtgaggggccaagatgagggcaccaggctggagggagcaggtccaaggggtcaaggacatgggatcccaggggaaccagagacaaagacactaagatcagagaattgagggtcactggagtcatgacggcatcagtgatggggccattgaggtcaggggaggttagagagatatggctgttggtggtcaatgggaaggcaaacataaccattgagatcatgagggttgatgtatttgaggatcacaggagttaggataaatcttttgagtcaagagtgaattcgtgcattggtgtctttgggatcataggagtcagagagagaagtcactggggtcccaaggggatcagaaaaagagtcattggggtctttgagaagggattgctcacagagatgaggtatttggaaatcataataaactcgagggccgggcgtggtggcagcactatgggaggccaaggcgggtgaatcatgaggtcaggagtttgagaccagcctgaccaacgcggtgaaaccccgtctctactaaaaatacgaaaaattagccgggcatggtggcacgcacctgtaatcccagctactcaggaggctgaggcaggagaatcgcttgaacccaggaggcagaggttgcagtgcaccaagatcgcaccattgcattccagcctgggtgacagagcgagactcttgtctcaaaaaaaaaaaaaaaaagaaacttgagaggtgagggtcacacaggttcagaaagatgagtctttgggggtcacagggcttcagagataatggcaccactgaaaggttacaaagaggacagagtagcagcattactggggagttgtcccagaaaatgaggtatttgtaggttagggagattgacagaaatagaatcatcgagagtataaaacgatttccaagagagaggaacactgagaccaaaacaaggaattactgggatcacagtatggggaggggtgatcagataatgaggttatgggaattagagaggagtaaccagggatcaagactaggagtaatagagggggtcagagggatggaaggtaatgacataactggaggtgagaggaggtggaggtcactaaggcttacatgaggtcacacagaatcaaagagaaggaaacagtgtttgtggagtttcagaaataaggaggttatagggccattaggcccattagagatacttgaaagggtgagggaagtggagattctgaatagttggaaagatggaaatcagagatgggggtcaaggagtcagagagagccaaaaagaaagataacagaggagagtcacttccaggagtggggggaagtatgagagtccaggaggctcgtgatcagagagaggagtagggcgtggacaagggctcagagtccatgagcctgggcgtagtgacatccaagaggggtaggatgtcaggaagcccaggagagggaatatgaggctgcattgagcaacatgcagagggagtgggtacagatatggagggggtgaggtgatacagaatccttggaggcccagaacgtgtcctgaacccttgcggggggcacttcctcctgcctactcttcagttgttcagcccagagtttgggggaggaatgggagggaccatctggctcccaaccctgtctacccacccattgcagggggaggctgcagaacacaagtcttgcactacctctgctcaacctggaaccccagcccccaagactcatttgcccccactggtcccactcacctacaattctcctggaggctttctttgggcccccagcccatagagctcactctcctctctgaagttctgtaactcttgctgcaaagccactggtcacttactcccattatactgggccactagcccatctggcacctttatgcatattagaaaaaggtgtgcctttctctaggcaaagcagctttgtgccaaggcccagagtttgtcagagcatgagctggactttagcccccacttgcccactcagctgagctcccttatttagtacccgtcctgtacaagtattcacagcagctctgattaccggagcctgccttgtaggctggatggatgtgtgtgaccaccatccagcccactctaatatgtatcccaggtgtaaatgctccagggagtctcctccctgtcagacaatatgccctgtggtaagggaccatgtgtaataaccctgctaagtgttttcagtggctacctagcacagttagccaaacacatcctcacaatagctacaatttattgaatgcttactaattcttacaacactacatgagacaaatattgtgatcattgttcagatgagaaaactgaggctcagacagattaatgtgcccaagacatcacaattagtaactgcaaagctaagtaaattcacactcaggtgtgcctaatccaaaaacctgtttttcctataatctagagtctagacaatctataaatgtgtgggatgaaagaaaaggaagaattattcatgatggtagagggattcagagaagacttgggggcccagaaaaagaactcggggaaacactggggagcccaggtgagggatgagatggggatctcaccgaagaagcagtagacgactccaaacaaacagcacatgatgcagacgagggccggcagtgcctggtacctgcgctccaggggctgttcacaaggtgcaccccagaaggcatcatctggctcagggggcagcagctggaaccgcagtgttgccacagtccccggcatagtgctgggaatagaagggagtcaccctcccaagttaacctgacagagggaaagttggggtcacggaggagtcctgggtccccaccaggatgggggtgggagagggattgggagaactcagcaaggacagtggacaaaggaatagtatccacatttgtgcagctccggaagcatctctggagtggggagcaaagacaaagggaaacaaaagtgcctggctagtggaggctgggatgaagttaaaagagggacgggagtcggggggatgaagggagcgtgctgccagtgagaaggaggcagccaagagattcatctgtgggcggctcaatatgggattgtccaagatttacctgggctggaggcgacctgagcttctgagtgaaagaggctgtgcagaggcccgaggggccggggttgcggggcgccagaggctccaactgactggggtccagggaaagtccgtcgtgcgaggaagggggctgctgggccggagagaatggtgtcggcgcggtggcggcgccgctccacgtccaacaccggctggcactccagtcccgcggcgtccgggaactcgggctgggcctgaggaaggggaaggcgcaggagccggggctcgggccgccccagaaccgcggccccatgccctgagcccgcccgcggcctttggtgctgatggacagctccggcctctgctcctgacgtcactcagggcgcaccatccaggcaggggcgggctgcttctgacgtcacatgggacgcaccaaccacgccgcgggaggcaggggactccgcccccggcgtctccctctcccgcactgaggagggggcacttccgggggtccttcccctttaacctcccccttctcctccctctccggtagcgagagcccgagaccccaccccgggggcggggcccttgcagtgacacgtcggacagctgcggccgcggctgaggctccagtgccgagcgcaagaaccctgcgcagcccagagcagctgctggaggggaatcgaggcgcggctccggggattcggctcgggccgctggctctgctctgcggggagggagcgggcccgcccgcggggcccgagccctccggatccgccccctccccggtcccgccccctcggagactcctctggctgctctgggggttcgccggggccggggacccgcggtccgggcgccatgcgggcatcgctgctgctgtcggtgctgcggcccgcagggcccgtggccgtgggcatctccctgggcttcaccctgagcctgctcagcgtcacctgggtggaggagccgtgcggcccaggcccgccccaacctggagactctgagctgccgccgcgcggcaacaccaacgcggcgcgccggcccaactcggtgcagcccggagcggagcgcgagaagcccggggccggcgaaggcgccggggagaattgggagccgcgcgtcttgccctaccaccctgcacagcccggccaggccgccaaaaaggccgtcaggtagtgatcggctgcgcccgctctaccccctgggcagcggccgggaagcgcgcggggaggtcgcccgggcccgggtcaggctccggaaggaaggggctggcgagccaggaagtctttgggccccgataacttccgatggccctgccttcccgagagccgtggggccagtccgagactttctctgggccctatcccggcctgggctgaacttactggactgtgtcctaaaccggctcgacccgatggcgccccagagatcctactagctccctggctgggctgctggtgttagagaaatgacttatatatagggtgagtgtatagagacaggggaagagaaaggagagaactaggatttacctggatctcttgttcctgagtgggttacaagggccacctcagggtgagatgggggagggaggaatgtacctatctcattaatgtctctgctgatgagttgaaataacttctaagtaacattgggttcaaatgctggttctgcaatttaccttctgccttaccaaaaggtaagttcctagagcccctgagtgcagtttgcccctccccgcaaaaacactcagtacacccctatgccaaacgttcctttatgtcatttatgtgaggcatttgtggcataatggcatatttatatagaaatgagtagatacatggtgtgtccagcgtttggctgggtgctttaaacagatataatcagtcccattttacagatggctcaggttaaataacatgctcaaggacataactactaagtagcgaaccccggagtcagacccacaatatctctctcctatctgggtgggtattgccatctcccaaatgcaaagcactacctgtttaagaccatttcgtttaaatcctcatgacccctgggagagagggtttatttttaacctattcataggtgagagaacagatacagagaagacgtgacctgccagggtctgtgctgaccacctcccccccaccccccgccccgttgtccttttgataagcttgtgccatctcctcccctaggacccgctacatcagcacggagctgggcatcaggcagaggctgctggtggcggtgctgacctctcagaccacgctgcccacgctgggcgtggccgtgaaccgcacgctggggcaccggctggagcgtgtggtgttcctgacgggcgcacggggccgccgggccccacctggcatggcagtggtgacgctaggcgaggagcgacccattggacacctgcacctggcgctgcgccacctgctggagcagcacggcgacgactttgactggttcttcctggtgcctgacaccacctacaccgaggcgcacggcctggcacgcctaactggccacctcagcctggcctccgccgcccacctgtacctgggccggccccaggacttcatcggcggagagcccacccccggccgctactgccacggaggctttggggtgctgctgtcgcgcatgctgctgcaacaactgcgcccccacctggaaggctgccgcaacgacatcgtcagtgcgcgccctgacgagtggctgggtcgctgcattctcgatgccaccggggtgggctgcactggtgaccacgaggtgggatgataagctatcccactgatacctccttgtcatgttcaaatccctctgagaggcaaagggatgttggagatacaggtctgcttttccatgccaattcggacatttattttctatctctgtgacccccagtaaattactaaatatcctgggcttcagtatcttcctttgtgccaatggaaataattattgctcggggttgttacaaggattagaaaaaatcagggagccttgtacataataggcatttgatgttagttattattttagcccttggacagctctgagacaggacgcatgcccatttcgcagatgagctagcggaggcatgctgaaggtcacacagactcacaactggtcaaggtagacttaaaccctcagactgcaagtccacaacaggtcataggctgaggagatgagacacttactatgagacaacggaagacaatgccagctcatcacagatcccttcccttcctctccccagggggtgcactatagccatctggagctgagccctggggagccagtgcaggagggggaccctcatttccgaagtgccctgacagcccaccctgtgcgtgaccctgtgcacatgtaccagctgcacaaagctttcgcccgagctgaactggaacgcacgtaccaggagatccaggagttacaggtatggtctaggtctgggggtggcagagtgacggggacaggatctgagaagtcacagagagcccagagaaatgacaagttagcactagaatcacagaacaaaactacttcccagcccctgcctgtttctacattctctgatgagcctcttggctgtctatgctggggaaatgataggtatgggcagaggttggcaggggatgaggggcccatcctgagtggcacctactgcctacccagtcccccagctgtgtgctgctccctgtaatctgtcccttgctgatggcctgtttctctgatccagtgggagatccagaataccagccatctggccgttgatggggaccaggcagctgcttggcccgtgggtattccagcaccatcccgcccggcctcccgctttgaggtgctgcgctgggactacttcacggagcagcacgctttctcctgcgccgatggctcaccccgctgcccactgcgtggggctgaccgggctgatgtggccgatgttctggggacagctctagaggagctgaaccgccgctaccacccggccttgcggctccagaagcagcagctggtgaatggctaccgacgctttgatccggcccggggtatggaatacacgctggacttgcagctggaggcactgaccccccagggaggccgccggcccctcactcgccgagtgcagctgctccggccgctgagccgcgtggagatcttgcctgtgccctatgtcactgaggcctcacgtctcactgtgctgctgcctctagctgcggctgagcgtgacctggcccctggcttcttggaggcctttgccactgcagcactggagcctggtgatgctgcggcagccctgaccctgctgctactgtatgagccgcgccaggcccagcgcgtggcccatgcagatgtcttcgcacctgtcaaggcccacgtggcagagctggagcggcgtttccccggtgcccgggtgccatggctcagtgtgcagacagccgcaccctcaccactgcgcctcatggatctactctccaagaagcacccgctggacacactgttcctgctggccgggccagacacggtgctcacgcctgacttcctgaaccgctgccgcatgcatgccatctccggctggcaggccttctttcccatgcatttccaagccttccacccagctgtggccccaccacaagggcctgggcccccagagctgggccgtgacactggccgctttgatcgccaggcagccagcgaggcctgcttctacaactccgactatgtggcagcccgtgggcgcctggcggcagcctcagaacaagaagaggagctgctggagagcctggatgtgtacgagctgttcctccacttctccagtctgcatgtgctgcgggcggtggagccggcgctgctgcagcgctaccgggcccagacgtgcagcgcgaggctcagtgaggacctgtaccaccgctgcctccagagcgtgcttgagggcctcggctcccgaacccagctggccatgctactctttgaacaggagcagggcaacagcacctgaccccaccctgtccccgtgggccgtggcatggccacaccccaccccacttctcccccaaaaccagagccacctgccagcctcgctgggcagggctggccgtagccagaccccaagctggcccactggtcccctctctggctctgtgggtccctgggctctggacaagcactgggggacgtgcccccagagccacccacttctcatcccaaacccagtttccctgccccctgacgctgctgattcgggctgtggcctccacgtatttatgcagtacagtctgcctgacgccagccctgcctctgggccctgggggctgggctgtagaagagttgttggggaaggagggagctgaggagggggcatctcccaacttctcccttttggaccctgccgaagctccctgcctttaataaactggccaagtgtggacttgtga

SEQ ID NO: 6048 - DNA, 3422 bp, Homo sapiens; identical to SEQ ID NO: 6046

SEQ ID NO: 6049 - DNA, 431 bp, Homo sapiens
agaccgacgcagatatccaggcattcttcatgagcatagacagtctgtgtaagaagtactccagggaaacctcccaggtgagctgtgaggggtgtggcttggttccgtgatgagccaggtgcactatcccgagaccatggagctatgaggggtgtgcttggttctgtgatgagccaggtgcactatcccgagaccatggagctgtgaggggtgtgcttggttctgtgatgagccaggtgcactatcccgagaccatggagctgtgggagttgtgcttggttctgtgatgagccaggtgcactatcctgagaccgtggagctgtggggggtgtgcttggttccgtgatgagccaggtgcgctatcccgagaccgtggagctgtggggggtgtgcttggttccgtgatgagccaggtgcgctatcccgagacc

SEQ ID NO: 6050 - DNA, 727 bp, Homo sapiens
ttgtttgttttttgagatggagtcttgctctgttgcccaggctggagtgcagtggcatgatctcggctcactgcaacctccacctcccgggttcaagcgattcttctgcctcagcctcccaagtagctgggattacaggcacctgccatcacgcccaggtaacttttgtatttttgatagagatggggtttcaccatgttggccagcctggtcttaaactcctgacctcaagcgatctgcccaccttggcctcccaaagtgctgggatgacaggcgtgacgtcttttctttggactgctcaagcgattctagctcacggcagctccatgcctaggacagctgtcgcctagtgttttgtgctaatgtggtcctggctggggaaagtgagggaaggccagaggtgcagggaggtgaggcagggcatcctgaaggcacttgtgaaggaagttgggagcgtctgcatgagggcttgtaaccaaatgctgtttcttttgcccaggctggagtgcagtggcgtaatctcggctcactgcaagctctgcctcctgggttcatgccattctcctgcctcagcctcctgagtagctgggactacaggtgcccgtcaccacgcccggctaatttttttatatttttagtagagacggggtttcactgtgttagacaggatggtctcgatctcctgaccttgtgatccgcccgcctcggcctcccaaagtgctgagat

SEQ ID NO: 6051 - DNA, 17787 bp, Homo sapiens; identical to SEQ ID NO: 5648

SEQ ID NO: 6052 - DNA, 540 bp, Homo sapiens; identical to SEQ ID NO: 5649

SEQ ID NO: 6053 - DNA, 665 bp, Homo sapiens; identical to SEQ ID NO: 5650

SEQ ID NO: 6054 - DNA, 418 bp, Homo sapiens
cagacattagaattaccaatgtaaactttatatctaaaaccaaaatcaattacaaaggatcattattttccaaagtagatacttttttttagtgctgttcagtttttctgaagcttatctttgttcacaaggattgttagcacttccaccaaatcagtgtttagaaaccttaaataatttaacgtctgacttgccagtacattattagagaaacaattccaagaccaaaacatgttgaataagcaggagatatacaccaatttgattttaaaatggacagctttcctgtctctggctctctctcatgttgccttaaacacacatatgctgaagaaatcatatacagatacttgcatgcatttaataaactatccaataagtggtgcttttaataaattctgaatacaatcaattaaaa

SEQ ID NO: 6055 - DNA, 417 bp, Homo sapiens
cagacattagaattaccaatgtaaactttatatctaaaaccaaaatcaattacaaaggatcattattttccaaagtagatactttttttagtgctgttcagtttttctgaagcttatctttgttcacaaggattgttagcacttccaccaaatcagtgtttagaaaccttaaataatttaacgtctgacttgccagtacattattagagaaacaattccaagaccaaaacatgttgaataagcaggagatatacaccaatttgattttaaaatggacagctttcctgtctctggctctctctcatgttgccttaaacacacatatgctgaagaaatcatatacagatacttgcatgcatttaataaactatccaataagtggtgcttttaataaattctgaatacaatcaattaaaa

SEQ ID NO: 6056 - DNA, 1743 bp, Homo sapiens
aatcatccaatatctgatctcagacgaaaaggaattaaattacaatttgataacagaaagatagccggaaaatcactgaatacttagacattaaataacacatttctttttttttttttttttttttaagacagagtctcactctgtcacccaggctggagtgcagtggcgcgatcttggctcactgcaacctccacctcccaggttcaagctattctcctgcctcagcctcccgagtacctgggactacaggtgcacaccaccacacctggctaatttttgtatttttagtagagacggggtttcaccatgttggccaggctggtcttgaactcctgacctcaggtgatccgcccaccttggcctcccaaagtgctgggattataggtgtgagccacagcacccagcccaaaatgttttcaaaagacatatatgatgaagactgttatccaaaatacacaaagaactcttaaaactcaacaaaaagagaggtgggtatgggtgctggctgaggtcactcagtgctgaccatcctcttctcaaagccatgtctctaagacatcatggtgaaggtgaaggccagagtaaatagatttgggccatattgggcacctggtcaccagggctgcttttaactctagtaaagtggatattgtcaccatcaatgacccttcattgacctcaactacatggtctgcatgttccagtatttctacccatggcaaattccaccacaccgtcaaggctgagaatgggaagcttgtcatcaatggaaatcccatcaccatcttccaggagcaagatcctaccaaaatcaaatggggtgatgctgaagctgagtatgccgtggagtccactggcatcttcatgaccatagagaaggctggggctcacttaatgggggagccaaaagggtcatcatctctaccccctctgctgatgcccccatattcataatgggcatgatccctgagaagtctgaaaacagcctcaagatcatcagcaatgccttctgtaccaccaactgcttaatcccccggccaagcccatccatgacaactttggcattgtggaaggacttgtgaccacaatccatgctgccactcctgcccagaagactcgatggcctctgtgggaaactgtggcatatgtctgtggggctctccagaacatcatccctgcatctactggtgttgccaaggctgtgggcaaggccatccccgagctgaacaggaagctcactagcatggccttccgtgtccttctgcaaacgtgttggttgtggacctgacctgccatctggagaaacctgccaaatatgatgacatcaaaaaggtggtgaagcaggcgtcagagggcccctcaagggcatcttgggctacactgaacaccaggttgtttcctctgactttaacagtgacactcactcttccactttcgatgctggggctgccattgccctcagtgaccactttgtcaagctcatttcctcgtacaacagtgaatttggctacagcaacagggtggtggcccatatggcctccaaggagtaagactgctcgacaaccagccccagtgagagcacaagaggaagaaagagaccttcagcttctgggcagtccctgccatgctcagtcccccaccacactgggaatctcccctcttcacagtttccatgcagaccccacaaagagctctatcttgtcgtgtaccatcaataaagtcctctgtactcaaaaaaaa

SEQ ID NO: 6057 - DNA, 1746 bp, Homo sapiens
aatcatccaatatctgatctcagacgaaaaggaattaaattacaatttgataacagaaagatagccggaaaatcactgaatacttagacattaaataacacatttctttttttttttttttttttttaagacagagtctcactctgtcacccaggctggagtgcagtggcgcgatcttggctcactgcaacctccacctcccaggttcaagctattctcctgcctcagcctcccgagtacctgggactacaggtgcacaccaccacacctggctaatttttgtatttttagtagagacggggtttcaccatgttggccaggctggtcttgaactcctgacctcaggtgatccgcccaccttggcctcccaaagtgctgggattataggtgtgagccacagcacccagcccaaaatgttttcaaaagacatatatgatgaagactgttatccaaaatacacaaagaactcttaaaactcaacaaaaagagaggtgggtatgggtgctggctgaggtcactcagtgctgaccatcctcttctcaaagccatgtctctaagacatcatggtgaaggtgaaggccagagtaaatagatttgggccatattgggcacctggtcaccagggctgcttttaactctagtaaagtggatattgtcaccatcaatgacccttcattgacctcaactacatggtctacatgttccagtatttctacccatgacaaattccaccacaccgtcaaggctgagaatgggaagcttgtcatcaatggaaatcccatcaccatcttccaggagcaagatcctaccaaaatcaaatgggatgatgctgaagctgagtatgccgtggagtccactggcatcttcatgaccatagagaaggctggggctcacttaatgggggagccaaaagggtcatcatctctaccccctctgctgatgcccccatattcataatgggcatgatccctgagaagtctgaaaacagcctcaagatcatcagcaatgccttctgtaccaccaactgcttaatcccccggccaagcccatccatgacaactttggcattgtggaaggacttgtgaccacaatccatgctgccactcctgcccagaagactcgatggcctctgtgggaaactgtggcatatgtctgtggggctctccagaacatcatccctgcatctactggtgttgccaaggctgtgggcaaggccatccccgagctgaacaggaagctcactagcatggccttccgtgtccttctgcaaacgtgttggttgtggacctgacctgccatctggagaaacctgccaaatatgatgacatcaaaaaggtggtgaagcaggggtcagagggccccctcaagggcatcttggggtacactgaacaccaggttgtttcctctgactttaacagtgacactcactcttccacttttcgatgctggggctgccattgccctcagtgaccactttgtcaagctcatttcctcgtacaacagtgaatttggctacagcaacagggtggtggcccatatggcctccaaggagtaagaatgttggacaaccagccccagtgagagcacaagaggaagaaagagaccttcaggttctgggcagtccctgccatggtcagtcccccaccacactcgggaatctcccctcttcacagtttccatgcagaccccacaaagagctctatcttgtcgtgtaccatcaataaagtcctctgtactcaaaaaaaa

SEQ ID NO: 6058 - DNA, 2013 bp, Homo sapiens
ggaagaagctgagatgaaacatgactctcataaacaggaactttattaaactacatgttacataaaagaacatataaatggaccattaaatacattcagtttattttaaacaaatttacatagatacttatttacatttctccattgtattcttaaattatttttccaagcttactaccgataaaaggtaatacaatgatcatctgctcacacagatgcatagagaagttgtccacagggctaagtaaagcaccacttcccaggaaacacagcttattagatcttccagcaacaactcatgctgaaggtgctctcttctgagcagcccttgaggtgaggcttttgctttagagatgctgggggttggttctgaggagctgacccagggcagagatgggtccttgctgattgacctgacttggactcacagaggtggaaagacctgtggagaccatcatcgaggccatggccccacatctgtgatatgggaaacaggcttgggaagaggtggtgacttcccaaagtcacccagcatccatgatagaggaagggcctgggagcttggtacccagggttcctccaagaggtcccgatccctctgctatccacaaatccacaaacttagaatcacttgcatccattttccaccaccatggaccttatgctttgaactgttttgtctacctgattaaatatataacttcttaggcttcttgagatggtgaaaagcagctcaggattcccataagcaactttgtggagccctggaaatacctactcagggctgtttttacaagaggttttgtggtcaggtgctttactatttcagccataacgtttacctttaaaactcagctgacttatggaagctcagcatttccaattcgcttagatgacaggcaacagtctgcagaagggaggttctaacgtcaaccacgtggattccccacaaacgcatcatatttgcctaaatccatctatctaccaatgtcagatctaaaatgaggtttcactaataagtgacctaaaattaaaaaaaacacaaaaaagtttcttaaaaaaaaaattccaagaatttccccgtttcccaattagtctcagaggagtcgtgaaatgggcattgggtagaaaaagtcccatgttttcaactgtttcttttgaataaagcctgattcccccactctgcccccgaacttttcccgatgatatacattcttctgaaagcaatttcatgcttttagtctgctttaaaaaacctgacttggttcttctcagtatttaaaaaccactgtaccaaggaagagatgtccacgttaaaaactattattaagagacagagacaaggagagagagactctctccaggccatgttagaaaagaaggaagtgctgggagcacacaaagagagaagaaaggctgggagacagaatggtttgcacctccctgtaaccagagtgaacacaggtcatagcagccttcactcagttttataacagacacacgaatggaggaacatgggattggaaagacgcacactgtcaaacagccctgatgcctttccactaaaatatggcacttctagattccagagaaatccagcattctaccaggggctgccacccatctgcagggaagcctgccctgcaaccatgaggccctcaaggctcatactccactgctcacaatgcgcgccctgaatacatggaagcatctgatttctgtctgagtccaactttccctcctgttcctagacagactcacacccagagtcatgcacggagaagtgggcaagccagacaatcttcagggagacacagcccatcacaggatacccaaggcttatggggaagtccagttgccagcaacggaccctgtgtgggcaggtgaaactctgaagccagagaacacaggaagataaaaatatcttcatactgaggatatactggccaagtgtggtggctcacacctgtaatcccagcactttgggaggctgaggtgggaggatcacttgag

SEQ ID NO: 6059 - DNA, 175 bp, Homo sapiens
aagtcagtcttcaccgtctgaatcccaggaggcaggagaggacaggcacccatcacttccgtaagggattgaggattctccccagcgtggtccgactggagtccttccgacggagggaggccctttccccagcccctctggccttcagaggggcctccgtgttggcactgggacc

SEQ ID NO: 6060 - DNA, 2013 bp, Homo sapiens; identical to SEQ ID NO: 6058

SEQ ID NO: 6061 - DNA, 175 bp, Homo sapiens; identical to SEQ ID NO: 6059

SEQ ID NO: 6062 - DNA, 856 bp, Homo sapiens
gacatacctcccatcatgacatggtccccaggctggcctgaggatgtcacagcttgaggctgtggtgtgaaaggtggccagcctggttctcttccctgctcaggctgccagagaggtggtaaatggcagaaaggacattccccctcccctccccaggtgacctgctctctttcctgggccctgcccctctccccacatgtatccctcggtctgaattagacattcctgggcacaggctcttgggtgcattgctcagagtcccaggtcctggcctgaccctcaggcccttcacgtgaggtctgtgaggaccaatttgtgggtagttcatcttccctcgattggttaactccttagtttcagaccacagactcaagattggctcttcccagagggcagcagacagtcaccccaaggcaggtgtagggagcccagggaggccaatcagccccctgaagactctggtcccagtcagcctgtggcttgtggcctgtgacctgtgaccttctgccagaattgtcatgcctctgaggccccctcttaccacactttaccagttaaccactgaagcccccaattcccacagcttttccattaaaatgcaaatggtggtggttcaatctaatctgatattgacatattagaaggcaattagggtgtttccttaaacaactcctttccaaggatcagccctgagagcaggttggtgactttgaggagggcagtcctctgtccagattggggtgggagcaagggacagggagcagggcaggggctgaaaggggcactgattcagaccagggaggcaactacacaccaacctgctggctttagaataaaagcaccaactgaactgaga

SEQ ID NO: 6063 - DNA, 856 bp, Homo sapiens; identical to SEQ ID NO: 6062

SEQ ID NO: 6064 - DNA, 317 bp, Homo sapiens
cccaggacagtcttttttttttttttttttgagacggagtctcgctctgtcccccaggctggagtgcagtggcgggatctcggctcactgcaagctccgcctcccgggttcacgccattctcctgcctcagcctcccaagtagctgggactacaggcgcccgccactacgcccggctaattttttgtatttttagtagagacggggtttcaccgttttagccgggatcgtctcgatctcctgacctcgtgatccgcccgcctcggcctcccaaagtgctgggattacaggcgtgagccaccgcgcccggcccaggac

SEQ ID NO: 6065 - DNA, 21913 bp, Homo sapiens
ggatacagcatttaatgaaaaatttatgcttaagaagtaaaaatggcaggcttcctagataattttcgttggccagaatgtgaatgtattgactggagtgagagaagaaatgctgtggcatctgttgtcgcaggtatattggtaagtgagaaagactggttggtgacatgtatcccttaccttttgccctggaaattaatgccggttcctttgaactgagaatggctttccagaactatttatttcactgctgttttgtatagatgattatcagagttctagatactattgccaagcagaatatggtaggccctggattcattttgactttgtaaatgtgtacttaatatcttttcttcagttccagtgataatataattattataggcaatagcatttttaacttactgatacaacatatatgtaagtactttaagatccttaaaggctcagaatttgatgtaacccaaaattattgttgtgacttattgaaggtcagacaacagtgacagtactctgcagataatagtaacaaccttaggctccattggaactgaagccctgcagcggctctagggaagaaataccatctctgtttccccagctgcaacatcaggggagcatcagaggaagagatttgtgaaggaaactattgtttaattttctttccatcattttttaactttaattgaaaatgacaggcataaaacaaaagcagagagaatggtataaagattccatcacctcctttatcccatgtgtctatcatccagcttaaaaaaaaaacaccccaaaatcaggacctatcttggtttataattccatcaaccactctctgtccgcacttttttttttttttttaaagagacgaggtcttgctatgttgtacagctactagagtacagttgctatttacagatgtggtcgtagtatactacagcttcaaattcatggtctcaagcaatcttcctgcctcagtctcccaggtagctgggactacaggttcatactaccattcctggctcccacagcattttttggaagcaaatttctttatctgtttacattttaaaaattcatctctttcaatgtacagttctacacctaaagtccaatagaaaaacaaaatgaaatgaagcagagcaagaactaacgataattgtgaagcagtctgctcactgcagtctccgcctctgacttcccaggttcaagcaattcttgtgcctcagcctcccaagtagctaggattagaggcacatgccaccatgcccagctaatttttgtatttatatttgaatgtttttgagacagagtctcgttctttcgtccaggctggagtgcagtggcgtgatctcagctcattgcagcctccacctcctgggtttaagcgattctcctgcttcagcctcccaagtagctgggattacaggtgcctgccaccatgcccagctaatttttgtacttttagtagaaacgaggtttcaccatgttgaccagactggtctcaaactcctgacctcaggtgatttgcgcgtgttggcctcccaaagtgctgggattacagatgtcagcactgcgcccggccttgtatttttagaagagatgaggttttaccatgatgaccaggcttgaactcctgacctcaagtaatccacctgccttggcctcccaaagtgctgggattacaggcgtgagcctctgtacccagcccatttatatgatctgtaggacaaaaggaatgttaaaaagcaggtattgtgctagcaagagttttaatgtttcagtgacttgggctgtgttttaagttttttacaggctggtggataatgattgatgcagctgtggtgtatcctaagccagaacagttgaaccatgcctttcacacatgtggtgtattttccacattggctttcttcatgtaagtatgaagataattctctattcaaggtgatttttctaaaaatactttcctgttaatgtgcagtgctttcttgaataactttttaatttatttgatagactattttttaacatgatacatacataattcccattttattacgattttttttaaccaagaatgagtgttggatttggtcatatatctttttagcacctataacaattatcttgtgatttttttttttcctcatatttttaaatctggtcagttacatattttgtcagttgcaagatctactttttcgcattttaatacctctgaatatcaggatgcatcttacagtcagtggtatcttagaattataattgataacatttttatttcttgtcagtattaaaaattaatggtgtatcttaaaactgatggctctgagatttcatgaaacatgttacgtttctgcatttttttagtagtaaatcacccgtaggtgttgtagtacactcaacttttaccttgcagtattatttttattttttttaatgtgctacttgactgtgtttgccagtgtttgaggaaaaggcaagattggcctcaaaagagatttgtttgtggcttttgtttttattaaattatttttaagtttatgttacctcatttcataaaaaagcttggaagctttttatggatgtcttttaacaattaaaaaatattaaacattaagattacatcatttccttataccatcaggaggtttttttgtttttgagacagagtcttactctgttgtttgggctggaccacactggtgtgatcttggctcactgcaacctctgcctcccgggttcaagtgattcccttgcctcagcctcccaagtagctgggattacaggtgcctgccactacgcccagctaattttttgtatttttagtagagacggggttccaccatgtttgccaggctggtcttgaactcctgacctcgtgatttgcctgctgtggactctcaaagtgctgggattacaggtgtgagccactgcacctggccaggagttttaaaaaggttatattttggaaaatggaactacttatatccattgtggcttctaaaaaaaggaaattcctgttactaattaatgtaccttgctctaacaaaaatggaaggggaagctgaataaagtgggcatattatacataagctacattttctctgagcttaagaaatggatcatagaaaatcacttgacttttaacacaaagagaaactgtttaactcttgataataatgagaaccttgaagtgggatagcactgagtcattcatgtataaatgtgaaatagacaaagaatccagaaaactggtccctcttgtataatctctggagagaagtgatagaaatctcttaaaataaatgtgttttctgggtgtactttatgaaaataagactaatgtaacatttctatcaactagcatttttattaggttaaaaatatgttaaattattcagatactgattttagttatgaaataatctgttttccgtctaagtgttatataaatatttgagtattttaacagcgaatactgaaattcatttgatgattttgtgccgttctaggataaatgctgtatccaatgctcaggtgagaggtgatagctatgaaagcggctgtttaggaagaacaggtaaagatactttgagctgttaatgggtgttgacaaaacagaaatttgtcaccagaaaaaaagcctctcttgtgagtctttattcaagactggtaatgattatatagaatattttttatttgctttaaaacaaagttttagtgttattcaaatccttaagaaagtaagttattgctagaagttactgtttttgtcatgttacactgcccatgatatagataaaaaatgttgctattcaaatggatcttggactccagtgctaatgatggatttattattatcccaattgttgaccaataatgttacttacaagatggctgactatgattattaacaggaaagtaatgaacacattaggggatcaaacctaggactacagtgtctttacattcacttctgatcacctgagtagccacctacagactgcaacaaaattgttcagtagaaagatgctatttgtctacacataaattagtttttatagtttgaattcatttgaattgttatccaatttttgttttttttttttttttttttgagacggagtttagctcttctttcccaggctggagtgcagtggtgggtttttggctcaccacaacctccaccccctgggttcaagcaattctcctgcctcaccctcccgagagctgggatttcaggcatgcgccaccatgcttggctaattttgaagttttagtagagatggggtttctccatgttgatcacgctggtctcgaactcccgacctcaggtgatccacccaccttggcctcccaaagtgctgggattacaggagtgagccaccgagcccggcccaattgtgttttttaaacatttacggccgggcgcagtggctcacgcctgtaatcccagcactttgggaggctgagacgggtggaacacctaaggtcaggagttcgagaccagccctgccaacatggagaaaccccgtctctactaaaaaatatacaaaattagccaggcgtggtgacacacttctgtagtcccagctacttgggaggctgaggcaagagaatcgcttgaacccgggaggcagaggttgcggtgagccgagatcacctcattggactccagcctgggcaacaagagtgaaactccgtctcaaaaaaaaaaaaaaaatttacattataatatgaagaaattaaggtacagtgggcttacataatgtgtccaaagtcacagagcaagtaagtggtggagccaggattgaacatggacagtctggctccagagcccatgcttttagccactatgctgtgcttgtttcccatctagaaccatttggtcactttgtctggtttggtatcacgtgtatattttttctttttgtcagcttaattgaatataatttaagtataataaaattcactaatgtatttattattttattaattttttttgagacggagtctcactctgccacccaggctggagtgcagtggcatgatcttggctcactgcagcctcaacagcctgggctcgagtgatcctcctgcctcagtttctcaagtagctgtgattataggcacatgctgctgtgcccagctaatttatttattttttgtagagacagggttttaccacgttgttcaggctggtcttgatctcctggcctcaagctatccacctggcctcaagctatcagcctcccaaagtgctgggattgcaggcatgagccaccacgcctggccagaatccaccaatttaaagtgtacaatttgatgagcttgatcaaatgtgtacagttacagttgtgtaactaccactacaatcatgatacagaacatttccattgccccaaaaagttccctcatacccctttttatagttaatactcttcccctcacctcgtggccactactgatctactttctatgatggttgctttgccttttctatgatttcatataaatgggatcatatagtaagtatcatagccttttaaaccaaataaagcagctttgaagagcttagctttcttttctacttgatgttttattttttaaattttgtatttattttgtttgagacggagtctcgctctgtcacccagactggagtacagtggtgcgatctcagctcattgcatcctccgcctcccaggctcaagcaattcttctgcctcagcctcctgagtagctgggattacaggtgcctgccaccacgcctggctagtttttgtatttttggtagaaactgggtttcaccatgttggccaggctgttctcaaactcctgacctcaggtgatgcacccgccttggcctcccaaagtgctgggattacaggcatgaaccaccatgcccagccttctacctgatgctttaaatgctgatgtagattttgtaacctcacttctactggaatccatggagaatttgcgagagggtataatgacaaatgacagatgagcctaagtttaaagtgcacaatatgtgtgtgtatgcgcatgcgatcgcgcttacttttcatcatatcctgtatgtcagcctcagcagtaatgtcaggaatgagggaaggtaaagaaaaaatatatattagcaagtgaagatgttgtatgtagagcatacaataatgtactccatcatttttctttcaagaatattccacggacattgctgtgaattatgttactattatctttttttgagacgaggtcttgctctgtctcccaggctagagtgcagtggcatgatcatgacgcagaaaagccttgaactcctgggctcaagcaatcctcccctctcagcctccagagtagctgggattaccggtgtaagccactgtgcctggccactattatctgttttttataggaagtttcactgtaacttatccaaagttttttagcttaaaagtggaacctgtatttgtctttggtctgtctggttcccaagcccgtcgtttttaccctaagtgattattatattttattctatgatattccctattctattaaaattaacagtacagtttatatttttatattgtgcatatagtgcaatttctgtttagtgtttcaaaaattaaggacaaactgtcttatagtcatgcccaggtattgctactcttaagcttttgtactgcttaagtggtttatctgtaaactatctctatttagttcccggaggaattaataggaaagtatcaaaataataaatatactataaatgaaacagctaaataataaaactataaaaaagaacaggaactaggtagaaaaatgatcattgtacttagaacctgggacaagatggatgcttttaattgttcattaaccttaactcagagcttccttgtagccaaagcaaacaagagaaaatgttacagttttatttttttgctaaacaaaagcatacttctttttcttttttttctctttttgttaatatgccctcagacatacttactttacaagagaaatttttttcttgtttaattctattagaaagtttaatgtatatagccataaataaaggacatgatggaaaataattgtaaggatttttttttttttgaaacagttttgctttgttgcgcaggctagagtgtagtggcatgatcttggctcactgcaacctctgcctctcaggttcaagcaattctcttgcctcagcctcttgaatagctgggactacaggcacccgccaccaagcccgactgatttttttttcttttagtagagatagggttttaccatgttgcccaggctggtctcgaactcctgagctcaggcaattagcccaccttggcctcccaaatttctaggattacaggtgtgagctaccatgccccgcctttaaggatttttaatagttccttttattcacgttagataaaagctatgattgaatataatttagagattgtatttctccaaagaactaaacattactgtttatttctggagatctgcttagtattgtaataaaatttagataatatagagacctatttctctcagatatcagctgttctaaccattatgaactttgatcagtgcttcttccttatctggtgtctaaaatgaatcttttccctggtaacaaaatatttgcaactgaggcaaatttagttttctgttatggaaattggctaggattttatttttacttcagtggagctttcttccccttccagaggttgatggggctgtcagtatacctgtgaacaggatctggtgcaagtattaacctgctttcctaaaaatatgttgaatctactcaagtgtccagatgatttacattatcgagatctagaattttgttcaatacagggttgaagagatacttctgatcttgaagttttcatgaatatgtggtacagattggctgcctcagcaataaaaaagcctgaatatactcctaaagaatggccgttatttgtaccatattgaataatggtgtgattatagaagcttaccattgattaaaaagggacatattagtccttcttcatttgaagtctctcattcctatgtggtgatggctatccagaatacatgtgctacttttaatagagcaattattttggtaatatatacaacagtgtaattttttaattagggcattcgtttctctagtcagtaaaaaggtaactttctttttttccttttccatgtatggtttaacttcttttagtgttttttttttaaatcatcattcatttaacttacagcagatttatataaatatatgactatctttgatatgcataatatatactaggctaacagggctcctagtattatgtattcctaagacgttacagagctgcaaaaatgaacaaaatcataaagcctcttctctacacaggtgctcgagtttggcttttcattggtttcatgttgatgtttgggtcacttattgcttccatgtggattctttttggtgcatatgttacccaaagtaagtatatattcttcttgtattttataggagagattcagatatgtcttttatatttggcttactctaccttgagtacaacttagtataattgttcacttagattgaagatactgctctgtgtgaagatacatgagtttaataaaacttgtcagtgggaacacttagtgcagtaggatagccctggttaggaaatccaagccactgacaaagctggtacctctcagctgtctccagactttctgctttccttctttaccttagacagccaggattttatgctagaggcccatttactgggagttgcagtagaaaaagtgagaaaccagtacaggtgtacactcccttatatacaattctaaaatccacaaaatgctgaaaatcaagttatttataactagtctggcagcaaaacctgacctaaactgacatggagctcactattttctttatcccatttagtgtaagtattcaaatgttttattgtaggaatgaaaatagatatattagattataggatgtgcttgtctatacccagctggcggtgctatgtagtatatgtgctttcccttactgttcttaaacctgaagaattctgaatcccaaaatatatcttgccccagggatttcagataaggggtatagaccccttatctgataatctatggattgccagtagataatctttcgtttcattgacaccttctctctccaacctaatcctgtaatttttttttttttttttgagacggagtctcactctgtcacccaggatggagtgcagtggtgtgatctcggctcactgcaacctccgcctcacaggttcaagtaatttgcctgtctcagcctcccaagtagctgggattacaggtgcacgccaccacacccagctaatttttgtatttttttagtagagacagggtttcaccatgttggccaggctggtctcaaactcctgacctcaagtgatccacccatcttggtctcccaaagtgctgggattacaggtgtgagccaccatgcccagccaatcctgtaatttttaagtcatgggtacagggggagttttttaagggcaagactgaacacatatgtatactcttcatacagaaacagctgatggagtgggatgagctcttattacaccatgctgaaatctgtggctctgccaggtgccatagcttttcattcacagtagtgatgaaaaatagaacccagtttcagaaatgtctctggaagcgtcggaagactgtttcactggccctcttcctttgctcctaagacaggagtcagtttcagagaacgcaatttattcatcctctgactcctctacctctggaatctctttgtcagccttctttgcttaactgtcacatctccttgtcctgactcacagctggtttttgaatacttttgatagtatcatttaagtctcatagtttgatcagtataagatctttggaatacttttgtttttcttttgtctttcacttgatacaaaataagtcagattacaagaggacagtggttggcttaaataacattggtcaccaactgtatctaaaatgtgttttttagttaattaaaaatactactagagcacataattctggtatgaagcatatctgaaggaaaatgcttttttaaagatagcttcattgagatataatttgcataccatataattcagccatttaaaatatgcagttcagtgtttttagtattttcacagaattatgctaccatcatcacaatccaatttgagaatatttttatcactgccatacccattagcagtcactccccattactccttcccctagccctaggcagccactaatgtactttctgtctgtatctatttcatacacatggaatcttataggaaagtgtttttttgagacagaaccttgctctgtcgcccaggctggagtgcagtggcgtgatctcggctcactgcaacctctgcctcccaggttcaagcaattctcctttctcagcctcctaagtagctgggactgcaggtgcatgccaccacgcccagataatttttgtatttttagtagagatggggtttcaccatattggtcaggctggtctcgaattcctgacctcaggtgatccacccacctcagcctcccaaagtgctggtattacaggcgtgagccactgtgcccagccggaaagtgtgttttaaactcattttatccctgactgtaagaagggtgggctgctgtcactgattttcttaaaaggtctccatagttatgttaaagaaaaactttagataaattagcaatttgagcaaaccaagaagaggttcggagagcttcacccagcagcatgagcagctgtaggctgaacacaaggcaaagacaagaaatttttagattgtctgtagctatatgtttgtcttatttgtgcatggtctcatcagttggctgcttgggattggctaaagcttagccgtttgtgattgactaaaattcagctatttattaaaaaatataaccctaggtttcagttcgtttacgtaagttaggttccggggggtgggttggggtcacacaggaactcagagtagggagatagcctcaggttaatggcttcctgcttatttactttagcagttgaagtgatccatgagctttacagtttctatagtgaaaatagggataaattgccatttctgtaaggtatgtagggaaatattgtttgtaaaggctttactattgttgagtgtatttttttttttttttttgagttggagtttcactcttgtcgcccaggctggagtgcaatggcacagtctcggctcactgcaacctctgcctcccgggttcaagcgattctcctgcctcagcttcccgaatagctgggattatagccgcctgccacgactcccagctaattttttgtatttttagtagagacagggtttcaccatgttggccaagctggtcttgaagtcctgatctcagacgatctacccaccttggcctcccaaagtgttgggattacaggcatgaaccaccgctcccagccaattgtatcttaatatttaaagaactagtaaatattgataaatttcttgattgtgaatttcatctttctatttcaacagcattactcatttaaatatacttttcttttttttttaagatggagtttcgccctgtcgtccaggctagagtgcagtggtatagtcttggcccacggcaacctctgcctcctgggttcaagtgattctcctgtctcaatctcccaagtagctgggattacagccatccaccaccacacttggctaattttgtatttttagtagagacagggtttccccatgttggccaggctggtctcaaactcctgacctcaagtgatctacccgcctcggccccccaaagtgctgggattacaagcgtgagtcaccacacccagcctaaatatacttttctatttgtaaagtgaatatgactttatttcagagagcatttctaggccatgtttcaaatcttttactgtacagatttgcttgaactattaatattcatagtaatagctaacttttatatattactttataggctagatactgttctaagcactatatagagtcactcatctaattcttacactctggagtaggtgctattacaatgcccgttttacaggtgaggaaatgaagatatgctgaggttaaataatttgcccaaggtcatacagttagtcattggtatagataggattcaaacctgggtctggctcaaacttggagctcttaaccatgctgctgtattgtttgctatgatatcaagagctcagaattgaaccagtttcttcatcttctccagtattttttaaatcaacatttgtagttttacaaaagttaataatccacaaaaatttaagtagtttccattttgtttcttttcttttcctataaagatagtaaccatttcctccaggatagattcagtgaaagagaatgataaattctaactgtgttatttatatctgacatatttgcatgataaaactcctggattgagagccaggcattgtggtgtgtgcctgtagtcccatccacttgggacgctgaggcaggaggatcacttgagcccaggagtttgggctgtagtttgctatgattgtgcctgtcagtagctgctgcactccagtctgggcaatatagtgaggccccatttctttaaaaacaaacacaaaaaacctcttgaattcatgaaagaaaataaattaacagactgtttaaaagtcaagaatttattttgtatgtttttacgattttgcatttcagtgttggccataggaggcaaaggagcaagttactgcttcctcagcagttttgatgtagctagaaccagcaattactttgactaaaagaaaactttgtaagttcattgacttttatccagagtaagagcagtcctttgctttgggggaattaaattggcattttcttctttcagtttcattatagatgtcttacagttaatgaataatagcagtatgttgtaatatacaaaatgtatcattatgaatggcactgatactttattactgccgtttgcctatataaccgtctaatctgttttactttgtgtatgtagatactgatgtttatccgggactagctgtgttttttcaaaatgcacttatattttttaggtaagttgccttattttttaaccacgcctgtaacatttacagaaatgtcaacttaattaaggcagcatatatatggaacacatataaatcccatggattggttacaatgatagaacttcttttaaaaggtgagaattccactgttacataagagcagagaggccttttaactagaggtcttgctgtgtatcaagactttagctggatcctttatatattttaccctttgaattcacatttaggccaagtgctgtggctcatgcctgtaatcccagcactttgggaggctgaagtgggtggattgcttaagtctaggagtttaagaccagcctgggcaacatggcaaaaccctgtctctataaaaaaatataaaaattatctggttgtggtggtgtacagtgccagctactcaagaggctgaggtgggaggattgcttgagccgaggaggttgaggctgcagtgaggcaaggctgcaccactgtactccagcctgggcaatagagtgagaccaaaataaaataaaataatgcatttaattattttaaatatatgtcaggtgttattcccattttatttatttttatttttatttatttatttattttttgcgagggagtctcaccctgtagcccaagctgccttagtgcagtggaacaatctcggctcactgcagcctccgcctcgggactcaggcgattcccatgcctcagcctcccgagtaggtgggactacaggtgcacaccaccacacccagctaattttttgtattttagtagagacgaggtttcaccatattgcccagagtggtctcgaactcctgagctcagacaatttgcctgcctcggcctcccaaagtgctgggattatagccaccacacccagtgttattcccattttatagatgaggaaataaagtttagggcttgctttaggatgcctagctagtaaatgagaagcctggatttgaatccagactgctgcttccatagcctgtgtcttattaaaaaaccctatcagacccattgtttcacttgactagcctttcgggaaaaaaaaaattaacaacaacaggtaaagtacctttatgaagaaaaaaggaaaaaccagaattaatacctagtggccagccaggtgtggtggctcatgtctgtaatcccagcactttgggaggctgaagtgggtggatcatctgaggtcaggggttcgagaccagcctggccaacatggtgaaaccccatctctaataaaaatacaaacattagtcgggcatggtggtgtgtgcctgtaatcccagctactcggaaggctgaggcaggagaaccacttgaacccaggagacacgggggttggagtgagtcgagatagtgccactgcatttcagcttgggtgacagagcaagactccatatcaaaataataataataattaatacatagtatgcatattatatacaaaacctgttgggaaattctgttttctgaatgcccttttaagaaaagttaaagtaagtggaaaaataaaccaatattaaaagtattttttaggggcagtcttctaaaatatccccaaaatgaagtccattctatgctttttagaatgaatgtcttttttttttttttttttgagctggattctcgctctgttgcccaggctgatgtgcagtggtgcaatctcagctcaatgcaacctctgcctcccaggctcaagcaattccgtgcctcagcctcccaagtagctgggattacaggcatgcactgccacacccagctaatttttgtatttttagtagagatggggttttgccatgttgaccaggccggtctcgaactcctgacctcaagtgatctgcccacctcagcctcccaaagtggtaggattacaggtgtgagccaccatgcccagcctagaatgaatgtcttttaatgtcaacataggatatttaggtatatatttataaaattttatctgcctctgtccccatcccccataaatcattaagtaacttctaagccttgaaaaactttgcttttgtcactggttttaagtaatttgattacgatgtactgtggtctagttttcttgatattccttctgcttggtgtatattgagtttcttggatctataggtttatagttcatcaataaatctagattcttctcagccattatttcttcaagcattttttgtatccactgcaccctccctctgggatttcaattacaggttataataggctgctcgaagttgtctcacagcttgctaatggtcagatttttttttcctgtttgtgtttcagtttggatagtttctattgttacattttaaaattaatctcggctgggcatggtggctcacacctgtaatctcaacactttgggaggccaaggcgggtggatcacttgaggtcaggagttcgagaccagcctggccaacatggtgaaacctcatctctactaaaaatacagacattagctgggcatggtggtgcatgcctggaatcccagctactcggaaggctgaggccagagaatcacttgaacccgggaggctgaggttgcagtgagctgagatcacaccattgctgagcaacagagcgagacttcatctcaaaataaataaatacataaataaataaaattaatctctctattgtcactttgaagaattaaataaattaatctctacttctgcaatgtctaatctatgccatccaatgattttttcatctcagacattgtattttctctctctagaagcttgattgggtctttaaaaatatttctgatgtcttcccttaacatgctcatgccctcttccaccttgaacacacagagtatatttatagctatctcagggtccttgtccaattgtctgtgtcatttctgcatctgcttctactgattttttctgcttctgtttactcttcattttggacctattttcccttatttggtgctttgcatacaatttgttgggactggatctttgctagtcctttaaatgtttttaagctttgttttgggatgcagttaggtgactcagaaacaatcagaaacaatttgatccttttatgtctcttaagctttgttataggcaggaccagagcagctgtagcccaggactgatttgtccccctactaaggcagtcataccctttgagtgtttccactctctgatgcttcatgtattccgaggtttctctactcgacttgtgagagtatgaactctcttccagccttgtggtagctctgggacatgttctttccagtggttctttccttcccttgggtagtttcctcttatgtatagactcttcagtactcagccacagactgaaggagcaccccctgcagatctcctgcgttccctctgtgtggctgtctgtacgctgcatggcaaactctagccatgtggtctccctccactctcagaccaccatgctctacctggatttcgccttgtggccttgacactcctggttttgaaagatgtttggcagtttctgctgtcttatatgtcaaagacatgtgactgacagccttctggggatatggtaagttgttatgaagacattttaggcagtctttagagattaagttcagattcaacactttgtggtggtagatgaatccacttaaatgacaattggatgaacagaaaccttgtatgctcaggtggacatagttgacagctgtgtcatctatgtgctctgcccagaggctggcaagttatcaggcagcctgtatgcttcctgtgtgctggacctgttctaagctctggggtacaacctcttttatttacatctctggtcactcctctgttttccttgcaagctgatcctccactccctgcctactaccttttgaagtctcttaaagctgttcttggccttaagaaactccttgttatttttctgtccctgggtgaactcatgtgtacttaggactccaattattgcttatatgccagtgagtcacagatgtccctttccaggcctaaaccgtatatccagattcctacttcacatcccttcttgggttgctgacatttcaaatccaaaacatttagtatgcccacagctcaactcatggccctggagtgtcccatctctctgctcccgcctccttatcctctctcactttgccgagataattccccctcttcttttggatctcaattcagtcaccactcctcaggaaaacctttcctgacctctctaactaggtctgatccttatgtttcactctgaggatactgtgcacctctcatttatagcatttttttataggtggaattttatatttatttgattgtctccttattagacccttagctccattagggagcaagtttgtctggactcagtctcaccccagcacttaggtgcttggtacgtagccacttttcagtgcacaataattatttgttgaaggaatgaagaattgcagcatggtctgttgtagggtgcttcagttactgtaatttagatatggtaggctcctggagacataaaatggccctaatgcctgtcactatgagaatggtctctctccctttttcttttgatttattgattcatttttttgtttctgagtcatagagaaatgtctcttttccttacaagttgcctgttaataacttcccaggccttaagaaagaatacagttatgcttagccatcgtagttaacagactgctttacaaaataagcaaattaagaccaacactgccatgatgtctaatttaatttttaaaattgataggaatcagtgaagtacctgtcaaagcatattgagaaaatgaattctgtgttgcttgttccatcggttttttcctcatgatttgttttcctatctttctagcactctgatctacaaatttggaagaaccgaagagctatggacctgagatcacttcttaagtcacattttccttttgttatattctgtttgtagataggttttttatctctcagtacacattgccaaatggagtagattgtacattaaatgttttgtttctttacatttttatgttctgagttttgaaatagttttatgaaatttctttatttttcattgcatagactgttaatatgtatataatacaagactatatgaattggataatgagtatcagttttttattcctgagatttagaacttgatctactccctgagccagggttacatcatcttgtcattttagaagtaaccactcttgtctctctggctgggcacggtggctcatgcctgtaatcccagcactttgggaggccgaggcgggccgattgcttgaggtcaagtgtttgagaccagcctggccaacatggcgaaaccccatctactaaaaatacaaaaattagccaggcatggtggtgggtgcctgtaatcccaactacctaggaggctgaggcaggagaatcgcttgaacccggggggcagaggttgtagtgagctgagtttgcgccactgcactctagcctgggggagaaagtgaaactccctctcaaaaaaaagaaggaccactctcagtatctgatttctgaagatgtacaaaaaaatatagcttcatatatctagaatgagcactgagccataaaaggttttcagcaagttgtaacttattttggcctaaaaatgaggtttttttggtaaagaaaaaatatttgttcttatgtattgaagaagtgtacttttatataatgattttttaaatgcccaaaggactagtttgaaagcttcttttaaaaagaattcctctaatatgactttatgtgagaagggataatacatgatcaaataaactcagttttttatggttactgtaaaaagactgtgtaaggcagctcagcaccatgcttctcgtaaaagcagcttcaaatatccactggggttatcttttgacaacttgccattatctgatgttacacaattcaatagcaagcaagtttgagacaatcgcagtttaaaagcatgaaccatttaacaaaaagtggaataattaaagataaagcacttcttcccaaagggaattatcacctagtgaaaaattatgcatttcatctactcagttaccgactgcaagtctctcctcgctctagctctcaagctttgggtgaatattcctgtgaaatatatcttcaacttgaaagttcatactccaatcaaaaactccttttactgagtttgcagtactgtatttgcactgtttgtattcctctgggcccttattgctacttttgctttcctttgttacacagattttgtgttgcactttttctccagaggggtgttgtagagccttggttgtatgaataataccagtggtagtgtccacggctctaatgtaagcccatttggcatcactcctctcctctctcttgagaggatttcttgtgcacagagtatgaagcagttgtggagcgctgtgcctttgtcaagataccatcttgtttgatgacttctttctttgctgttttttcttcaaaatgttagtaagctctgtcatgcttctagcaaattgtaagactaattatttgtttccacctcataacctgttgcaataaatattacttctcatacagtttaatattgttgtttgttggagaaaatgaaccataaaaattgatttgctgttcagttttcaattattcaagtatacccaattaaagatgcagttatgtttataaaataagaagaaatagacttgtaaaatgcttatgtgagggttattgaaggtttccctgaagactgactggaaatggtggctgtttttttctatttctgactctgccatgaatttttttttttttttttaaagacaatatctcactctgttgcctaggctggagtgcagtggtgcaaccacagctcactgcaccttcaaatgctggagctcaggcaatcctcttacctccgctttccaagcagctgggaccacaggtacgtgtcattatgtctggttaattaaaaaaaaatgttttgggaggcctaggtgggcggatcacgaggtcaggagatcgagaccatcctggctaacatggtgaaaccctgtctgtactaaaaatacaaaaaaattagccgggcgtggtgggggtcacctgtagtcccagctacttgggaggctgaggcaagagaatggcgtgaaccttggaggcagagcttgcagtgagccaaaatcgtgccactgcactccagtctgggcaacagagcaagactccatgtcattaaaaaaaaaagttgttttttgtagagacgggggtctcactatgctgttctgggtgaactggtctcaacacatccacctgcctcaacctcacaaagtgctaggttgacaggcatgagccaccacacccaaccctgaatttgttttttagttgtgagcaaatcacttaattttctgtttcttcattttaaaaaaagagataatgtggtcaggcgtgggggctcacgcctgtaatcccagcactttgggaggccgaggcgggcagatcatgaggtcaggagttcgagaccagcctggccaacatactgaaacccggtctgtactaaaaatacaacaaattagccaggcgtggtggtgcacccctgtaatcccagctactcgggaggctgaggcagggagaattgcttgaacccgggaggcagaggttgcagtgagccaagatcgtgcaactgcactccagcttgggtgacaaagcgagactccgtctagaaaataaaaaataaataaaaacataaaagagataatgttagtatccactcttagaaatattatgagttagggcagaatctttggtaatcatctacaaatgcatgtgattcccttactaaggttctcaagctgtcacatagattcagtggtcattgaatctgagtgttttttgtgtgtggaccaatattatcagagtattccattttattgctctaagatccttgtattccttgtgctgttgccactgagtaaaaacccagaggctgtatttttccagtatatatatatatgtgtgtgtgtgtgtgtgtgtgtgtgtgtgtgtgtgtgtatttctatacacaagacgttgacttgacattgatttgcatcaacataatgaaattggaagactgaaagattgatgatatcaaaccatataatttggccccttgagcaagagcccccagagggtttgacatgggtgcattgaactcatgatctctacatttttccccagtggaagggttttcagtcacaacatcaactcaggagtctttgttttcattgttcttttttatggagtcctttttacagtgtcttactcttgcccaggctggaacgccgtggtgtgattatagctcactactgccttgaactccttggctcaagcagtcctcccctcagtctactataggtgtgcaccaccacactcagctctcctttttagatttagttgcacctttcccaagttgcttttagaacactggtggccctgaaggtgtacctgagaaaaggtgtgtgtgtcaaagaagcttgggaaaccctgggctgaactaggtctaaacatgttttttctttctttatttcttgattttttttttttttttcagatggagttttgctcttgtcacccaggctggagtgtagtggtgcaatctcagctcactgcaacctctgtctcccaggttcaaatggttctcgtgcctcagcctcccgagtagctggggttacaggtg

SEQ ID NO: 6066 - DNA, 21913 bp, Homo sapiens; identical to SEQ ID NO: 6065

SEQ ID NO: 6067 - DNA, 21913 bp, Homo sapiens; identical to SEQ ID NO: 6065

SEQ ID NO: 6068 - DNA, 187 bp, Homo sapiens
ttcataatattggccaggctggtctcgaactcctggcctcaagtgatctgcccactttggcctcccaaagtgctggaattacaggcgtgaaccacctcggcacctagctcctagacatggtttaaaaccatagtgctcatttatcaaatagcaagctcccccttgggtcctagcgtagtcctatata

SEQ ID NO: 6069 - DNA, 187 bp, Homo sapiens; identical to SEQ ID NO: 6068

SEQ ID NO: 6070 - DNA, 187 bp, Homo sapiens; identical to SEQ ID NO: 6068

SEQ ID NO: 6071 - DNA, 733 bp, Homo sapiens
atagtaaattatgatccttaaatatttgagagtcaggatgaagcagatctgctgtagacttttcagatgaaattgttcattctcgtaacctccatattttcaggatttttgaagctgttgaccttttcatgttgattattttaaattgtgtgaaatagtataaaaatcattggtgttcattatttgctttgcctgagctcagatcaaaatgtttgaagaaaggaactttatttttgcaagttacgtacagtttttatgcttgagatatttcaacatgttatgtatattggaacttctacagcttgatgcctcctgcttttatagcagtttatggggagcacttgaaagagcgtgtgtacatgtattttttttctaggcaaacattgaatgcaaacgtgtatttttttaatataaatatataactgtccttttcatcccatgttgccgctaagtgatatttcatatgtgtggttatactcataataatgggccttgtaagtcttttcaccattcatgaataataataaatatgtactgctggcatgtaatgcttagttttcttgtatttacttctttttttaaatgtaaggaccaaacttctaaactaattgttcttttgttgctttaatttttaaaaattacattcttctgatgtaacatgtgatacatacaaaagaatatagtttaatatgtattgaaataaaacacaataaaattaacacttgatccagaa

SEQ ID NO: 6072 - DNA, 476 bp, Homo sapiens
gattacaggcacccgccaccacgcccagctgagttttgtatttttagtagaaatgaggttttgtcatgttggctaggctggtctcaaactcctgccctcaagcagtccaccctcctcggcctcccaaagtgctggcactacaggcgtgagccactgcacctggcctggatataatcaagttctttattcttatcttcatgttgagtaggctgaggaaattaactggggaaattttactgatacctgagtcctaccctgggcttactgaaattaattttcggaattgaggcctattaatttatttttaaatgtttcccaggtggttctaaggttgccagtctggcattgcatttggcaaccactaaattaaagcattttgttttatattttaagttactacatttcatatagtgcataattaagtttcggagagtaaaaagtgttgttattctctagccacccgtttttcaactgtg

SEQ ID NO: 6073 - DNA, 3266 bp, Homo sapiens
acaggctattttatctcttgaatcagaacaagtgccattaatgtcagcacactggtgcttaaaaaacaccttcaaagttggagccgttgcaggaaatgattggttaatttgggatattactcggtccaggtactttcttgatatgtttgtctattacacaccaaaaaaaggcagtaactgttgctaaatgatccactcatccatcctgttatacctgagactatgctgtcaagcgaaagcaagtctttcctatagaaggccagagctatggatttttatataacataaacttgctatgcagatttactctgggagtaacccagaaaggacagtgcaaaagaggaaatcttggatctgtgcaatgttgacttatattggaaaataagaaaaacactgaccctgttgcatgatggttccctgcagtggttctaagtcatgtctttattgtatttcatctgttttaactgattgcttgtttaggatttattatagtttaaacacattggacattctgtcctataaagagaaaatactgtttaaaccttaagttcacccacttgagtttaacacataattcataaaatgcaaaatattatcttttagttatcctcaaaataagagacctgttcacatggatcgagcctgcttattcaggtaatgtaccgtttttgttggagctgtgatttgatcttttgacgttgctgtgccaccactgggatacttttgtagttctcttctttgcactggattttttttttcccttattgttttataagtggttattttactttcccgactaagtcattgcctttgtcttttggtctagacaaggagttgatttgttttccaaatattttctttacacagaaaaacatgtaaccactccaccactaccacccctacaatttggaatatattatgcttcctgattgttctgtgctgttaaggatgtaaatgtaggggagcccatgttcatgtatataaactttattattatgtgttaaatgaaactatgctagatagtatatctctgcgacatgtttttgcttttcacttaaattaacatacatgtctaccttgttctttttcataatactccattgtatagtgtggtccttaagccattatttctgctttttaagtaacagcaaaaccaaataagagactaaaaccagtgaaattttattatatgctatattccaataagttgtagaacttagggataccattattaagaataaaatacattcgactaaatgtaagaatgccatggatcgttaagatacatcctgacttcagagatgtgtgaacaaatatacaccaatgagcaagtatccatcaattttaaaatcaatgagctatggtacttataagtctagaggaggtagtctcagggcttgttgagcagctcatcaatgtcatcaagagctcagacccttttcatcctttccctctgctattctcagtgtcaaggattgggacttgttgcttcatagttacaagatggctgtgagagttccaggcataagagaagtactccatttgccgaacaattaaacaaaaaaaaaaaagtaagaggagaagaaggaaccctctccttttatgggagattgctatgactgccttaaactaattatgtctcatcccctagggtaggacacactgtgccctgaacaaagttaggcttcacttagcatggaaaaggggcagaatggctgtcatatttgatgccttatttgtttcttctaccacactattacccctttggttgtgaaaaaaaggattgtatcaaccttgtgtaactttggaacttaatgaaatgacacaaaataagcacttcataaaacttaaagtatgagaaaatatttatggaatattttcctggaattcccggtctaattgtaaagacatattaacaaatttaggattattaaaatcactggttttatacaaaaagaaacctgtttctgtctaggtgctatggctcatacctataatcccagcacttcaggagaccaaggcaggaggatcacttgaggccaggagtttgagacctgcctgggcaagatagcaagaccccattcctacaaaaaacaaaaaattaaaacttacctgggcatcgtagtacacacctgtagtcccagctactagggaggctgaggtgggaagatcacttgagcccaggaatttgaggctacagtgagttttgttagcacttctgcactccagcctgggtgacagagcaagaccctgtctcttaaaaaaaaagaaaaagaaaaagaaaaagcccgcttcagaaaagcttgtcattatccataggatacgatacttaattttacgcttccttatttcttaggtggtccacaattagtgaaaatctgtttgcaaccactggttatcctggcaaaatggcaagccagtttcaaattcatcatttaggacaccctcaggtaatgtggaaatgttttgtaacatacgtgctttttttttttttaatttgtgtttttgacttttccactcatagccccaaatttgtaatttgttgactgaagacatttacgtttgttatctgcttaaattgcaagaaaaggtggttcatttgtttttgttttttgtgtggtttttttttgatgtttacattaccagtgacaacaggtttttttggccagtattcatataagaagctttttattctgttgcttttatattttcttctttatttaaatacattaattttgcttgtttggttggtgtagactgcaaaaatggagtctggactgtaccagttattcatagatggattgtatcccatgtttcagctgcgtatcaataatgtgtatttcacctgtaagggagcatatttttaaattttgtttatgctacaaagataaatcatcaatgcatttcatatttttgaaagtcatttttatttattaattttggggacttactgtgcttctttaattcttcacatattttatagcccatcctcatgggttctgtagccgttggatctggactgtcctggcatcgaactctccctctgtgtgtaattggaggagaccacaagctgttgttttgggtgactgaagtataaagtgttttctgtaccttagattcacaaactttgtatttttagtacatattttgaagaatttctatagtacatattttgaagaatttttatatcaaatataccgtatactttagaaaatgtctcagttgcttttattaaataaaatgttgatggtttgaaaaattatttt

SEQ ID NO: 6074 - DNA, 779 bp, Homo sapiens
acctggccaacatggtgaaaccctatctctactaaaaaaataaaaataaaaaaaattagccaagcatggtttggaagactgaggcaggagaatcacttgaacctggaaggcagaggttacagtgagccaagatcgtgccacttcactgcagcctgggcgacagagcgagactatctcaaaagaaaaaaaatccaaggagaaaaaaatatcttagggtattctggaagtggttgttgagtatatatatgtgtatgtgtactcaatttaatgtaaaaaattgttttcagtttcttaaatatgtgattgattatattgctcaaccctgtttattatacgcagattcctttggacgaggtgttctaacagtcttagaacatctgatatatgggatcaaaagttaccttgaaaaatgacttctagtgtatacctttaacagcctcctttttgtgaattttcactgttcttaccaagaaacttaagtgtttttgagatgggacctgttggcaatggaactgtgttcaccctctcaaagatcattaaaatcaacgttatctaagacagctgtatcacatttttgggatacatcatggtacagtcagaagcatataaaattatggttctgcttgtcagtcacatacagaatccaatacattttgacaaactgcccattcctgcaagttaatgccctttttgaagcttcatttcctcttgtaaagtacagataggaatcattattttgtggagttgctgtaaagattaaataaaggtgaatgaaaata

SEQ ID NO: 6075 - DNA, 515 bp, Homo sapiens
tgacccattttggctaggtgcagaatcttctcttgttctggtccccattctaaattgcaagtctatggattgttcaataattttattagaaatgaacattaaaatgtggcatatattacctcaagagttttaaagggtcccacaaacattgtgtctctcagtgttaacagtggcagaaatgtttcctttactttaaaggtaatattgcaacatgtctcaaatattggacctcagaaatttcactagggtggcagacctttcaatttttgtgaaggctatttctaaccgccttttttattccaactttactgaagtataattgacaaaaagcatatatttaagatgtacaacttgatattttaatatctatatatactgaaataatcaccacaattaaactaattaagatactcatcatctcacatagttaccttttgtgtgagtgtggtgagaacacctaagatcttaacaaacttcaagtatacattacagtattattgactatagtcaaattg

SEQ ID NO: 6076 - DNA, 515 bp, Homo sapiens; identical to SEQ ID NO: 6075

SEQ ID NO: 6077 - DNA, 370 bp, Homo sapiens
tatagtctaagcagattgctacataacattgcttcaataaaatctgcgaatcaagaaatttgttggcagtgtgagagttgacagattatagctttcagttcatgtgctctacactgagaggtcatcttccttttcctttgcaagctcttcaggtgtgacataacactaaagtctgggcttcagctgatcccctaacacactgcacagtcaggtaaccattgaccacactgcattataaattcatagaccaagatgaccagagatctataaaatatttaaaaagtaattgttttataaaaggtctatctaaacaaatattttaatagactatcattaaaaaacaaaataaatatattaatatcatctgtat

SEQ ID NO: 6078 - DNA, 370 bp, Homo sapiens; identical to SEQ ID NO: 6077

SEQ ID NO: 6079 - DNA, 726 bp, Homo sapiens
atgtagtcttgagaatgtagcagagatggtggttcaaaagtattaggaaactgaggaatttaactctgaccgtgatgccaaagaatgatgaaatgagaagatgcaatggagatggggaagctttctgattaacttagtttataatgggacattttcagaagatggatagtaagggtaaaagcaagcatgaataaaacacagagaaagctgagacttgcaaaaaaaaatgaggtagattaaaagaacctttagagtttggtttgatgcagtttggtgactaggaaaggaatcattgccttggactagttgtgtaatgcccagggtttacagagtggaggtaaaaatttttgttgcttttgttttttatattaagaagaaggacgttcaaaccaaaagacagatcctagagcagagaaagaatttgtgaagagaattgtggagccctccctgtctgtgatttttgaggagtgctgggagtcttcgaggggagtttaatgacacccatctttcctgcccgcattctgaatgtttaaggcaaaagaggaaaacatattggggccacagtaccctctttactaccaacaaagcagataatggagaacgtgcgtacttcctaataccgaattccagccttaacccagagtcaccgtaatggggcagtcctctctccaggtttgcttccaagaaggagaaagaggccttaagggccttaagttttatgataaa

SEQ ID NO: 6080 - DNA, 229 bp, Homo sapiens
gaatttaggattcacactgaaggtggtacataagattttatggatccttgaggtatggtgggataagaatccggtttggaacatggtttcaatagcacagaatatatctatactcaccctcctttcccccagactcaaattatagtgagtttgaaattattatatcagagacagtaagttaagtcacactggtgacattttgtgtgaattcagagcagagatgaagagg

SEQ ID NO: 6081 - DNA, 307 bp, Homo sapiens
gaatttttttttttttttttttttttgagacagagtttcgctctgtcgcccaggctagagtgcagtggcgtgatcttggctcactgcaagctccgcctcccgggttcatgccattctcctgcctcagtctcccgagtagctgggactacaggcgcccgccatcactcccggctaatttttttgtatttttagtagagacggggtttcaccgtgttagccaggatggttgcgatctcctcacctcgtgacccacctgcctcggcttcccaaagtgctgggattacaggcgtgagccaccgcgcccggc

SEQ ID NO: 6082 - DNA, 230 bp, Homo sapiens
atcatacaatatctgtccttttgtagtgtggcttatttaatttagcataatgtcttcagggttcatccagattgtagtatgtatcagaatttcattccttttaaaggtggaataatactctctatatatacataccacattttgtttatccattcatccatgtatggacacttggctgcttttatgctttgtctgttgtgaataatgccactgtgaacatttgcgtacaa

SEQ ID NO: 6083 - DNA, 376 bp, Homo sapiens
tgtggagtggtattctattgtgggattaatttgcatttcctaaatgactaataacaactctgatttggaatgcttaatatcctacttttctgactgtagcctcctgtcattccaatgctcattctccttttcccagcacgtttattcttaagctttaagctttatcaagatttctggtcccagcacctcttgtttcattctctcctctagcttcagttccctcttcaatcacttttcttccagtattcttagctttgaatctttgcccagttttgccatctactctgcttctaagtgctatcagaggaaatcatatagttttgttttgacactactatgaatttttttgtaacttttaatttatatttattttcaa

SEQ ID NO: 6084 - DNA, 324 bp, Homo sapiens
agcaacacaggtgcccctgctgaggatcagtgctgatgatgtggagtgtgggcttccaggggcattagggtctgaatgatgcaggcagggtcttctcttgcaggactctgtagtctgggaggcctggtttccatgcccagagtggcccaggcctgccaaaaacccccattacaatgggctctccccgtttcagatgctgacactttgcaaagagttcctggttcaggcagttacctggggtggtcctgaagcctggctgggacatgagaccctatattctagctgtagttttgtctctagatagctaggtgaccatgactaagc

SEQ ID NO: 6085 - DNA, 298 bp, Homo sapiens
cttcttttcttgccaccttgaccatgttgatttctgcttaaagccatcagtggctctttattgtgctcaagaataaagtccaatttcttagcatgatagtcaaggcccttgacacccaggtcccagcctaactgtcctgacccatctccagcattctacatggccactggcattggcacacataggtttggcacataccctctttgtgtggatccaccacttaaagcacctcctccttcttacccactgctcacggatgaactcctacccatctttaaccccacactcaaatgccgcc

SEQ ID NO: 6086 - DNA, 333 bp, Homo sapiens
aatatatagaaagctgttttttttaacagttgcttagcattcctttggattattaaccagtctcataaatgagcgctattgaatagccctgtacctacatcagtttttacatatgcagtatatctttgggatgaattcccagaaatggaattgaaattgctgggtcaaagaggaaataggtgtaattttcttaggtattttcacaagaagtgttaattctaactttctgttttgaaatgatttcaaattttcaaaggagttgcaagaattgtacaaagaactgtatctccttcacccggatgcaccgggtgaattatatgtattatataattg

SEQ ID NO: 6087 - DNA, 333 bp, Homo sapiens; identical to SEQ ID NO: 6086

SEQ ID NO: 6088 - DNA, 326 bp, Homo sapiens
aatatttccatattggccgggcgcggtggctcacgcctgtaatcgcagcactttgggaggccgaggcgggaggatcacgaggtcaggagatcgagaccatcctggctaacacggtgaaaccccgtctgtactaaaaatacaaaaaaaaaaattagccaggcgtgatggcgggcgcctgtagtcccagctactctggaggctgaggcaggagaatggcgtgaacctgggaggcggagcttgcagtgagccgagatcgtgccactgcactccagcctgggcgacagagcaagactgcaactcaaaaaaacaaacaaacaaacaaaaaa

SEQ ID NO: 6089 - DNA, 125 bp, Homo sapiens
gcttgaacctgggaggcggaggttgcagtgagccgagatcgcaccactgcactccagcctgggcgacagagcaagactctgtctcaaaaaaaaaaaaaaaaaaagtaaaaaagttttttaaaaag

SEQ ID NO: 6090 - DNA, 326 bp, Homo sapiens; identical to SEQ ID NO: 6088

SEQ ID NO: 6091 - DNA, 125 bp, Homo sapiens; identical to SEQ ID NO: 6089

SEQ ID NO: 6092 - DNA, 383 bp, Homo sapiens
gcacagtgattgagggacttagcattggaacttagtgttgccctgtgacagcggaaagcaacacagggcagaactcagtcatggggtcattttggtgggatcatgttgacgatcctggcaagaggcaaattgtccatccgagcagtcagaacctgagttccagcaagccctgctaccacagacaaaagtgctttggggctctaaataaacttgaagggcaatctatgctacaggactgcaatttctaagcaagacctggtgctgtgctgggcttagagtcaaaggactttgtcttgtggcttgggttccagcttagccacagtagaacagagcaccagggagaaacctaagattcataactcaaggccctgctcccagatagc

SEQ ID NO: 6093 - DNA, 5797 bp, Homo sapiens
gtgagggcgggccctgcctccagcatgaggcagaggtgggtgggcaggggctaggtggctgggggtgttgtgatcaaggaggaggaatgtgcacagtgacccgggagtgctggatcgggaggatttggagctgggatgtgctgagctgagtttcatttaggatcatcgctctggcttctgtgaggagaaggaatggctgggagggccggggtggatgccactgcagcagtccaggcaggaagccaggatggctgcgagggcatggcagtggggagcagggaagagggccgcttgggctgcttagggtgtgctttggaggaagagctgtgggatgtgctgatgggttggaagttggggctagagaagatgagaatcatagggcccgcctagatgttagaccggagcatctgggggaacggctgttaacagagaaggggagacgggaggaaggtcaaggaagagggagctgtgttctgactgcattgcgcctgttagggtccccgctggggctcaggcggacacctgggctgggggttcatggctgctgacagtgcgcagggtacagctggaatcaaagccaagggccttggctgggcgtggtggcttacgcttgtaatcccagcagtttgggaggccaaggcgggtggatcacaaggtcaggagttcgagaccagcctggccaagatggtgaaaccccgtctctactaaaaatacaaaaattagccgggtgtggtgacaggtgcctgtaatcccagctacttaggaggctgaggcaggaggatcgcttgaacccgggaggtggaggttgcagtgagctgagatcgtgccactgcactccagcctaggcaacaagagcgagactccatctcaaaaaaaaaaaaaaaaaaagccaagggcctggtaataccagctggaaagggatcatagagattggagggaatctggggccctttccctgtttagagaacaggaactgacaaaaagagacagcctaggagaggtcagggggttggaggagaattaatgagagagcaggtaaagatgagactagatctcatccgtttatttatttattttcattgtgtgaaaatatacctcatgtgaaatttacaattttaaccattttattttatttttattgtttattttttttttgagttagagttttgctcttgttgcccaggctggaggacaatgtcatgatcttggctcactgaaacctccacctccagggttccagctattctcctgcctcagcctccctggtagctgggattacaggcacctgccaccactcccagctaattttcatatttttagtagatggggtttcaccacgttggccaggctggtctcgaactcctgaccttaggtgatccgcccgcctcagcctcccaaagtgctgggattacaggtgtgagccaccgcgcctggaccattttaactattttaaactgtaccattcagtggcattaagtactttcacactgttgtgtacccttcgccatcatccatctccagaacttctttcatcttcctaaatccattattttcagtttttcagttacgtcatattgggggctgactgtgtgtcatgcagtgtcccaggtactggggatggggtgtgaagggccggacttcaggatgagggacaactgtagagagcagtaatagatgcctttctctgtgggggcccaggctagaccctcctgagactggctgaggcctgacctcaaaggacagcaaatgctggccctcagattccaggggccgccccttcaggtcattgccaccaggaagagctcacacatgcgcactttccctgctgagcttcagccttctttgtttcctaataatttcctctgattctacttcataggtaattttaacaactgctggggtgaactggaagagttccagttgctaaatttaagagccatggtaatttctcaatgtgtaataggaactgcaatgatataaaaacatatataggtaatttaccacacagggtttagctgtgccagggagattctcttattgttgcactttacagaggcacagagaggggagttaactgctgaaggcctcacccagctggcgggtggcaggactgagtttgaccccagggagcagacttcagaatccttgcccgttaatccctaccctgtggtgccttttaaaaatttttattttattttatattttatggagacgaggtctcactatgtaccctatgctgggctcgaactcttgggatcaagtgatcctctctcaccggcctcccaaagtgctgggattacagacatgagccactgcacccagccacctgggctgccttgatagcagatttgaaacatagcccttttggagaagggtcaaggcggaggtcttaagacagtgattttggacctggcatggtggcttacgcctgtaatcccagcactttgggaggctgaggcaggtggatcacttggaagtcaggagttcaggaccagcctggccaacatggcaaaaccccatctctactaaaaatacaaaaattggccggtgtgttggtgcacgcctgtaatcacagctacttgggaggctgagacacgagaatcacttgaacccaggaggcggaggttgccgtgagcagagatcataccactacactccagcctgggcgacagagtgagactgtctcaaaaaaaaaaacaaaaaaaaaacagtggatttggactctctagagttgtccatgtgtagctgtccgcaccaaccttattggcttgtcctaggaagcatttgcagctaggatgctgctcgccttgagagccacatccttgtgacctgagccgatgccgcctccaccttccagctgctccggagtcacagtggcccacccgttatacatttgacttggcagttctcccgagcccgccccaacagccatgacccacaggggtagatttttttttttcactgattctattaagcactttttacttttagttttttagagacagggtctttctatgttgcccaggctggtctcaaactactagtctcaagcaatcctcccatctcagctttccaaagtgttgggattacaggcatgagccaccatgccctgtctgttaggcatttttgagcataaataatacattcacagccacgtttggtggatcatgcctgtattcccagctacttgtaaggctgaggtgggaggatcccttgagcccaggaggttgaagctgcagtgagctgtgatcgcaccactgcaactccacttgggcaacagagcaagactcttgtctcgaaaaaaaaaaattaagaatacattcacatggttcaaaatgcaaaagatacaaaagtctctacagtgaaaagtatcttcccatgtctcctagccccctagtcccttcctcagagactacaaatgttaaccaatttcttgtgtaatctttccagtgagatgtatacacacacacacacacacacagcagaggagcatataggatccatgtacaagcatacacgtgtcttagtagtctaatttatttaaccagttcctttttgaaggaaattcaggttgtttcctacctcgtgctattacaagtagtcctagaatgaacaattttccttacacatgggatcaattcaggggtgacttcgaagaacacattattacattacattatttaagtgcaaatactggtgatgagtccgttgcagatctgaactagcctctcctccaagatgattggcatccttcaggtgatttatttacacagtgaccaccccatttcataaaggaatgaagagcagttggactcttccagctggagaccgctggaggagttgggtcaggggatgctgagagctaacgttgactaccacctgtgtgccaggaagtactaaatcaacgcttggctaagttgttggacttgtcgaatcctgagggcaacatcataaaaggcagggtcttcctattctcatcccataaacggatgaggagatggtggtgcagcgagcccagggctcatgctgaatggcagaaccagacctgcagcagcccagcagagtgattctgtgtggatggtcgccctgagacaaggccacctctggacacatcccttcctctggtagcccacatcagtggatactaaagccagatgcaaactagcagtatctgtggcaagtggccaaggcctgggccagcctcagcccccctttctccagtgcccaagccccctgctgctgagatgagccaagagttgagctgcagccacctccacccctcctttgggcatctgacctgagttagtttggcaagtgctgcaactatagacccaactttgaaggcctgtcggggtcctgcagcagaggagacatttccctttgcaaaatcagggctaaatctctctctctctctctctttttttttttgtaatagactttatttttagaacagctttatttattcatttatagataggggcttgctctgtcacccagactggagtgcagtggtatgatcccagctcactgtagcctccacctaccaggctcaagtgatcctattgcctcagcctcctgagtacctggggctacgggcacctgccagccatgctcagctaattttttaatttaaatttttttttttttttgagatggagtgtcactctctcgcccaggctggagtgcagtggggtgatctcggctcactgtagcctgcgtctgccgggttcaagcaattctcctgcctcagcctcctgcgtggctgggattacaggcatgcgccaccatgcctggctaattttttatttttagtagatatggggtttcaccgtgttaaccaggctggtctcgaattcctgacctcaggcgatttgctcacttcggcctcccaaagtgctgggattacaggcgtgagccaccatgcccggccagttgttttttttcttgtagagacgaggtctcactatattgccctagctggtctcagattcctgagctcaagcgatgtactcacctcagcctcccaaaatgttgggattacaggcatgagccaccacacctggccttagaatagtttaagagttgcagaaaaaattgagaagatagtgcagagagctgctgtataccccacgctcagttactcctaatattaatgacatctgacattggggtggtacgtttgtcacaattaatgaaataatatcgatccattagtattaactaaagtctatagtttattcagattgccttagttttgcctaatgtattttactgttccaggatctcatatgacattatgttatcaaatttgataacattctggctccagacatttatattgacaagtaaggagttgtcgtgtctccttaggttcctcttggctagggcagttgctcagactttctttggttttgatgcctactttgatagtttcgaagagttctggtcagacatattatgggatgcccctcagctgggatttgtctgatatttttctcatgattacactggagttacgtgttttttggaggaagacctcaaaggggaagtgtcatttcatcacatatcaaggggacacactgaccacatgattcaccactgtttttgttcatcctgatcacctgtttgtcaagtttctccactttgtaaagctactcttctttctccctttacaccttgtcctctttggaaggaattcactgcacagcctgcatgtaaggagttggggggtttatgctccatctccttgggggcaagggatttacataaattatttggaattcttctgcaaaggaaa

SEQ ID NO: 6094 - DNA, 7809 bp, Homo sapiens
gcctcccgaatgatcaccaacagcctgaaccatgactctccacccagcacaccccccaggcgcccggacaccagcacctccaagatctcggtcactgtgtccaacaagatggcagcaaagagtgccaaggccactggtgagggaacatgggcaggtggtaggaggagctggaggggaacgtgggttggtaggaggtgttgggggtcatgcttccaatattgtaaggtgctttgaaggccacaaggtatacaaaacatttgaacctgaatcacctctgtaaacttggtcaaggtgccatacgtctgtgggcctcactttcttcatctgtagcatggggggtggcgataccccacccaggaggatggacagaagcacctgagttggtgtgttgaggcatgtgtgcattgccttctcactcaggggttcacgctttgtgaacaggtcttcaccgagccccctacttgtgcacagctctgtgcttgatgcctggggtcataggttaagaacctcttgcctcctcttagcagccaagggatccatccttgaaaaccttcagtctgatcctgtaaccccctgggctgtaactctccggggctccccattattccagtaataaaggccatcttccccacatggtctgtagggccctgcatcatgtagattcatctcttgcatcgccccactttgcatgctcgcttgctcccctccagcctccttcccatcatggggcctttgctcctggtgaccccttggcctgagcactcttccttcccagactgctccatgttggcctctgtcctcctccaggtctcagcttgagagctgggaatgggcctgcagtcactgggctcccaggccttcccatccaccatgctcttaagcctttgctggacccatccccacagcaatgacctcatggtgtcataaggcaaatgtggaaactgaggcccagggcgcttcatgtttctgacacccactcctatcatgccccgtccacctccatcacaaagtctcccctttgtcctgcaggtttggaagtgcctcaccctcttctggcctttgatttgtgtgccacaagcaaaaaagttaaaatcaggctgggcatggtggctcacgcctataatcccagcactttgggaggctgaggcaggaggatcacttgagcccaggagctcaagaccaacctgcacaagatgatgaaaccctgtctctacatttaaaaaaaaaaaaaaaaaggctgggcggggtggctcacacctgtaatcccagaactttgggaggccgaggtgggcggatcacctgaggtcaggagttcaagagcagcctgaccaacatggtgaaaccccatgtctaccaaaaatacaaaaattagctgggcgtggtggctcatgcctgtaatcccagctacttgggaggctgaggcaggagaatcgattgaacctaggaggcagaggttgtagtgagctgagatcgtgccattgcactccagactgggcaacaagaacaaaaactcagtctcaaaaaaaaaaaaaaaaaaaaaagttaaaatcagtgtaacaaagtattgcgaagatggcgagcctgggagcaactggctcttttaacccttaacacgtttgaggggattcattttttaaattgaggtgtaacttatgcacaatccaccactcataagtgtacacagctcaagtgcttgttgacaagtgagtgcagccataaagcactgcctgcttggagctctagaacctttccaccacccagcaggttccccatccgaggggatgtgggctgggctgggccagaagcctgcttggaatagggacagagccacagaaagcctgggaggcctgccacagcctggggattctgagcaccttctgtgacctcgtgtaacagagacctgagtttctctgtggttcggtcagtggtgatgtgggtggttgggaaggtaagggattccagtcatgaatgtgtggagataaaggacacctagtgtccagcttccatcctgggagaacgttctgtctcagagagtgctgatacccctgctttcttcccccagcagccctggcccgccgggaggaggagagcctggctgttcctgccaagcggcgccgggtcactgctgagatggaggggaagtacgtcatcaacatgcccaaaggcaccacaccccgcacccgcaagatcctggagcagcagcaggctgcaaaaggtactggcccatcaggggcatgcttccctgcggggtccatgtccctccctctgcatcacacagggcccgtcatatcctacagacggtggctgagaagcaggttctaacggggatgcaggagccgtaggccaaggggacagtgatggtggctgcagaggagggaaatacatcacctctgccctctgatcctgcagttagtgtagctgggctccttggcacctcttccccaaggggcaggagcaacgatagagtgatggcctgctgtaaaatgagtggctgtgcttggccaagggcaaataccccaaagtggcaccgttaatatgaaccagaggagacgagtggagatatagtccaaagctaggccttctgacttggagtacagagatgatctcttggtcgggtgtggtgacgcacacctgtaattccagcactttgggagtctgaggtgggaagattgcttgagcctaggagttcaagcgtgcaacatagtgagcccctatctctattaaaaaggctgggcgcggtggcccatgcctgtaactccagcactttcagatgatacagaaacatattcagtaaaaacaaactcttttccctcactcccatatccccgtctcttgttaacctttccagaccagcatctaggtacatacataacacatatataggcagttttttgttttttagttttaatttttatttttttgtgatagggtctcacttcatcacccaggctggggttcagtggcaccttgtcaactcactgcagtctcctcgacctcccaggttcaagcagtcctgcctcagcctcccgagtagctgggactacaggctcatgccaccatgcccacctaatttttgtattttttgtagagagggggttttgccatgttgcccaggctggtctcaaactcctgagctcaagtgatctgcctgcttcacctttccaaattgctaggattacaggtatgagccaccacactcagcctagtttttcttttttaaacacaaatagtatttgtgtttaaaatgtaagtattgttctataacttttttttttttttgaaacggagtcttgctctgttacgcaggctggagtgcagtggcacaatcttggctcactgcaacttccgcttcctgagttcaagtgattctcctgcctcagtctcccaagcatctgggattacaggtgcacgccaccgtgcccagctaatttttatatttttagtagagacggggtttcatcatgttggccaggctggtctcaaactcctgacctcgggtgatccacctgccttggcctctcaaagtgctgggattacaggcgtgagccaccatgcctggacctaacttttcttttctttttttttttttgagacagagtcttgctctgttgcctgggctggagtgctgtggtacgaacacggctcactgcagcctcgacctcctgggttcctaccttacctccccagtagcagggactatagatgtgggccaccacgcccagctaatttttaaattctggtttctaactcttaggctcatgcgatctgcccaccaccacctcccaccatgttgggattacagacatgagtcaccactcttggcatgttctataacttttttgttcatatatatatatttagacatggggtctcactatattacccaggttgttcccaaactcctgggctcaggtgatccacctgcctcagcctcccaaagggattacaggtacaccctgccatgcctggcccatgttccataaattttttgttgagatcttctcatattaatgcaggtagatcttcttcattcttttttcaatggttgtttattatttccagagtattcatataccataatttagtaaccattctattgatggctattaggttataatttaggggaggatgcactaccactcatcagattctctcagaggtccctgaccccaagaagtgaaaggaacatgcaggcactaagaactcttcccgtgcacacagttcatgagctagtgctgaggtgtagggaatctgccacttgtagctggtctttcccacatttggctctagccagataggggtgggttagggtcagtgtgagccaacagtgtagacataacacccaactcagcacagtctggccctgcctgtcccagagctactggtgtctgggctgccttggtgtctgtacagagctcagcctaggcctggcccaccggggcctctccctgatggcttcacttccctcccaggtctccataggacgtctgtgtttgaccgcctcggcgccgagaccaaggcagacaccacgacagggagtaaagtgagtggggatgggggagcgattctgggcgtgcgagctgttgtcttccctgagcggtgctcctgactctttaacacatctcaacctcactcggcccagggccgtctaacctgcctttccagcctcagttcctggctttgcactggcggctttcccatctgtcttctgccctggcttctctcccagtttccagccctgggggtccagtactcctggatgcctcccacccaccatgtccccaactggtcttagtgtctttccccaagtcagccctctcctgggcccccatctgagggctgcctgccctccccattgcagtctgtcagtgggtctgatgactctactgtctctccctcctctgccacctctccctgtcaggataggatgatagcctcctgaatggtctcgcacagttaccatggaccccagcccctatccccacagcagcagtgtgtgcggcccacaggacagggcccgtcccctcactggaagccctgcagaggctcttcactgtgcccatgatgcagcctgtacttcctgccgcggcccgcagtcccacaggccccaggcctggtgtgtagttcagagtacaccctgaagcccacaggggcctgactgcgtggctttggccatgtcacttaagtcctttgtacttcagcctcctcatctgtatagacccacctccaaggatggctgtagggttaagatcatccccgcatggtgctggggtgtgcggcgcctgttggtgaactattgcagagcctcccagctgcgtttcctgcctgccagtgtcctgctctgcagggtgcagcaactcgggcttgctcacttccaagaatcttaccatgaggaggatgggaacactcgggatcatgtggctggaagttccagccctatgaagagctgggcgcatagcgagtgctcaatacataggattatacttcctgccttcagggcatagcacatactcttttctttgctaattcatcttggagggcctggcttcaaagttggtgcctcagggaaagttcctctggactgatgaggagccacccctgtcttctgccctccagctgtccttctccgtctagaatgcgttactgtcattcttgcagaattatttgtgtcatttctgatgccaagcctgtcttccccactggactgtgagccccatgcgggcagtgctgaggctgtcttggtcatcactgtgtccctagcactgccggcctaggaccaggtacaatatagaattgggactcaaaatattcgtggagtgaatgaccagattaatctctccactccactcatgcccacctattgaccttgcaaatgacattccctttgtgcggcactcccgtcctcttccctctttcttagacctacttccagctcagatgtcccccctctcaggcgccctccctgaacttctaggaaggtcaggtacttcctctgggctcctccagtcccctggactcccccatcatggctctcgccactatctggggtgtcagtgatgggtgtttctcccaactgtgagtcccaggaggccaggcacagaggaagcagctctccatgaatgtgtgttgagtgactcagtgactcattcatcctgtctctgacctccacagcccacaggagtcttcagccgcctgggggccaccccagaaacggacgaggatctggcttgggacagcgacaatgacagcagcagctctgtcttgcagtatgccggggtcctgaagaagctaggacggggcccagccaaggccagtccccagccagcactgactgtcaaagccaaggccacaagctcagcgacaacggctgctgccccgacactgcggcgcctggcgctttcctcacggtctgggcttgagaggaagccggagtccttgtctaaagtcagcatcatcaagagactgggcgcagctgcccttgtgcccgaggcccaggacagccaggtcaccagcaccaagagtaagtcctcagccgaggtcaaggtcaccattaagaggactctggtggggccccgggggagcagctccagcgagggccttggtgcccagatggaccacgcgggcactgtgagcgtgttcaaaagactgggccgcaggaccttctagcccacctgtgggcggggtgcaggcagcagagcctgcgggcatctgccctggccgccccaggctcctggcttcatcacgcctcccaccagctcctggatgacacagcttgtctccctcgggctctagagctaggcccgagcattcgggggatcaccccatttctcctagcctgggatggtcgtcgcagctggcctggcctgctccaggactccccttctctcatgtcctctgtgctttcttctctggctgtggccttggcagaacccacttttctacctctcccaagtgccagggggcttcttcctctcctacattccccttcttcccctgagcagggtctgctgcctcagaccccagctcatcagcctccctgtccccctcaactaagtgggtgtcacctggtgggcctcccttcccccactccccactgacctccctcactcctctgcgcctccccccactgctgtgacttctctctctccctgtcttcactttgttcatttctcttctgttttctgtccccgtggcaaggcccgactgtccgctgcgtcctgcccgaccctcctgtacctccggcctcccagcggccccctcgtcggcggtggcgtcgagcctgttgagactgttagccgccctctactcccaggctggagggacctctccagaccctgggctgcggctgaggcgcatccgttttcctgccctgggcatctgtctctgaaagtgtatggcgggtggtgggcaaggggcactgggaagggaggccagtgcctagagtgaagacagctgctgttttaatatatttttgtgactttcaaatcatttcccccactccttcagggtgagttgcaggactgtttcacactatgcgcagctgggctggggatggtggcagaggattgggctgtgtctctaaaggtcaggcttcctgcacacacatggtccatgtccctgctgcaagccctgagtcagggggagtaatggccacagtcaccattcagttaggccgccccctgcccccaataagccgtagtggttttgtcactctatcccctccccccatggatttcacctgcctgctggcacctttccaaatgatgggctccgtttgtgagaccatgagtttccactggtttggtcgcc

SEQ ID NO: 6095 - DNA, 364 bp, Homo sapiens
caggcatgtccaataatttgcttaagtttatgtttagcccgtagggtatgaaaccaggatttgatttctactcttgagcccagcagtctttccatttaaccatgttgcatttattttgtaggacatggaagcctttcaagattttttgcctgcaaggggagtaaatgataaaactaggccctttttggacccaaatgctcccaaccagtactcacacaaattggctcaagttcatgaagtatttgtgtgtttaatctattgaaaagagattttgcttttgactttgctaataagtatgaatagtgtatgtaaacatatgaaagcaccttttataaagttggcacttattgtttccaagcctcct

SEQ ID NO: 6096 - DNA, 364 bp, Homo sapiens; identical to SEQ ID NO: 6095

SEQ ID NO: 6097 - DNA, 2831 bp, Homo sapiens
gttccattcctcttccagcgaatgtcatggtaaccaccagcctctcccattgagccacatcttgttctgcagctgtgcttctgactagagaaacctctccctccatctccccactgcccttctagacctattccagttgcaaatttaacttacagtgtgagtatggggaaaattttaagagcataagtgctaaatacaacatccaaactacatcaggctcatcatagataccatgtattaataataatcatacacaaataaatacattagtgtctttattctagagtagttcccgcttgtcagtctcagactgcagtgctactgcagtctgcacatctagctcctgcaagttgcagcaagtcagaattgcttctggcacacctcttataactggaagtcttggtattgagctagattggaggcattccccagctatagcatagtgtgtgctttattgctaacctaggcgatgggaagaaagagaacacagctatctttccaagctgtgtgcagcatggagcaccagctgcccttgagacagaagaaagctgttgttttcatcaggtaggctgtgtgtttctctgttaagtaggctgaggggcatctggtctgcaggagctggcatttaatttgaagatgttgaggccttaaaagattgaacttgtgggtctgatagcctaattagaacaagctatgtgtgggggctgccgtactcaaatctgtttttaatggctcagttcagggctgagggggagcaatgtcaaaattaaaattagagctctagatttaattggcagaagtttaagactttcacttttggcagtgctcaagctaaatgaccttaaggatagagatcttggggtcatgggggagcatcaccctaacccctaggcttactataccgcatctctttagggtctttacagtcactcctcaactttttggactcaggacccctttatactcttaaaacttatttaggacttcaaagacattttgtttatgtgagttatatcctttgatatttaccagattcgaaattaaaactcagtgagacatttaaaaatatttattgatttattttaaagtagtaaacaataatactttttatgaataacagtagttttttgggtttttttgtttgtttgtttgttttgagacggagtctcactgtcggtgcagtagcaccatcttggctcactgcaacctctgccttccaggttcaagcaattctcctgcttcagcctcctgaatagctgggactacaggcgcctgccaccatacccagctaatttttcatttttagtggaggcagagtttcaccatgttggccaggctggtctcaaactgctgacctcaggtgatcggcctgcctcggcctggggttacaggcatgagccacagcactcggccgaataataatagtttttaaaacaaaacattttagtaagaatggactgggtgtggtggctcactcctgtaatcccagaactttggaaggtcgaggcaggtggatcacttgagctcaggagttcgaaaccagcctggctaacatggtgaaactttgtcttaaaaaataaatgaatagccgggcgtggtggctcacgcctgtagtcccagcactttgggaggccaaggcaggtggatcacttgaggtcaggagttcgagaccagcctggccaatatggccaaaccccatctctactaaaaaaaacaaaaattagctagacgtggtggcgagcgcctgtagtcccacctactcgggaggctgaggcaagagaatcgcttgaacccaggaggcggaggttgcagcgagccaggatcgtgccattgcacttcatcctgggtgagagagtaagactctgtctcaaaataagtaaattaagtaagaatgacattctttgttttttagtacaatgttttaatgtctgctctaacagaatacagctgtgttctcatatgtttttgcattcagtctgttgtgataaccacatgtcctataacctctggaaaactccactctatgctcctgagagaacagagggactggcccctggaccacgccctgaaaactattgatagatgtggtactgtcaaccatgaagagtcagacagacctcagcacttacagatgatagttttgtcaccttgaacaaatgactacatctctctgagtctgtttcctcctctgttgagagagaagtgtgctgtaactcataggacagtgtagggattaatagaatacttgttctccttgatagggacataaaatagtagggtatttgttagtgtctggcacttggtaggtgtgtaataagcattattcctcagggtactttttaaaaaattgcttaaaatacccaagagagacccatattattttgattgggttttgtgtgtgtgttgtgagtttattgtccagttctcttcctgtgcctgttctgtgtgtctattgtaatatataaaacgattttatggtccttattttcatatttctatctctaggagacattcaactccttgaaaatgaacaatccggccaggcgcggtggctcacgcctgtaaatcccagcactttgggaggccgaggcgggcagatcacctgaggtcaggagttcaagaccagcctgaccaacatggagaaaccccctctctactaaaaatgcaaaattagccagcatggtggtgcatgcctgtaatcccagctactcgggaggctgaggcaggagaatcgcttgaacccaggaggtggaggttgcggtgagccgagatcacgccattgcactccagcctgggcaacaagagcgaaactccatctcaaaaaaaaaaaa

SEQ ID NO: 6098 - DNA, 812 bp, Homo sapiens
ctctatgctcctgagagaacagagggactggcccctggaccacgccctgaaaactattgatagatgtggtactgtcaaccatgaagagtcagacagacctcagcacttacagatgatagttttgtcaccttgaacaaatgactacatctctctgagtctgtttcctcctctgttgagagagaagtgtgctgtaactcataggacagtgtagggattaatagaatacttgttctccttgatagggacataaaatagtagggtatttgttagtgtctggcacttggtaggtgtgtaataagcattattcctcagggtactttttaaaaaattgcttaaaatacccaagagagacccatattattttgattgggttttgtgtgtgtgttgtgagtttattgtccagttctcttcctgtgcctgttctgtgtgtctattgtaatatataaaacgattttatggtccttattttcatatttctatctctaggagacattcaactccttgaaaatgaacaatccggccaggcgcggtggctcacgcctgtaaatcccagcactttgggaggccgaggcgggcagatcacctgaggtcaggagttcaagaccagcctgaccaacatggagaaaccccctctctactaaaaatgcaaaattagccagcatggtggtgcatgcctgtaatcccagctactcgggaggctgaggcaggagaatcgcttgaacccaggaggtggaggttgcggtgagccgagatcacgccattgcactccagcctgggcaacaagagcgaaactccatctcaaaaaaaaaaaa

SEQ ID NO: 6099 - DNA, 3351 bp, Homo sapiens
gccggaggaccagccagcttcccgctctcagctggcagcagctgccggtgatggatgtgaagggacagttgtccacaagactctgggagctgaggggaggccggctctccaggcagcaccagagcaaggccatcgcagccccgccagccgggtcactttctcccagggcagagccaccaaggagggctggggagagctggcattgccctcctggagaggggaatttcctgctcacccttcacacacagaggagaggggtggcttttgcccgcaggagatcttctggccccagaaacagcaggtgctggatttgcagccctggccctccaggcccaacagggcgatcagtgtagggccagcctggagcagggcttttccaaggctgctgaagcagccctcctcacttgggctgactaccaggacccagaaggaactcagggtgaagctcattttattctcaagcctgcgtctcagcagcaaagttggtgttttcttcctgtgttaaaatctgagaaagaaggccaggtgcggtggctcacgcctgtaattccaggactttggaaggctgaggcgggcagatcacgaggtcaggagatcgagaccatcctggctaacgtggtgaaaccccgtctctactaaaaaaatacaaaaaaattagccgggcgtggtggcgggcgcttgtagtcccagctactctggaggctgaggcaggagaatggcgtgaacccgggaggcggcgttgcagtgagccgagatcgtgccactgcactctagcctgggtgacagagcgagactccgtccccaaaaaaaaaattctgagaatatggtgtgttccagcctcttcaaagctctgctcttctgcacacgttttttgaaggccttaaaaaggcaccagtgtgaccagggagcaccctctgcctccctccctgcactgggaccataaacataaacagctctaccagcaaagtgacccatcccgcgggggaggcctgcgcacgccctcaccagggctgtcatcagaatccagtcttaggacagaggaaggatgtttgccttcaggaccagcaagtcacaggtgtcctggatgttacccaagctctaaaatcaaataaaacccatcagtatttagtggtgtgtgtgtgtgtgtgtgtgtgtgtgtgtgtgtgtgtgtgtgtgtgtgtgtgtgtgtatgagtgtatgaagggaaatggaaagcagagaaaagtcgcgtgccctcccccaggcacctgatctgcccacagacccttcaatggggacatctctggtcccaatggtcgtaaataaaggctaagcgctggatttttccatggccccctgactcctcaggagcgcaggcagaggaggtaaacaggaggccaggttacccatgagatgaccagaagctcatcaagggccgggaccctggttcatctcgtgaattcttggcagcggctccaggctgggcacattagatgctgtcatgtgacactctggtggccacctcttggttctctggaaatgtgtccactctgtgctcagggaagaaggctgccgtcctgacctgtcagccaccaggccctctctgaactcctcacttgacccggaggcattgggagcaaacacaaagctcgcccctggtgtcagtggtgcagacagaggaaaagcagagggtccgcaaaatgcaactcctccgtggtgagactttgaaaaggtgtagagtggttgcagacaaacagcaaaggagtggaatggaaaaatctctcttgctccccacaagaagtccactcccctacggattcctcagatgccactggctggcacagcctttcccgcccttggtgtgggagcagcagaagtccagcgggggtgggagaatcatcggggtcaggtcagtgtctccctcgtctgaagtcaaccactacttttccctcaagcctaccaaagagctaaagtctgatctgtagatgtctgatggtttgaggagaagaaaagatagtcttttagagaagtggggagtatccaacttagggtcaaaatacactgagattaggccgggcacagtggctcacacctgtaatcccagtgctttgggaggccgaggcggatggatcacttgaggcctccaggagttcgagaccagcctggccaacatggcgaaaccccgtctctactaaaatacaaaaaattagctggatgtggtggtgggtgcctgtaatctcagctactcaaggaggctgaggcacaagaatagcttgaaccgggagatggaagatgcagtgagccaagatcacgcccctgcactccagcctgggcgacagagactccgtcaaaaaaaaaaaaaaaatacattgagattaccaggtggggtatgtgtggttcttccaggaaagtgctgaaaatatcacccaggcctctgcgccacgccctgggagagtacacatcctcggcacgcctctgcattccaaggctgacagctagaaatatactttgtaaaataccaacaacttattcacaaatattccaactatctaccagctccaatgagcttgctgaggatgggtatgaccccagtctaaggggaaagaatctaaaacacaagtaaacctgtttaaaggccagatctccagatggagatccaagcagatggcgcctaaggtttgcccttgaaaactaccaaggaagccacagagagggatctttggaccttctggaaaatggtaaggccccaggtagattatggctcctctgccctggaggctgagccgcccctctggttacctcacatcttctggtttcttctgagtgggacttgatctcatttctgcattcacagcaaggtggaactgtctggcaagagcttaaattaggacctgtggtggggactttaataggcaggtggaggtttgagatccagtgagatgccagagattagtcaataggtgaggaaagatttggcccaaatcaaaagagctaaaaaaaaaataataaaataaaaataaaaataaaatagttgaacaaataaggttcatgaaaaaaaaagaaaagaaagaaaaggtaaagaaaagaaatccatgataaaatatcaaactttttaataaaaacaagtctggccctgtacttggatgaccccacctggcttgtctaaccctaatcccagccccagttttaataaaactgtatttacaaaataggcagctgggacgtggaccagagataccaatttgattttttttaaatattacattaaaatattacatcatgtgtcttcattactgagttttggggtagccctttaaattttgtatgcaaggtgaatacctcacccctctctcctggcctagaatctggtgg

SEQ ID NO: 6100 - DNA, 2248 bp, Homo sapiens
gtgtgtgtgtgtgtgtgtgtgtgtgtgtgtatgagtgtatgaagggaaatggaaagcagagaaaagtcgcgtgccctcccccaggcacctgatctgcccacagacccttcaatggggacatctctggtcccaatggtcgtaaataaatgctaagcgctggatttttccatggccccctgactcctcaggagcgcaggcagaggaggtaaacaggaggccaggttacccatgagatgaccagaagctcatccagggccgggaccctggttcatctcgtgaattcttggcagcggctccaggctgggcacattagatgctgtcatgtgactggcctggtggccacctcttggttctctggaaatgtgtccactctgtgctcagggaagaaggctgccgtcctgacctgtcagccaccaggccctctctgaactcctcacttgacccggaggcattgggagcaaacacaaagctcgcccctggtgtcagtggtgcagacagaggaaaagcagagggtccgcaaaatgcaactcctccgtggtgagactttgaaaaggtgtagagtggttgcagacaaacagcaaaggagtggaatggaaaaatctctcttgctccccacaagaagtccacatccctacggattcctcagatcgcactggctgcacagcctttcccgcccttggtgtgggagcagcagaagtccagcgggggtgggagaatcatcggggtcaggtcagtgtctccctcgtctgaagtcaaccactacttttccctcaagcctaccaaagagctaaagtctgatctgtagatgtctgatggtttgaggagaagaaaagatagtcttttagagaagtggggagtatccaacttagggtcaaaatacactgagattaggccgggcacagtggctcacacctgtaatcccagtgctttgggaggccgaggcggatggatcacttgaggcctccaggagttcgagaccagcctggccaacatggcgaaaccccgtctctactaaaatacaaaaaattagctggatgtggtggtgggtgcctgtaatctcagctactcaaggaggctgaggcacaagaatagcttgaaccgggagatggaagatgcagtgagccaagatcacgcccctgcactccagcctgggcgacagagactccgtcaaaaaaaaaaaaaaaatacattgagattaccaggtggggtatgtgtggttcttccaggaaagtgctgaaaatatcacccaggcctctgcgccacgccctgggagagtacactcctgggctcacgcctctgcattccaaggctgacagctagaaatatactttgtaaaataccaacaacttattcacaaatattccaactatctaccagctccaatgagcttgctgaggatgggtatgaccccagtctaaggggaaagaatctaaaacacaagtaaacctgtttaaaggccagatctccagatggagatccaagcagatggcgcctaaggtttgcccttgaaaactaccaaggaagccacagagagggatctttggaccttctggaaaatggtaaggccccaggtagattatggctcctctgccctggaggctgagccgcccctctggttacctcacatcttctggtttcttctgagtgggacttgatctcatttctgcattcacagcaaggtggaactgtctggcaagagcttaaattaggacctgtggtggggactttaataggcaggtggaggtttgagatccagtgagatgccagagattagtcaataggtgaggaaagatttggcccaaatcaaaagagctaaaaaaaaaataataaaataaaaataaaaataaaatagttgaacaaataaggttcatgaaaaaaaaagaaaagaaagaaaaggtaaagaaaagaaatccatgataaaatatcaaactttttaataaaaacaagtctggccctgtacttggatgaccccacctggcttgtctaaccctaatcccagccccagttttaataataactgtatttacaaaataggcagctgggacgtggaccagagataccaatttgattttttttaaatattacattaaaatattacatcatgtgtcttcattactgagttttggggtagccctttaaattttgtatgcaaggtgaatacctcacccctctctcctggcctagaatctgggggatcctcctgtccctcccacagtgcctgatagcacagcctggggctggtggtgtg

SEQ ID NO: 6101 - DNA, 4236 bp, Homo sapiens
ctctgtccccttccagcctctgccaattgatagcccctccacctccacgccccaactgagctgaacctttctagagggctttaccaaaacacagggaaaacaaaaggacagaacaaaaggccaggcaggacgaaaggagtcccgcttaggatatgcgcatttctttgccgcccccagcccgccccaccctactaccttcctggccaggccctgggcgctctggtcagctggggacacgctgggttggaagtgggggtaatggccatggctggggagccaggttggacccctcccacttcccactgggaaacacacccaaaaccccagcccagccagtcgcagcccaggtcaggcgcagaggaggtgcagcaaatccaggggaggctcggccaggaggaaggtgccactggggcagggatccccagtcatagcaacagtgacaccagcagctggtggctggcctggccccacatctagcagcatagcgtggccacggtgtggacagctcagccagccatgggcgttgtgtgtcctgtgggctcaacaaacacgtgagctgttgccagcaaagctgactgagtgacccgcaccaagcagcctgcttcctgtgaggaaagagccggcccgccagtcgagcccaggccacagaacaggtgacctgggagagggaaggttccctcgcttctgagccggctgaaagagggactgagtgggacagaggggattctgtgcggagaccacacagcactggcatcttgctctggcttttctctccaggcagccagtctcacaggaagtaaggatgtccccgggtgtccccatcacgttgccggaggaccagccagcttcccgctctcagctggcagcagctgccggtgatggatgtgaagggacagttgtccacaagactctgggagctgaggggaggccggctctccaggcagcaccagagcaaggccatcgcagccccgccagccgggtcactttctcccagggcagagccaccaaggagggctggggagagcctggcattgccctcctggagaggggaatttcctgctcacccttcacacacagaggagaggggtggcttttgcccgcaggagatcttctggccccagaaacagcaggtgctggatttgcagccctggccctccaggcccaacagggcgacagtgtagggccagcctggagcagggcttttccaaggctgctgaagccagccctcctcacttgggctgactaccaggacccagaaggaactcagggtgaagctcattttattctcaagcctgcgtctcagcagcaaagttggtgttttcttcctgtgttaaaatctgagaaagaaggccaggtgcggtggctcacgcctgtaattccaggactttggaaggctgaggcgggcagatcacgaggtcaggagatcgagaccatcctggctaacgtggtgaaaccccgtctctactaaaaaaatacaaaaaaattagccgggcgtggtggcgggcgcttgtagtcccagctactctggaggctgaggcaggagaatggcgtgaacccgggaggcggagcttgcagtgagccgagatcgtgccactgcactctagcctgggtgacagagcgagactccgtccccaaaaaaaaaattctgagaatatggtgtgttccagcctcttcaaagctctgctcttctgcacacgttttttgaaggccttaaaaaggccaccagtgtgaccagggagcaccctctgcctccctccctgcactgggaccataaacataaacagctctaccagcaaagtgacccatcccgcgggggaggcctgcgcacgcccctcaccagggctgtcatcagaatccagtcttaggacagaggaaggatgtttgccttcaggaccagcaagtcacaggtgtcctggatgttacccaagctctaaaatcaaataaaacccatcagtatttagtggtgtgtgtgtgtgtgtgtgtgtgtgtgtgtgtgtgtgtgtgtgtgtgtgtgtgtgtatgagtgtatgaagggaaatggaaagcagagaaaagtcgcgtgccctcccccaggcacctgatctgcccacagacccttcaatggggacatctctggtcccaatggtcgtaaataaaggctaagcgctggatttttccatggccccctgactcctcaggagcgcaggcagaggaggtaaacaggaggccaggttacccatgagatgaccagaagctcatccagggccgggaccctggttcatctcgtgaattcttggcagcggctccaggctgggcacattagatgctgtcatgtgactggcctggtggccacctcttggttctctggaaatgtgtccactctgtgctcagggaagaaggctgccgtcctgacctgtcagccaccaggccctctctgaactcctcacttgacccggaggcattgggagcaaacacaaagctcgcccctggtgtcagtggtgcagacagaggaaaagcagagggtccgcaaaatgcaactcctccgtggtgagactttgaaaaggtgtagagtggttgcagacaaacagcaaaggagtggaatggaaaaatctctcttgctccccacaagaagtccactcccctacggattcctcagatgccactggctggcacagcctttcccgcccttggtgtgggagcagcagaagtccagcgggggtgggagaatcatcggggtcaggtcagtgtctccctcgtctgaagtcaaccactacttttccctcaagcctaccaaagagctaaagtctgatctgtagatgtctgatggtttgaggagaagaaaagatagtcttttagagaagtggggagtatccaacttagggtcaaaatacactgagattaggccgggcacagtggctcacacctgtaatcccagtgctttgggaggccgaggcggatggatcacttgaggcctccaggagttcgagaccagcctggccaacatggcgaaaccccgtctctactaaaatacaaaaaattagctggatgtggtggtgggtgcctgtaatctcagctactcaaggaggctgaggcacaagaatagcttgaaccgggagatggaagatgcagtgagccaagatcacgcccctgcactccagcctgggcgacagagactccgtcaaaaaaaaaaaaaaatacattgagattaccaggtggggtatgtgtggttcttccaggaaagtgctgaaaatatcacccaggcctctgcgccacgccctgggagagtacactcctgggctcacgcctctgcattccaaggctgacagctagaaatatactttgtaaaataccaacaacttattcacaaatattccaactatctaccagctccaatgagcttgctgaggatgggtatgaccccagtctaaggggaaagaatctaaaacacaagtaaacctgtttaaaggccagatctccagatggagatccaagcagatggcgcctaaggtttgcccttgaaaactaccaaggaagccacagagagggatctttggaccttctggaaaatggtaaggccccaggtagattatggctcctctgccctggaggctgagccgcccctctggttacctcacatcttctggtttcttctgagtgggacttgatctcatttctgcattcacagcaaggtggaactgtctggcaagagcttaaattaggacctgtggtggggactttaataggcaggtggaggtttgagatccagtgagatgccagagattagtcaataggtgaggaaagatttggcccaaatcaaaagagctaaaaaaaaaataataaaataaaaataaaaataaaatagttgaacaaataaggttcatgaaaaaaaaagaaaagaaagaaaaggtaaagaaaagaaatccatgataaaatatcaaactttttaataaaaacaagtctggccctgtacttggatgaccccacctggcttgtctaaccctaatcccagccccagttttaataaaactgtatttacaaaataggcagctgggacgtggaccagagataccaatttgattttttttaaatattacattaaaatattacatcatgtgtcttcattactgagttttggggtagccctttaaattttgtatgcaaggtgaatacctcacccctctctcctggcctagaatctgggggatcctcctgtccctcccacagtgcctgatagcacagcctggggctggtggtgtg

SEQ ID NO: 6102 - DNA, 1813 bp, Homo sapiens
cacttgacccggaggcattgggagcaaacacaaagctcgcccctggtgtcagtggtgcagacagaggaaaagcagagggtccgcaaaatgcaactcctccgtggtgagactttgaaaaggtgtagagtggttgcagacaaacagcaaaggagtggaatggaaaaatctctcttgctccccacaagaagtccactcccctacggattcctcagatgccactggctggcacagcctttcccgcccttggtgtgggagcagcagaagtccagcgggggtgggagaatcatcggggtcaggtcagtgtctccctcgtctgaagtcaaccactacttttccctcaagcctaccaaagagctaaagtctgatctgtagatgtctgatggtttgaggagaagaaaagatagtcttttagagaagtggggagtatccaacttagggtcaaaatacactgagattaggccgggcacagtggctcacacctgtaatcccagtgctttgggaggccgaggcggatggatcacttgaggcctccaggagttcgagaccagcctggccaacatggcgaaaccccgtctctactaaaatacaaaaaattagctggatgtggtggtgggtgcctgtaatctcagctactcaaggaggctgaggcacaagaatagcttgaaccgggagatggaagatgcagtgagccaagatcacgcccctgcactccagcctgggcgacagagactccgtcaaaaaaaaaaaaaaatacattgagattaccaggtggggtatgtgtggttcttccaggaaagtgctgaaaatatcacccaggcctctgcgccacgccctgggagagtacactcctgggctcacgcctctgcattccaaggctgacagctagaaatatactttgtaaaataccaacaacttattcacaaatattccaactatctaccagctccaatgagcttgctgaggatgggtatgaccccagtctaaggggaaagaatctaaaacacaagtaaacctgtttaaaggccagatctccagatggagatccaagcagatggcgcctaaggtttgcccttgaaaactaccaaggaagccacagagagggatctttggaccttctggaaaatggtaaggccccaggtagattatggctcctctgccctggaggctgagccgcccctctggttacctcacatcttctggtttcttctgagtgggacttgatctcatttctgcattcacagcaaggtggaactgtctggcaagagcttaaattaggacctgtggtggggactttaataggcaggtggaggtttgagatccagtgagatgccagagattagtcaataggtgaggaaagatttggcccaaatcaaaagagctaaaaaaaaaataataaaataaaaataaaaataaaatagttgaacaaataaggttcatgaaaaaaaaagaaaagaaagaaaaggtaaagaaaagaaatccatgataaaatatcaaactttttaataaaaacaagtctggccctgtacttggatgaccccacctggcttgtctaaccctaatcccagccccagttttaataaaactgtatttacaaaataggcagctgggacgtggaccagagataccaatttgatttttcttaaatattacattaaaatattacatcatgtgtcttcattactgagttttggggtagccctttaaattttgtatgcaaggtgaatacctcacccctctctcctggcctagaatctgggggatcctcctgtccctcccacagtgcctgatagcacagcctggggctggtggtgtg

SEQ ID NO: 6103 - DNA, 392 bp, Homo sapiens
ttagtggcttaaaccaacaaatgtattagctttataatgatttggatcagtgatgggggctgggcacggacaggcgattcttctgctgggcttggctgaactcaactatgtcttatggtcagagggcagtcaggggcttcgctcatgtctggtagttggctgttggctgagcccttggttctcctctggcttaggcttgttcacatggtggcctcggggctcccatggcagttagagaaatcaagcccaagtctcatatcacgttcactattctcccattgtccaaagcagaccacatggccaaggcccaagtctgtgtgaaaggatgtggatacagggaccccgaatgaaccagaggcaatactgctgcaagctaccacatagatgctgtt

SEQ ID NO: 6104 - DNA, 401 bp, Homo sapiens
ttagtggcttaaaccaacaaatgtattagctttataatgatttggatcagtgatgggggctgggcacggacaggcgattcttctgctgggcttggctgaactcaactatgtcttatggtcagagggcagtcaggggcttcgctcatgtctggtagttggctgttggctgagcccttggttctcctctggcttaggcttgttcacatggtggcctcggggctcccatggcagttagagaaatcaagcccaagtctcatatcacgttcactattctcccattgtccaaagcagaccacatggccaaggcccaagtctgtgtgaaaggatgtggatacagggaccccgaatgaaccagaggcaatactgctgcaagctaccacatagatgctgttcagagcttt

SEQ ID NO: 6105 - DNA, 392 bp, Homo sapiens
ttagtggcttaaaccaacaaatgtattagctttataatgatttggatcagtgatgggggctgggcacggacaggcgattcttctgctgggcttggctgaactcaactatgtcttatggtcagagggcagtcaggggcgtcgctcatgtctggtagttggctgttggctgagcccttggttctcctctggcttaggcttgttcacatggtggcctcggggctcccatggcagttagagaaatcaagcccaagtctcatatcacgttcactattctcccattgtccaaagcagaccacatggccaaggcccaagtctgtgtgaaaggatgtggatacagggaccccgaatgaaccagaggcaatactgctgcaagctaccacatagatgctgtt

SEQ ID NO: 6106 - DNA, 887 bp, Homo sapiens
taaatgtgaaaactaaggccttgcaagcctatggcttcacccaggggtaggatcaggcaccttaactctagagcccattctcctaaccactgagccatgattgtcttacaattttgatactgcaaaactggaagaattgtctggctattatctaagctgttcataagctgaacaagtagatctgagggtaagaggagttctgttttaactagactgagtttcaaatagagatgtttcagactatagagggggaaaaatggcctgggaagatcataaatctaagcctgtttcattgatgtttttgtcatttgcatccagtagctattcagcaaatatacctatggcaaaaaggatataagttatgggtataactgaaataatcctgggtttaaagcaagctctgataaatacagacgatgtttctccaggtgccagaagatatgttgaagtttgagctcagactgaccaatgctagttatggggtatgtgatagctccaaggtagtaatataaaggctattttaattagaaacttttgagtaaatggccctcaggatagtgatttctgtttgaatggtcactaaccttttttagttacagatccctatataatgcttgagtctaggcagaacaacgtttgtgtttattctttgccacagggtagggtagtgctaacaacctgtctcttcatttgctttttctcccctttgccgattcagaatgctgctttgtcaatttgtgtgcctgctgtaggaactggtccgttttccaagtgtgacagtgcaggcagagaagggtggatgagctgtaaatgcagcctagaacacatttgattatagagaatgaagcactaatatcccaatataattggagtttaaaaaaaaaaaa

SEQ ID NO: 6107 - DNA, 887 bp, Homo sapiens
taaatgtgaaaactaaggccttgcaagcctatggcttcacccaggggtaggatcaggcaccttaactctagagcccattctcctaaccactgagccatgattgtcttacaattttgatactgcaaaactggaagaattgtctggctattatctaagctgttcataagctgaacaagtagatctgagggtaagaggagttctgttttaactagactgagtttcaaatagagatgtttcagactatagagggggaaaaatggcctgggaagatcataaatctaagcctgtttcattgatgtttttgtcatttgcatccagtagctattcagcaaatatacctatggcaaaaaggatataagttatgggtataactgaaataatcctgggtttaaagcaaagctctgataaatacagaagatgtttctccaggtgccagaagatatgttgaagtttgagctcagactgaccaaatgctagttatggggtatgtgatagctccaaggtagtaatataaaggctattttaattagaaacttttgagtaaatggccctcaggatagtgatttctgtttgaatgtcactaaccttttttagttacagatccctataataatgcttgagtctaggcagaacaactttgtgtttattctttgcaaagggtagggtagtgctaacaacctgctcttcatttgctttttctcccctttgccgattcagaatgctgctttgtcaatttgtgtgcctgctgtaggaactggtccgttttccaagtgtgacagtgcaggcagagaagggtggatgagctgtaaatgcagcctagaacacatttgattatagagaatgaagcactaatatcccaatataattggagtttaaaaaaaaaaaaa

SEQ ID NO: 6108 - DNA, 123 bp, Homo sapiens
tcttccctcagaagttggcaggaacggcaacaagacaatctgttaggggtgacagctataggctcttctcttttttaaaaataatatagtcaatattcaacatggttttctggggtaaaatca

SEQ ID NO: 6109 - DNA, 123 bp, Homo sapiens; identical to SEQ ID NO: 6108

SEQ ID NO: 6110 - DNA, 662 bp, Homo sapiens
ccccagaaagatattgacgggaaggggcagaaagatttttaagcaaaaggaacaactagtaaggtgaaaagttatttagagagaataaagtaaaacaagcgtagtttaggctttcagccatggcaggaaagctgggtagattataggatttaagcaaagaaacgaatgataatgataatcagcctctaggtgaggaaactaaaaccactggagcacatcatagctaatttgtgatagaggtaaaactaaagaccagacttaatgtttaaatccattcattcctcctgcaagcaattatcgtacatagaggcacctctgggcttctcatgactttctgttctgctgcctgaatctattcttggagaattacaatgccaaattggaattttaagcttatctcatgggcagtgagaaatcaccagtagattgtaaaattaccctgaattgctcagatttgtgtttaggaccaattctgagtgtcacagtgtttggatacatcatagaggtaaaaggagttaaggagatccattctgaaattaaggggatagtgtggtatacccaggtgagataaaaggatatgagttaggacagagacaacaggacttaattgaaaaatgtgtaggaggtggaataataacaatagcatatatttataatttacc

SEQ ID NO: 6111 - DNA, 662 bp, Homo sapiens
ccccagaaagatattgacgggaaggggcagaaagatttttaagcaaaaggaacaactagtaaggtgaaaagttatttagagagaataaagtaaaacaagcgtagtttaggctttcagccatggcaggaaagctgggtagattataggatttaagcaaagaaacgaatgataatgataatcagcctctaggtgaggaaactaaaaccactggagcacatcatagctaatttgtgatagaggtaaaactaaagaccagacttaatgtttaaatccattcattcctcctgcaagcaattatcgtacatagaggcacctctgggcttctcatgactttctgttctgctgcctgaatctattcttggagaattacaatgccaaattggaattttaagcttatctcatgggcagtgagaaatcaccagtagattgtaaaattaccctgaattgctcagatttgtgtttaggaccaattctgagtgtcacagtgtttggatacatcatagaggtaaaaggagttaaggagatccattctgaaattaaggggatagtgtggtatacccaggtgagataaaaggatatgagttaggacagagacaacaggacttaattgaaaaatgtgtatgaggtggaataataacaatagcatatatttataatttacc

SEQ ID NO: 6112 - DNA, 340 bp, Homo sapiens
taaattgaggacatgacagcaattgaaattattatatcatggcaaaaacctcagtaggctacaccttttggagaggactctcattgtaagtagtaaagtttgatttattaagatttttttttatgtttacaaaagtaataaaatttaagaaaaataccatcctaattcatagaaaatgttaacattttagtgtgtctaaccttttctgtgcgagtaaatagaaatatgtatataaaggcacatagaaaattacataaaaattggatcagattctttgaaggctgcttttcttcccctcctgtgtattttggacattatcaatgtctgtacacatagatcc

SEQ ID NO: 6113 - DNA, 340 bp, Homo sapiens
taaattgaggacatgacagcaattgaaattattatatcatggcaaaaacctcagtaggctacaccttttggagaggactctcattgtaagtagtaaagtttgatttattaagatttttttttatgtttacaaaagtaataaaatttaagaaaaataccatcctaattcatagaaaatgttaacattttagtgtgtctaaccttttctgtgcgagtaaatagaaatatgtatataaaggcacatagaaaattacataaaaattggatcagattctttgaaggctgcttttcttcccctcctgtgtattttggacattttcaatgtctgtacacatagatcc

SEQ ID NO: 6114 - DNA, 340 bp, Homo sapiens; identical to SEQ ID NO: 6113

SEQ ID NO: 6115 - DNA, 346 bp, Homo sapiens
ttggatcttttttcatttctttcagtgctgttttgtatttaagctttcttttaatcttaaatgcagaagatgcatttaatttttgctgcaccctaaataacaatcatcttagtacatgatccagtcacatgaatgatatagtcagtgcttctataagtgataacacctgatatgcagatttttttcctaggatataggatgaggcctcaggagaaagccactgaagacattcttagcagcagcgatgacccttgtagctatgaagacctgtcttgaagggaatctggcatgtacagaaatagtctggtgaatgccttcctgagccactctgctgctcagtgatccc

SEQ ID NO: 6116 - DNA, 346 bp, Homo sapiens; identical to SEQ ID NO: 6115

SEQ ID NO: 6117 - DNA, 346 bp, Homo sapiens; identical to SEQ ID NO: 6115

SEQ ID NO: 6118 - DNA, 861 bp, Homo sapiens
aatctaggtttgaattctagcttcacaccaattagatgagagacttcagtgagatactttagctggtttactgacttttaaaaaataatattactttaaaataatttcacttccagaaatgtagcaagaatattagagaacttctgtatactttactcagaaccaccagtttttagcattttgccacatctgcatttctctttctgtgtatattcacacaggcgcacacacacatttttttctgaaccatttgagagtgggttacatacctgatgccttttatagtttatatcttttaatactttggtgaatattttctaaaaacaaggatattttattacgtatctatcagcttgctaaacttctttcacatggtggcacacaaactgttaactatttatacaagagactacttgaggctaaagggttaaaaaggatcaacatcttggcacacttataaccctttctaccatactagtatgctgtggcaaaactgggaaggccttacttaagctctgagttatttcatctgtaaaattacgatgttaattagtactttcctgtcaggattgttgtgagaattaaatgggatattgtatgtagtgcttaacacataacaaacactcaacaaatgaactttttgtatattaggaaaataaattgttataggttatgagtatttttccttgttttttaacattgttaaaagctttacaatcttaggtgatcaaaatcattatcttcatttttatgttttttatctttcaagcaagctcagtgagctaaaatgattatgttttcatcagttatatttatggattaggtgttttatattttaatcttggattcatttggaatcta

SEQ ID NO: 6119 - DNA, 861 bp, Homo sapiens
aatctaggtttgaattctagcttcacaccaattagatgagagacttcagtgagatactttagctggtttactgacttttaaaaaataatattactttaaaataatttcacttccagaaatgtagcaagaatattagagaacttctgtatactttactcagaaccaccagtttttagcattttgccacatctgcatttctctttctgtgtatattcacacaggcgcacacacacatttttttctgaaccatttgagagtgggttacatacctgatgccttttatagtttatatcttttaatactttggtgaatattttctaaaaacaaggatattttattacgtatctatcagcttgctaaacttctttcacatggtggcacacaaactgttaactatttatacaagagactacttgaggctaaagggttaaaaaggatcaacatcttggcacacttataaccctttctaccatactagtatgctgtggcaaaactgggaaggccttacttaagctctgagttatttcatctgtaaaattacgatgttaattagtactttcctgtcaggattgttgtgagaattaaatgggatattgtatgtagtgcttaacacataacaaacactcaacaaatgaactttttgtatattaggaaaataaattgttataggttatgagtatttttccttgttttttaacactgttaaaagctttacaatcttaggtgatcaaaatcattatcttcatttttatgttttttatctttcaagcaagctcagtgagctaaaatgattatgttttcatcagttatatttatggattaggtgttttatattttaatcttggattcatttggaatcta

SEQ ID NO: 6120 - DNA, 180 bp, Homo sapiens
gacagtgaagcaaagtcaatagattttgtagaaaaataattgtaattcaaaaatgttattcttagcaaacatatggttcatatgtgtagaaaacatccagagccatgcataacttcaaaagtacaaaaccctaatatattttcctttaaaaatttctggaagaattgttttgtaccacaa

SEQ ID NO: 6121 - DNA, 180 bp, Homo sapiens; identical to SEQ ID NO: 6120

SEQ ID NO: 6122 - DNA, 286 bp, Homo sapiens
ggttttgttactgtcatattccacatatcgtcttaagctttcttttacaaaatcatcatgcacttcaagaaggaccaaccaaaagaaccatgcagatgctaggaagggagtgggaagtgctcttaaacccagaaatcccattcggctggaaacaaagacatgccctgccctgtggggtcagattcctgcaagaaatgaaggattttcaagaatttcttggtggaaccaagtggtagattgtcaaaggaatttgtttatttctgtgggtgtggcaagcaaagtgctt

SEQ ID NO: 6123 - DNA, 286 bp, Homo sapiens; identical to SEQ ID NO: 6122

SEQ ID NO: 6124 - DNA, 100 bp, Homo sapiens
gattacaggcacctgccaccacgcccagctaatttttgtatttttagtagagacagggtttcaccatgctggccaggctggtctcgagctcctgacctca

SEQ ID NO: 6125 - DNA, 376 bp, Homo sapiens
caggtgcctgccgccacgcccagctgatttttgtatttttagtagagacagggttttgccatgttggccaggctagtcttgaactcctgaccccaagtgagccgcccgccttggcctctccaagtgctgggattataggcgtgagccaccacacccagctgagttcttattttgaagaaaatcttttgtagaaaatcaatatttaagcagataaaaacagatctgctctgtcttctggggtagaaggcttggagacttggctgttaggctctgtagagcacagtctgaaaacttgtccatcctccccattttaggtgcagacctgaaacaaactgcaaaaggcattggaccaagatcattttgttgatatcccttt

SEQ ID NO: 6126 - DNA, 376 bp, Homo sapiens
caggtgcctgccaccacgcccagctgatttttgtatttttagtagagacagggttttgccatgttggccaggctagtcttgaactcctgaccccaagtgagccgcccgccttggcctctccaagtgctgggattataggcgtgagccaccacacccagctgagttcttattttgaagaaaatcttttgtagaaaatcaatatttaagcagataaaaacagatctgctctgtcttctggggtagaaggcttggagacttggctgttaggctctgtagagcacagtctgaaaacttgtccatcctccccattttaggtgcagacctgaaacaaactgcaaaaggcattggaccaagatcattttgttgatatcccttt

SEQ ID NO: 6127 - DNA, 311 bp, Homo sapiens
ctgccaccacgcccagctgatttttgtatttttagtagagacagggttttgccatgttggccaggctagtcttgactcctgaccccaagtgagccgcccgccttggcctctccaagtgctgggattataggcgtgagccaccacacccagctgagttcttattttgaagaaaatcttttgtagaaaatcaatatttaagcagataaaaacagatctgctctgtcttctggggtagaaggcttggagacttggctgttaggctctgtagagcacagtctgaaaacttgtccatcctccccattttaggtgca

SEQ ID NO: 6128 - DNA, 338 bp, Homo sapiens
actaaggagaattcgtagtttaatctgtttaacaccttctgatttatcagttcttaaagcatcgtgtatatttcttacatgtacatttctaaaaagtaaatacagtctctgtgcatagtcaagctttgtgtatagagtgtcttgagttgttgtccagctacgtatttatataatatttgactgtggaatcacatcagaatatatcacatgctaatattgatattcttgagtagacactaaaatgctttaaagcttcatttttcatctgagaatgaacaaagtaccctgaattctgtttgatgccatgtcaccaaataggtgttattctgatccccata

SEQ ID NO: 6129 - DNA, 338 bp, Homo sapiens; identical to SEQ ID NO: 6128

SEQ ID NO: 6130 - DNA, 1224 bp, Homo sapiens
cgacagagcaagaccctgtcaaaaataataataataataaaggcaattgttctagtgatgttaagtgagcttaatgtatcactgcagatgctgaacttatatgataggtgaaatagaaagggtgaatttaaaacagaactttttatctcattctttctttctgttctttttaataaaaggaaggattacggccaggagatacaaccagcactttctgtggtactcctaattacattgctcctgaaattttaagaggagaagattatggtaataaataaattggtggtattattttagctattgctagatgggtggtaaaatgtggtaccaattgcattacagtacactaatgcattttgacgtgatcttattaatataaggattcttgatcctgttaaaaactacatggagagtcccagactttgaaatcgagacagtgggaccttggcagtatttgggggtaccaagctgaataatattttattagtggcaaacactaaacagtagcaggcactattctaagcagtttacatatattaactaagttaatcctcttaacaaccctgtgaggtaagtactattaattctccttttacagttgaagaaactgacatacggaaagtttaaataactcgcctaaggtcaaggattcagaacagcacccatgtgactccagagtcatgaacccctggaaaatttttcagatttcctgggatatttgccccaggaatctgaaagatggtggaaagattaactgtatctcaggcacccaaagatacacttatcttgagaaaacatttgactttttgggttttggccctctgccttcagcagatataaaggacaatgtggtacttgtgagagctgctcaaagtctgaatccactgtccttcactggtctttatcagctagcaaaagatcaagtttaagaccaaggaggcaggagaatggcgtgaacccgggaggcggagcttgcagtgaaccgagattgtgccactgcactccagcctgggcgacagagtgaaactctgtctcaaaaaaaaaaaaaaaagcccctgtccacacctccagcagttgccaacatatagccgggcgcggtggctcacacctgtaatcccagcactttgggaggccgaggcaggcggatcacgaggtcaggaaatcgagaccattctggctaacatggtgaaaccctgtctctactgaaaacacaaaaaattagcc

SEQ ID NO: 6131 - DNA, 1147 bp, Homo sapiens
cgacagagcaagaccctgtcaaaaataataataataataaaggcaattgttctagtgatgttaagtgagcttaatgtatcactgcagatgctgaacttatatgataggtgaaatagaaagggtgaatttaaaacagaactttttatctcattctttctttctgttctttttaataaaaggaaggattacggccaggagatacaaccagcactttctgtggtactcctaattacattgctcctgaaattttaagaggagaagattatggtaataaataaattggtggtattattttagctattgctagatgggtggtaaaatgtggtaccaattgcattacagtacactaatgcattttgacgtgatcttattaatataaggattcttgatcctgttaaaaactacatggagagtcccagactttgaaatcgagacagtgggaccttggcagtatttgggggtaccaagctgaataatattttattagtggcaaacactaaacagtagcaggcactattctaagcagtttacatatattaactaagttaatcctcttaacaaccctgtgaggtaagtactattaattctccttttacagttgaagaaactgacatacggaaagtttaaataactcgcctaaggtcaaggattcagaacagcacccatgtgactccagagtcatgaacccctggaaaatttttcagatttcctgggatatttgccccaggaatctgaaagatggtggaaagattaactgtatctcaggcacccgaagatacacttatcttgagaaaacatttgactttttgggttttggccctctgccttcagcagatataaaggacaatgtggtacttgtgagagctgctcaaagtctgaatccactgtccttcactggtctttatcagctagcaaaagatcaagtttaagaccaaggaggcaggagaatggcgtgaacccgggaggcggagcttgcagtgaaccgagattgtgccactgcactccagcctgggcgacagagtgaaactctgtctcaaaaaaaaaaaaaaagcccctgtccacacctccagcagttgccaacatatagccgggcgcggtggctcacacctgtaatcccagcactttgggaggccgaggcaggcggatc

SEQ ID NO: 6132 - DNA, 1147 bp, Homo sapiens; identical to SEQ ID NO: 6131

SEQ ID NO: 6133 - DNA, 166 bp, Homo sapiens
gggcgtgttcacaggtgcctgtagtctcagctactcgggaggccgaggcaggagaatggcgtgaacccgggaggtggagcttgcagtgagccgagattgcaccactgcactccagcctgggcgacagagtgagaccccatctcaaaaaaaaaaaaaaaaagaccaa

SEQ ID NO: 6134 - DNA, 150 bp, Homo sapiens
gcctgtagtctcagctactcgggaggccgaggcaggagaatggcgtgaacccgggaggtggagcttgcagtgagccgagattgcaccactgcactccagcctgggcgacagagtgagaccccatctcaaaaaaaaaaaaaaaaagaccaa

SEQ ID NO: 6135 - DNA, 424 bp, Homo sapiens
tggtggcacacgcctataatctcagctactctggaggctgaggcaggagaattgcttgaatccgggaggcggaggttgcagtgagctgacattgtgccattgcactccagcctgggcaacaaagtgaaactctgtctccaaaaaaaaaaagtgttcttaggaaaaataaacagaaggaaaatattgtagtcttatcaatggttgtattaggaggtgagatttaaagtgcttcttttcttcatgaaatatgccttattctactaatattaaaattttgttattaaattttaacttgtatgtaaattattttaaattcaagtcgtaccttaattgaatcaactctagcaacatctaatgaggacaggttttcttcaagctatttagtggtgatctgtgattttaataataaaggcagttgccaggc

SEQ ID NO: 6136 - DNA, 425 bp, Homo sapiens
tggtggcacacgcctataatctcagctactctggaggctgaggcaggagaattgcttgaatccgggaggcggaggttgcagtgagctgacattgtgccattgcactccagcctgggcaacaaagtgaaactctgtctccaaaaaaaaaaaagtgttcttaggaaaaataaacagaaggaaaatattgtagtcttatcaatggttgtattaggaggtgagatttaaagtgcttcttttcttcatgaaatatgccttattctactaatattaaaattttgttattaaattttaacttgtatgtaaattattttaaattcaagtcgtaccttaattgaatcaactctagcaacatctaatgaggacaggttttcttcaagctatttagtggtgatctgtgattttaataataaaggcagttgccaggc

SEQ ID NO: 6137 - DNA, 425 bp, Homo sapiens; identical to SEQ ID NO: 6136

SEQ ID NO: 6138 - DNA, 31056 bp, Homo sapiens
caaagtaattctttttaatttccattttcactggagagtgttgaaccccgtgaggcatgagagcacagtgttccagaacaatgcttactgctcattatcacaggggtcaaaggctaacgtgcagggattgttgcagatcgtggacatgctgcctcctgtgtccatgactgcaatcgtctacctattttacagttgttgagcactcgtgtgcattagggttcaactgggcgtcctagggctccctggacccattttagaccttgagttcttgagttcctcaaaagagaaatcacgcatttatgttttctcttcttagaccatccaggaggtggctggttatgtcctcattgccctcaacacagtggagcgaattcctttggaaaacctgcagatcatcagaggaaatatgtactacgaaaattcctatgccttagcagtcttatctaactatgatgcaaataaaaccggactgaaggagctgcccatgagaaatttacagggtgagaggctgggatgccaaggctgggggttcataaatgcagacagcagttccgatggctcccagcgagcttgtcactcaattccacctcggagaaggcttttatttttacccagtacacgtgcactgagtgccggctgtgtgtaagatactgcaggggaagttactgagaagatggcagatactggaatgggaagatttaagcggggtaccagtgtttacatggacatgaaaaaatactgagagatagtaagaaatcgtaaagattctgagtaaaagagagtatgaccaaacaagctgagcaggaatcgtgaatctatgtgtgtaggcagtgaataaactgccagtcttattacctggacctcaaggataaaagacatacagtaaaaatcaacccacattgaggacagtttcgagagtcgcgctgctacacagaaagccctgtgtaagttaaggatagagaatgaggtgttctagaactttgaatttttgtgagcaggactcgtgaggttcctgtgagaggaaacaatgaaggatgatagaaaagaagggaaattgattttaaaaaactggagatagcagtgattgtgcctcactgtgcagtgggtttggggccaggaatgttaaattggtaacttcatttaacgcccacaacctttcttcaaagtaggcactgtacagatgccccttgacttatgatggcatcctatctggctggaccccgccgagggtgaaggcgtcattaggtcggatttcagggctaattgaatgtatattgccttcacaccatggcaaagtcgaaaatctgtgttaaatcatgctaagccggggactggctgtgctctgccatcgtacaaataaataaatggaagtcaagtaactcccttgagggccccagctagtgaatggagaggccagctatggccaccactctctgccccagggcgctcaacgcccctcctgtgccatgcagttctgacagggaggcagtgctggtaggaaaggggtgtgatgaaaggggtgcccagcagagggagtcatatccggagtgacaggagcccaacaggggtgcagcgctggaacccaagccagcacctctggtcatggctcctcagttcaccgcctataaaattgtgtggttcccccacaccccttgctgctcagagcagccgcgcacatgcttgtgctgtgcgtgcctcctgtgagatggcctggtacaccggttcctacagtgcgcctcacacgctgtctcggagggaggcagcctgtgcgggtgcctggacctccgagccagaccctctgggttcctgcctggccccgtccctcagcagccagatggctcgggagcacattctccaatccctccgtgtctctgtttcgtcatcttcaaaaatgtggatggcatagctgctaaaaaatggtgacatacttcctaggtggtgcagaaaattaagtgactgtaggaacaggcctcagcagctccttccacttccttggtatgattgttttttaaaccaaggctgggattgtatagatgcagattagttaatgtgataccattaatagctaacctagtgcctgctgcagggtgagcctcccctaagccaccgggaagcggctcctgcagcctccctcacgtgtgctggccctcctctggcagtcattgcctgtggtgtgctgaaggcccagctctgactgtgcctctgtgctctcctcgccccgccccctgctctctctcaggtctttggtctgttgtccgagctgccacagcagcctggacatccctgttggtgtttccagccctgtcctctcctgagttccatccacctgtgcatggctttttcatgagtgttttcacggatggttctgctgtcatctccaacctgataaacaaagcaccacgattcagcccttatgaccccaagcttccttcctcagttccttgcttctgtgcatccactgaagaagcctgttccactgtttccctgcactgggtctcctgtctgcaggaagccttcagccctcacttccacactcctctaagatgtgtgcctgtgcccttctggggaagctcattttcctagcagcctccaggatcttcaggggtgaatccctcctttcccacgttggtactctgtacacacaacatgcccattccctgcctggggagctgggcattgcttcatgaatcagaggtcaattttttctctattaaagtcacagatgctcattgcaccattgtgagaatgaatgaagatagtgcttataaatcagccagcaaggtacccagcctcactgtgtcagggtctccctgggcatgaggtggttagagtgtgtgacatgtctgtccccaagcctgtcagctcccagatcgaagccagtggatctcattcatcctcgcagcgcccacagcacttgcacagggttttgtacacataagtcattctgtcaatgttcatgtttaatgtcatcagtggaacactcccactttgtaaagacttgaatgtgttcatccctgacttttccacatcttgttagttcttctttggaaacagctgtacagtttcaccatcctgtgcatccctggagtctacctgtctctgtcatacattcagattcttcttgtttcgtgtcactctcatatccttttctctaatgaaaagctccgcctgggcatgcaaggtggagccctggatgccagcccctcacctggcatccagggctgtagcactcaggaactgcctccctgccctgcctaccccctacatcatgcgaccattccagtccagccaatcagccccttgggacccagcttaccacatgcatatcatttatgctgtgaccactgactaaaccattctcttccttcctccccatatttctaaatttctaatcattgctcaaagcccaattcagagaaaaccctagctcctccatggcaccatcattaacaattttatctggccgccccccgggaagttcactgggctaattgcgggactcttgttcgcaccatggcatctctttagcagaacataaatgcgaagagcacatgcatccttcatgggaatttaaaggagctggaaagagtgctcaccgcagttccattctcccgcagaaatcctgcatggcgccgtgcggttcagcaacaaccctgccctgtgcaacgtggagagcatccagtggcgggacatagtcagcagtgactttctcagcaacatgtcgatggacttccagaaccacctgggcagctgtaagtgtcgcatacacactatctctgcctccagctcctatgggggacagctctacagcactggggcaggggagagaagccatgtttagtaagtcacattaatcagaaacaaaaagtagtaagcaaaatatctgaccactagaaaagcatgtatttaccacggacatagagatcgtttttttgtggcgggtggcagcccagctggttggcagtgcaggccaccggaggcagatcccctgcagggacagcagagcacttgtgtcctgagaagagctgctgttcatggggctggcagcaccagggcctctcctagcctgccctgctgacactggccagactcctacatgcttctgagtctccagaggctacccggccctcctgaagcaccagggctgaatccacccccagctgagggcatgaacactgccacatggagtcacacacacagctgggcactgccatggagaggaagtctgtccatgtttccttgaatactggtggcctggtccctgtcccattccccagtgaggcagcctgtggggaagcctggcagggaaccaggcgcaggtcagcgtggcgccctgactcaggccagcactgatgggggactctgagacgcaagctcacactcacccagctcccctgggctgcgcccgttcctgatcgcttggactttctgttctttagagtaagaagtgatcaccatttcctgcttctttgtttctccacaactgtgcagtggatgcctgtttgttttctgccctcagaacaaaaaaaaaaaaaaatagagctgacgtgaatcttcaaaatcatcaactacagggctttggatttttgtgtatttgttttattttcattttatggatggattgtgatgaaatgcccgtaatacaagattttccatcttaaccattgtaagttacaatgtcagtggcattatacatccacatgggtgtgtggccatcaccaccgtccacacacagaactcttttatcttgcaaagctgaaactctacccattagacagtaactctctgctctcccttccttcccagcctctggccctggcaggcaacagtccacttgatgtctctatgaatttgactgctctggggctctcatacaggtggaatcatgtagtatctgtccttttgtgtctggcttatttcacctagcaaaatgtcccgaaggtttatccatgctgtagcacgtgttaagaatgtccttcctcttcatggctgaataatattccattgtatgttgacactacattttgtttgtccattcacctatctacagacactggggttgcttccatcttttgactgtttgaataatgctgctgtgaacatgggtattgaggctctttgttttatagacatattattccaccagatacccatcctgacacctactatgtttgcaagaaactgaaagctttattttacattgcaaaatttcatattatgagatcaaggttagcatttcctcagctgtctggtggacaatggggaggttaaactgtgcacattttatttttttttaatgaacctggaacggttatggggccagtgtttgccatggatcaggtcaggcagcccacaatggcaggtctccatgttctgtacaacaactgtgggaaagacccacagagaaagtgctggaaaggggaatgatgggtaggttcatgcagtaaaaagattcaaatactacagggcattgaactataggccaatatagcattgctttaagaataaacaaaaaataagacagtaagaataagcctagcaaaatcaaaagtctataaagaactgacatttcaagccaataagagaataattccttattcaataaattgtctggaatgacttaactattaggggtgaaaatatcaaagtgagagaactataaagggtttttaaaaaggaattaggtatgttgggttagtcgcattggagagtgcaaattcaccatcgacctgatacctgaaatttcctccttaccatctagaggcaagttgggaatgctgccaggctcctgtggtaaaggaagctcctctcttgactggtgctttatggctacacgttcctgctcagaatggatctcatttagtcttcaccaaaaaaaaaaatctcatgagatgatttaagtgttttatggacaagatgtctaaaactcagaaaaatttcacagtgtgcctagcttttatgtttatgttgaagttgggcattagaagttagaatgaatgggtttacttcagagaaaattaaatccatcacccactccttgtactatgaattccaaatacatattaaatacatataataaaatatttaatatatatgtaagtgccagaaggaaacataaatatgaatattttgtaatatcaagttgaagaaaagccaaaatctgacatcataaaagaaaactttcaagtaaaatatgttaatggctaccaggaaaatattgtgcaatgtctgattgccatgaagagggttaatatccttgctatatcactctgtgaagtcatctttaaaagactaagaaaaagatgaatctcttaataaaaacctggcccagaacatgagcagcctctctctctcactctcactgtctctctttctgtcacacacacacacgcacacatacacacacacacacaaatatggccaagaaataaagtaaaatgttatttctaatgtaataagtaggtcaaaatagaaaaagaaagcatcacaccttcctttgcaaagtatttgggttccttttgcttttaaacacctgggtcagctggggtgtcgagaaacagaaattctcacgttctgcttgtgggcatatatgttaataaaaccaagcttggcaatatgcctgcaatatgtatctaaagcttcaaagtatgtatagctttgaccaatcaatatcacatttcggaataagagaaaaagaaataatgaaagtgaaaatcataagagatgtagaaacatattcttatacaagaattccttgcagccttatttataataaattttgtgaacaaattatatatctaaaaataagagattggttgaaaaaattatgcagcagccatgctattgataatcatgttagatagaagcatatttaaaggcatggaaaaattgccatgttttatatgggtttttaaggttataacacaatgtatagtgggattccaattcctgtatatacatagacttatatgtctatattgattaactctggatgagtctcatgtcttctttttgctttcttctattatccatattttatacgatgtgcctgcatttcttttttgtaacagatggtcaatactagaatcataaacagatcttgtttgtttattggcaaatgtttcccgttagaaaaagatgcatttttcttttaaatatttttattttatacaatgattacaagcttataatagaaatttgaaaattatatgtgagtacagggtaaaaagttgaaagaatgggattgcacgctacagatctagctgcttttagcacgcctgcgtaggaccttgctttctctagacctctgttgcagtctctctgcctacctcctcacaacgtccatcccccgcggtcactgtcgtgatgccagcctccccggccttcatgtctctaaggagcaccagcgcggcaattagcgccctttgccttggtggtattctggcttcacagtcacatgggagatcaatcgtcagcttttctgtttgaaatctaaattcttcctgactgcaggggacctcgggacccatgaacacctctagtttactatgtcttcacagtaaaagatatctgcatgactggactctttaacaaatttggtggttaacctactctttctatatagatatagcacttcgaccttcagacttctcaatactgataaaaagaaaacacgacagatgacaggaaaacctttgcagctataatttgtaatcggccaattataaaaactgcaaaaattgaccagatagctaaggttttacacagtcatgaaagtgatctgcactgttaacatttcaccctctgtgcaccattctgtgcttctctctggtttggagtctagaaggttttatttacaggctatgacttaacaatcccagaacggctgacacatgcagtcactcaagactggacacagcaaggaagtagtgggtccatgccaaaggctcagccagacgagacactctagctgtggcaggagatgccagggaatgctccaagcctaagcagattgtaaacaaggaacctcaaattcatgaaaaattcttgcttatgtggcccatgtcagtaattactctctgcctcagtttccgcagctgacatgtaaataaaagcagttcatggttcatcttcttttcttatcggggtctcaagtgattctacaaaccagccagccaaacaatcagagaataagttgaaaagattgtcttcatttattgaatgtgcttaactcaggcccgggaaagggcgtcatcagtttctcatcatttcactgagatatgcatctattacttttacatttcaggccaaaagtgtgatccaagctgtcccaatgggagctgctggggtgcaggagaggagaactgccagaaacgtaagtcagtgaacagcctcagacccatgtgtgaccgcccctctcttccttcacttgcttaggtgattggatttgttttccctctgaagactccaaagagttactttattacagggtcagatgtgaaccagtaggtgaaggacagtcttgcaaatctcaccgcatgcagttaatccagggtgggctattttgggagcttcagcctatcacaaataagtgaacatcagcaggggctgggcgcggtggctcacccctataatcccagcactttgggaggcggaggcggtcggatcacgaggtcaggagatcgagccattctggttaacacagtgaaacctcgtctctactaaaaatacaaaaaattagccgggcgtggtggcgggcgcctgtagtcccagctactcgggaggctgaggcaggagaatggcatgaacctgggaggcggagcttgcagtgagccgagattgtgccactgcattccagcctgggcgacagagcgagactccgtctcaaaacaacaacaacaacaacaacaacaataagtgaacatcagcaagtaccccagccctgtcctctgaacacagcacactttcccaggaatggaagacttgctcctgttgacagcagtcaccagacttcttgtttcctctccctccctggctttctttggtacccacctacacagaagcctgagcacgggttctcatggggacttttccatgtggaccctgctttacgatggagagggccattctcctaggtatggttgtctggctcagcctctcagtggccaaggaacctggggacatgagctcaaaaacggacactatgtccttaagctgaattgtgggggggctgttaggcccttctaaacactacttcccagcaggtatttttgttctttgtatgtgctttctgcattgcccaagatgcatctaattatttagcaggtctcaaagtctagacttgatctcatgagttctcttaagtgattaaaaataaatcaggagaaaaaagaggcaatcagaaaagggcatggtttgacttagtttgaatgtggtttcgttggaagcaaatgtgtcttcactttttcatgaaaaagtctgcaagtgctctgcgacatccctgggaaatgatcctaccctcactcttcagctcacagggaacctttgctctttttcagtgaccaaaatcatctgtgcccagcagtgctccgggcgctgccgtggcaagtcccccagtgactgctgccacaaccagtgtgctgcaggctgcacaggcccccgggagagcgactgcctggtaagatgcccctccagcagcctccctggagcaggctggggctgcacccgccccacccacaccaggacagaagacttcctgtgggggagctgtcaattagcatttgtcataacagacaggatattgccctctgcctggtgacaaagtatctttagtatcctgcctccaccactcactgagaccttgggaaaatgatgggactaccatgcctccatttccttacctgacaatgatgcataacaaagtctctcccagttgaatgcttaaatgatgagatgcctgtgatgtccgtcattaggacctgggcacagaacaagcactaaatactacatgcaagtatttgtcatgaatgtgccttgttgccagcagcacactctctttattgtttgacttcggctatacctctagagacttgacactgtgaggtccctaagagacccatggagagccacacaggtcttgctggctggggctgggttagggcctcctgacacggatccctcggctcctccaccactgctcaggcacctcctgagctgcaccctgccctcaaggggtcctgaagtactcactgtcgccccattgctccagaaagtgccagcagaagccttgctgccccagcgggctctgagcagcactggagggtacaggtcagaagcgtcttggaagtcctggagacgccaaggctggtggatgtgactcctggagtgggagctggtgtgacgaagcccttcctaagactaaatccagagcactctgtggtttcagagaagattcctaaattccagagtttggacccagacccaggaattgtgacttggttggcctgagctgtttctaatgtgagccccagggagaagactgtgcgtggggttggtcctaggaaaagccctcgctgtattgggtctggctcctttacacggcattgttctagcaaggctttctgccattcagcaatacattataaaatataccctcaattgtactttataagggaagcccaatgtcctttataagggaaattaaacataatttcattccatagtcaccgctataatgtgtgaactccatcatctatacgttagtaaacagacgtatttttatcataatccataaattatgataggtgggacagtgcacctaagaaaaaaatggactttttagagaagggtctttctgactctgcagagggcgccagctgggttttcccacactagtggaacactaggctgcaaagacagtaacttgggctttctgacgggagtcaacaccgtgctgcgcttcctccgtgtgtggcgctgagtgtacttacctcacttgcccagcgtgtcctctctcctccataggtctgccgcaaattccgagacgaagccacgtgcaaggacacctgccccccactcatgctctacaaccccaccacgtaccagatggatgtgaaccccgagggcaaatacagctttggtgccacctgcgtgaagaagtgtccccgtgagtcctcctctgtgggccctctaactggtcaggcatccttgtcccgctctgtctcctgctgagccctggagtatcccatcttggagagtctttgggtggatgtgtttgccttgcttggaggaggcgaccctgtgcccgtccaggcacacaggcgaggggaggggctggcttgctaccgaggagcgggcaggtggtggccatctccacccatgggggctgctcagtgcacagggcagatctgggtggccaggccacctcacaggagaaacacctgctgctcagccctcaccactcatccagcagccacagccgtgggtattcagttgtctgctgggcacaaagccgtgggcatgccactgtttagtgcttgtgccaagcaggtatttaatacaccgaaatcagagagtctatcagaagacctgccttcttgagtggttaaaattctagtgaaagttatgcctcttaggagtattgcagaggttttgtttttgtttttattttgttttgttttaatggtttgggtttgagttttgcttgtttgtacttacatttgtactggtggctccagggtttagggaaattgtgacataaaataattcctgacagagaaagcaaaactttgtctaatgaaagagttttagaagccactcttgatctctagaaggggagattaactgagaaaaaaaattgaaagaacaattatgagggggagattttaccctgccagatttgtgtacatgaaaaattttacattccgtatggaaaaaaaaaacacaaaataataagccattataaggtaaatgacaaacaaagctaaagaaaaatgtgccacagtgatgacacagatatatctttgagatagggcttaacagagctttaaaatccataggaaaacacttcgagcctgagataccaagagcagatggttcacagaagaatcatcaatgtcctataaatatttttgaggatcttcttggggaacttaaaacaggaacaggccaggcacagtggctcattggctcatgcctttaatcccagcactttgggagactgaaggggctggattgtctgaggtcaggagtttgggaccagcctggccaacagggtgaaacctcgtctctactaaaaatacaaaaattagccgggcgtggtggcgcacgcctgtaatcacagccgctcaggaggctgaggcaggagaattgctttaacccaggaggcggaggttgcagtgagctgagatcacaccactgcactccagcctgggtgacagagcaagactccatctcagacaaacaaaaaaggaagacatagagctcctaaaaataacgcagaagtctgctattaatacaaatgaattactttaaaggtgagagcaggtggaggagagggctgaggtgcctgctgggacgcaaaacagctggcccctcaagggacccagtgtttcctgccatgatgaaacacctgtattgtccacattgcggcctagaatgttattaaactcttgaacgggattccttctctatttgcaacctttcattctttgtccttaaagtaaataaagccaaaggaggatggagcctttccatcacccctcaagaggacctggaccgcctgtgtgaggcccgagcacctggtgccaccgtcatcaccttcctttcatgctctcttccccaggtaattatgtggtgacagatcacggctcgtgcgtccgagcctgtggggccgacagctatgagatggaggaagacggcgtccgcaagtgtaagaagtgcgaagggccttgccgcaaaggtaggaagcccgccggtgtgcggacgaggcttgttctcggctgctgaggctgggctctcatgccacctccaaaggaacacatcttcctcttctcattaaaaaacaactatacatatcgtttctttaaaacagaagataaagctgtaaagctaggttaggcaatgggaaggcactgaaggttgtgacggggtggggggctctgatgagaacagtcacagagccagccccgctcagcagctgccaggtgcccagccctggggagaatccagggaaggcagagctggaagcagtgcagctccaagcggcccatgggaaataatgaggagaacgcaaggtcagtgtgaggtgacagggatggcatctcctacaccgccgtagccccaaagtgtactataggtcctggtgtccccccttcccgcctgcactctccccagccccttcagtgtttgttgagtgaatgaaggatgatgtggcagtggcggttccggtgaccggaattccttcctgcttccctctgcctgtggatccctagctattcttaatccaacaaatgtgaacggaatacacgtctctcttatctctgcagtgtgtaacggaataggtattggtgaatttaaagactcactctccataaatgctacgaatattaaacacttcaaaaactgcacctccatcagtggcgatctccacatcctgccggtggcatttagggggtgagtcacaggttcagttgcttgtataaagaaaaacaaaatctgcctttttaactggtagagattggtgatcaataatcaccctgttgtttgtttcagtgactccttcacacatactcctcctctggatccacaggaactggatattctgaaaaccgtaaaggaaatcacaggtttgagctgaattatcacatgaatataaatgggaaatcagtgttttagagagagaacttttcgacatatttcctgttcccttggaataaaaacatttcttctgaaattttaccgttaatggctgatgttttgatatttttcaaaagtgcagtttctcctgcaggcaaaaggggacacgttaagtccaggcttgggtcattcactgcggtgtaaacacgctttctccctcccgcccggccccagccagctgccttggtggcccataacccctgagggtagagggaggggacaggggtaggtgacaggcagcctgggcctcaggcttttgaaactggacgccagagccttgtggggccacgggcaagcctcgggtctatgactgccgcctgagctccgcttccttcctctctaaaatgggaagattagaccaaaataacaagactgttttaaggttggaatcaaataaggaaaatttgtaaagctccttgtatgtgataccagatccacaattggcagataatcgcagcaggagcctcttcggggtaatcagatacgcggcgcagcaggggtctcagggccacagccaggggggcggcgggagacatgcggaatcgcagcggaaggcgggaggcagctgtgaactgtggctcggcctgcgtccgccctgcgcatgtacactcagagaagatgataatgaaaaagaaagcaaatccaattttcccacttactgttcatataatacagagtccctgagagtctagagtaatgtctcatacaaaaaagaaactcctacgtggtgtgtgtctgaagtctttcatctgccttacagggtttttgctgattcaggcttggcctgaaaacaggacggacctccatgcctttgagaacctagaaatcatacgcggcaggaccaagcaacagtaagttgaccacagccaaagcctggtagattacatttgcctttttagttggaaattaggcttaacaggagagttgctaagatagggcacagagctcctgcatctctcgccggcattcccaaatgctatctcacatgagcaggcacagggagcaagactgcacgaccactggcacaggctgtccgctaaaccacagacttctcagcgctcgccagtgcttctgcttctgtgtccactccagatcccacattgcacttagttgtcaaatcttttcagtccatttctaacctatattagctcctgtgtctttccttgtctttcacggccttgacacttacaaaacgtgtgggtcaggtactttgcacactgtctaaccatgtctgttcagctggtgttttctcaggatgcaattgaggttatgcacatcttatcacagggaccagagagactttttagcaccactcttcaagaatttccactttttcagctttgacagtggaatagacatgcaggtgctcacacacaagcatctttaatatggtaatggtaatcatcagtttagtggtgtggaggaggagatgggaatctcttagtgaaacccgccttggaagcagcctcgttatgagaactgctgcccctacttgactcttaaagcactagataatactgtgcaacattaaagagaataagagtgcgtgaaatatgcattgcctcccataaactcccttggctctgaatctctgatactaaatatgtggctaccgttgcttcccagaaaggcctttttgctctgaattctctggaatgctttctttgaccaagattcttataaaaataagagatttagagcaattttcttggatggctggtatgagccagttggcttagttgtagggatttaaacaagataagggttacttacttttcacatttaatgagaagtctggtgattccagctcctactgagacagggtggccacacgttccagggtgtgactcactgaggccccagacctgccctgcaaggaaaacctggctctgccctggtgtcctggcctccctgggcatatgtgggggagaattcctaatggtattggttacaggctcctatgcgagaccactcatctgtgtaggagaaaggaaaaagatgggggaaagaagagcagcagggagaggagaagcctctggatgatactctaaccccctgccatccaacacctgaacatcagtctcttcatccagtgctctcagctggcccagcccccagcctggggtcagatgagagcttcctgcaaatgcagatctctttcctgtggctccttctcaattacagacagctcctccacaaggtgcactctggccttgtgctccctccccaaaccagcccagccctcccagcctgcatcatcgtggtcctgtaggggctagaggttctcacacccatcgtggtctggcagaggctggtggttctcacacccatcgtggtccggcaggggcttagtggttcttatacccatcgtggttcaggaggggctagtggttctcacacccatcgtggtctggctggggctagtggttctcatgtccaccgcgtgctttcctgctcctccaggtggctgaggacatccccccttcggtctgaatgacttccatccagtcatctgatatacacattggaccacccaatagcatcctagtgtcatgttggatggtgaagaaaatgccacagttactgctttcagggcctcacaaccttgggcatagctttttggaggaaggccccacttcccaggcatccctcccagacctggtcagaggcccctgctctttgcttccatgttgcccacactcactgtgctcttcacaccggctcaaaatgatctgcttacggggttgtgtcaccaccagatcaagcgtcctggagaggaggaaacatatttaacctgcacagaatttgggacagagaacctctagtgtttgttcaataaatatatgaatggatagagggacaggttgggtggtggatagatggatgaacccacacctttgaagtgtatttggctgtttgagaggttagaatatgttctcaatttccaggcaaaatgaaaatggagaaaatataatgacattaaggcattttattcatcctccccatctgccactgggttaaagatactaaataaacaaggaactatcttttgcctggaggaactttaaaaacacctgcagttttcaaaaggtgcagtgtgtgcctcccacagcatgacctaccatcattggaaagcagtttgtagtcaatcaaaggtggtctggagaaacaaagttttcagggatacattgtttttataatttttcaccacatgatttttcttctctccaatgtagtggtcagttttctcttgcagtcgtcagcctgaacataacatccttgggattacgctccctcaaggagataagtgatggagatgtgataatttcaggaaacaaaaatttgtgctatgcaaatacaataaactggaaaaaactgtttgggacctccggtcagaaaaccaaaattataagcaacagaggtgaaaacagctgcagtaagtcaccgctttctgtttagtttatggagttggttctaatgggtcctttatttgtatttagaatattgaagggctattcccatttaaattacttttttcagttccttaagaagcaaattaaaatcttaagattcctaactgtgaaattaccatgtgaattccattaaaactttttccagatcattaccattcaatgggatgaatttaccctgaggtttaggctaccaattatttgtaatgtaagtaactaaatttagtattagttatattaccttttagttgtaggtcactctctgctcatttcagcctgtaaagactacagctacacacatacacacacagaggaatggaatgagcactttacatcaacacttcctgttctggctctagagcctcagcttttgaagctggtgagagcctggcctgtgctgggccttggccacgggcagcgtcagctttgagtcaagtgctggtctggcctccctagctttgagcctctgtcaattcccttaatctgtttaggctttggcttcctcatccatagaatggagatatgaatgattcctacgccgtagtgctttgagagaattcagtgaaattcctgtgtgtaaaacccttccatggtgcctagcacacagcacacagccaatggcccaatggctcctatcagctgtgggatttgtcatcagaacaccaccagctctgctccaggctgccctgggtaccatcaaaacacaccctgtgcccagcagcacctgctcctctgcacacctggttccttcagcaggggcagtggccgtgggagcacagaaaacatggagtcccatctggtttaattgatgccattgccaaaggggaggactcacggcaccccctctcgggtgccagggtgcctggctcccaccaggaggaagacctgtcctccactgtcaggcacatttcagtcttcccagcagccagcacaactactttgtccttccagtcacggtcggcctctgggaagcccagtctgtgtcctcctccttcaggggtagccagcatgtctgtgtcacccaaggtcatggagcacagggcccctcccgggaaggtgccgtctcctccggcccctcgggtccctgctctgtcactgactgctgtgacccactctgtctccgcagaggccacaggccaggtctgccatgccttgtgctcccccgagggctgctggggcccggagcccagggactgcgtctcttgccggaatgtcagccgaggcagggaatgcgtggacaagtgcaaccttctggaggggtaggaggttatttctttaatccccttgcgttgatcaaaaataaggctccaggttgttgttatagctttacaggcattctgtttgattttctcttccttttattctttgcccttggcttttggaggttttgggttttctgtggggagacgggaagttgtttgattgcgttatttttggcaaatttaagcacaataggaaataagcaagtattattgcctaatataatccaataatttatagaatctcttttcctggaagtatcttaaatttttctaagctacaaaaagttcctaagacaaatgagacagtcatcaatggttcatctagccaacaccgtggccatttgggcttttctttgtagtgcccgattcctggtgtgtgaaaataaattaacacaaattatattgccaagttaatatctgttttatgtgcccccagcatgtgttgaacatcaaacagtaccagggactttaaatatacccacggacaaagaaataattcataatgatgtttgttgaatttagttgcaatcaataaaaagtgcagtttgtgaatgctctgaggttcttgatattgatgtaaggctttgaacgacaaatgaggacaaaacataaataggaaagtaaaactgaaggatagaggccaaggccatgttttagaagatttaaagaaaaagggaaatttggtgagcaccataggaattacagatggctgtaggaattcttcctgttttactctctgggcatggaccacagcttggatccagaaatatttaggagcaggataagaggaccaagttcaattctataggaatcctttagctgataggctcagaacaaatcacataattgatagtgctgcttcaacttcaagtaaggaatattgatgcaatccttacagctacaaatggacagtggtctcatgttttcagttttcaagtgtttcttaagaggcaaggtgatgaaaacgcccacgtggggagccccatgtccttccattagtgtagagaaacctggtgtccagcagcacctgctccctctgcaagcccagcccccttcagcaagggcagtgacccagagaagaagcacagaagacacaaccctgtatcacattttgtttaatggtgccattgaccaaaggggaggatgaaaggcacacacttttttgttgttttttgagacagagtctcacgccatcacccaggctggagtgcagtgatgtgatctcaactcactgcaacctctgccccctgagttcaggtgattctcctgcctcagcctcccaactagctggaattacaggtgtgcaccaccatgtccagctaattttttgtagttttagtagagacggggtttcaccacgttggccaggctggtctcaaactcctgacctcaagtgatctgcccgcctcggcctcccaaagtgttgggattataggcataagccactgcacctagccaaggcacacactttggagaataaacactccttgttcgctgctggagggtagaactatgcttgactactaggcagagtccagtcttactgacaaacagccgtacatctgttctgtcttttcaatcaaacatcagcttcttgcttaacattgatgtgtacatcttgagggatgtcaaaatattgtaagctaagtttttcatacctgtgttccacactcaccatttttagtaataaccattgagcgagttcattctccctccttcctttttctatcacttaatctaaaattatcatttttccagcttaattttgataaccatgaatctggtattagaggcagggaacacctcctcaggactatcttttcttttatcatttggcttgcttacccaatatgcaaaaactatgctgtagaaaaagcagaaaagatatcttgattatgaatgaagctcctgtgtttactcagagagaagatgacccaggattcagttaacaaaatcagctgattatattactatatagtcctggagtcccaactccttgaccattacctcaagttatttggaattttgaagaggtgatttgtgttcctgcaataatgtctcaggggtgggctgacgggtttcctcttcctcctctcagtgagccaagggagtttgtggagaactctgagtgcatacagtgccacccagagtgcctgcctcaggccatgaacatcacctgcacaggacgggtaagagccccttgctgctatccacgtccatttcatgggaagggccttcacagaagccgaacagtgatgatggcccagggcatcctgtgtgggcaggacggccatcagagccacttcccagaggagacggcaggcgctgacagcgctgtccgggcagggtgtcggtgacattagcacacacattagcctgcgatgaacattcactctttctgctgacacccccaaccttatctaagcttatcaaatcctcacatttaacggaggctgttttcacctggtttcccccatccctgacctagtcagcattgctttatcgctttcatcaaacatcctcaaattcttaacattagcttgtaattaattgaagaatttttaaagaaattgctagcaaaactttttaaactgcacaactttgtatctatatgttcaataacatatagatacaatattctttacaataatcttttaaagaatatgagtgagaattcgggcccctctcacaccaaatgtcctgatgttgttaattctcaatgttattatatagggagctctgttttcttgtgagcttcaacagccagttctaaatctactaactgaaaacattttttagacattctctaaattgggcagaagatgacaggactgtgttttgagggataggctgccagcgtggctgcttacaaagtaaagacttggtttataggtttgcatggtgttgggttaaatttctgtcattaaaataattggcgatattgacatagtcatctaattatgctggctctgggcacacacagcccttgagtggacaaaaccaacatgagagaacttagccaaggggaaagcctttccctgctggttttatttctgctacttctgaagtgtggggcacacaacctgagcagtgcttttatttgagtcccaatgcttttatttgagttttgcaaggttattccaagttttacaaatagaaggtagcgtatgactcagtccttgatatgccaaccactgcacagagacttgccaccttcctgtcactggagaaacactcatgtgggttttcttaaatttgcctccctctgagcttccctttaacttcaactataatatgcaagaaagactatctgaccataaatacacatttgggccaatcaagatggttttgccaaggaaagatgcccacaatggttaagcagaatgcaataatgtagagaatatcatttctttcatgctggtgtatatcatatgcattcaaaaacagggagaacttctaagcaactaacagtgaccatatcaagcaggtgcaatcacagaataactggttttctcctttaagaatttttctatcatttggctttccccactcacacacactaaatattttaagtaaaaagttacttccattttgaaagagaaaagaaagagacatgcatgaacatttttctccaccttggtgcagggaccagacaactgtatccagtgtgcccactacattgacggcccccactgcgtcaagacctgcccggcaggagtcatgggagaaaacaacaccctggtctggaagtacgcagacgccggccatgtgtgccacctgtgccatccaaactgcacctacgggtgagtggaaagtgaaggagaacagaacatttcctctcttgcaaattcagagatcaaaaatgtctcccaagttttccggcaacaaattgccgaggtttgtatttgagtcagttacttaaggtgttttggtccccacagccatgccagtagcaacttgcttgtgagcaggcctcagtgcagtgggaatgactctgccatgcaccgtgtccccggccgggcctgtgttgtgcaatgctgcacatcacaacaggagggtagggggacaaaagagcacaggtcctggcagctgccacagtctccaggggcttttgcgtttctctccagatttctaaggttaacatggggattagctgttttgcaatgaataaaaggtaacattgcctggaatgttgcttaaagacacttttttaaagctagttgattgttaagctgttgctacttaaattaaaactactttgggccagacgcagtggctcacgcctgtaattccagcactttgggattccaaggcaggcagatcacttgaggtcaggagcttgagaccaggctggccaacatggtgaaaccccacctctactaaaaatacacctgtagtcccagctactcaggaggctgaggcaggagaattgcttgaacccgggaggcagaggttgcagtgagccaagatctcgccactgcactccagcctgagcaccaagagcgaaactctgtcgcaaaaaacaaaaacaaaaaaaaaagctactttgactggaattagcagaagcactctgattgtgtgtatcttatttactggaataataaagctgtcaatcaaactggatcccactcaacaatcagaaagagaagttgagctgtcatatagtagttcacacttacttctgtttctcaaaatcctcagctttgtttggaactgttactcattctttctctgaatccatctgtatgagttgtgtgcccttgggcaagggtcttaccttctctgtgcctcactttcttttctgtaaattgggataataatgctgcatagctcacaggatttttatgaccatgagttaagatatgtcatatacttaaaatggtgcctggaaaatggtgaatactgagtcaatgatagcatcattgatggtgggatggtgatgaggaggtgggagtcacaatggtggtgttgatggtggtgatggtggtgaggaggtgggagtcacagtggtggtggtgttgatggtggtgaggaggtgggagtcacaatggtggtggtgatggtgttgatggtggtgaggaggtgggagtcacaatggtggtagtgatgatggtgttgatggtggtgaggaggtgagagtcacaatgttggtggtgttggtggtggtggtggtgaggaggtgggagtcacaatggtggcagtgttggtggtgaggaggtgggagtcacaatggtggtagtgatgatggtgttgatggtggtgaggaggtgagagtcacaatgttggtggtgttgatggtggtgatggtgatgaggaggtgggagtcacaatggtggtgatgagggtggtgatgatgatgaggaggtgggagtcacaatggtgtcagtgttgatggtccgatggtgatgaggaggtgggagtcacaatgttggtggtgttgatggtggtgatgatgatgaggaggtgggagtcacaatggtgtcagtgttgatggtggcgatggtgatgaggaggtgggagtcacaatggtggtggtgatgacggtgttgacagtggtgacgaggcgggagtcacaatggtgtcggtggtgatggtggtgaggaggtgggagtcacaatggtggtggtggtgatggtggtgatggtggtgaggaggtgggagtcacaatggtggtggtgttgatggtggtgatggtggtgaggaggtgggagtcacaatggtggtggtgttgatggtggtgatggtggtgaggaggtgggagtcacagtggtggtggtgatgagggtggtgatggtgatgaggaggtgggagtcacaacgttggtggtgatgatggtgttactggtggtgacgaggtgggagtcacaatggtggtggtggtgatggtggtgaggaggtgggagtcacagtggtggtggtgttgatggtggtgatggtggtgaggaggtgggagtcacagtggtggtggtgttgatggtggtgatggtggtgaggaggtgagagtcacaatggtagtggcgatgatggtgttggtggtgaggaggtggaagtcacggtggtggcgatgatggtggtgaggacgtgggagtaacaacagtggcagtgacggtgattgagacatgatgatgatttgtcaactttctaggaaaacaatcatataatctccaacagtgatatcttaatatcttttccaaaagtatcagatcatattataagggccaagtttccagaataatatcagacataatgacagtggacatcagagcttggcatctaaaggtaatgggaatagctctaatgtctcagcgtgaaaaacaacatttgctattagtctgagatactaattatctagttaaggaagtactcacctatacctagtttttaactgttttttaaaatctggaattgattttgaattttaacaaatatttccctgggaacaatgtaagattcttcatattttcgcctttgggtataccaacatgccagctctgttggccactttgtgagctcgatgaagcatggtataaaagatgctttgctagtgtttcacgtaatctatttctataagcaattttggagctaagcctctgaaacagaattatattatctgtatagaataaatgttttatcttcccccttttctttcttctggaatagatgtgcatcagtatctctgcatcaatatctctatatcagtatctctgtgtcagtgagcatatgttgctgggcttaggggaggtccagaaagtgattgggttttggcattttcaatacacttactttgtataagaaatagtttgccaaatatagaaagaggggatttagtcaagatttaaattaaaaatgttagtggtcatttttctaatgtctttctattttttcccaggtcctaataaatcttcactgtctgactttagtctcccactaaaactgcatttcctttctacaatttcaatttctccctttgcttcaaataaagtcctgacactattcatttgacatatggaattttataaatattttctttagtatgtgtgattacattcctgattctgagcctttttagatgagtatatagtttgatataatcttgttattgccacctgtgtcttctcccaaagccattaattatataggaattacacgatagaaatgggtttaatttttaaaatacggccaagtgttgatgagagggaaaatttttttaatttctttcactgagtatttatgacgtgcacaacattcctgaatatattgtctctctcatttctcagatgggatgtattgccttctccatttctattgttaaagaaacacttacaggggtttctttaacaacttgtgaacagcagcatcagagcccagactacagcataagcagctgctgattccaaaagccctaccttccaaccgggcaggtgcagccacccagacgagggggaggaaccctggaggaatagctatttcttttttttttttgtcgagacggagtcttgttctgtcaccctggctggagtgcagtgccgtgatcttggctcactgcaacctccacctcccaggttcaagcaattctcctgcttcagcctcccgagtagctgggattacagacacctgccaccacgcctggctaatttttgtatttttagtacagacagggtttcaccatgttggccaggcttgtcttgatctcctgacaagtgatccacacaccttggcctcccaaagtgctgagattacaggcgtgagccactgcgcccagcaggaatatctatttttaaatggaactgtgttttcatagtacacggtgaggagaaagttgctttgaaatctttatcctaataaaccaaataatatgaaaatttgcctattttaattatatgtaacaaagtttagttactgctataattgcaaatatgtataaattccttaccaaaaaaaaaagaatcaagtgggagccagagaataatttttctgacagaattaaataacatgctatagctgcttgagttcatactcaatagtcatttctgcagagttaccgagggcctcatcagcgtcagcaggagcccctcgccttctgacgctctcacatccttctctcctgcagccccgtcctgccactgtccttgtccagcttctcttcaagggtcaactggtctacctttccctacaagtctgtcacagcttcttgttagcaatccctatggttgcccaaaagcattttcagagcctgcataagactgcatcttgtagaaaatttgcagtttcaatctgccctccctctgccgggtgttcccattgtattgcattcagcaggcagggagagactgctattaggtctgttcctgagtgactgctttctgtctcagactgtttggtgtctgtaggaggtagtggggtgggcagtaacgaggtctcctgtatattccacccctacgaagcctgtgtgtttggtttatgaactaagctcaaaagcaccacaggggtaagactgcagtacatgacaccatggaaaagagggagcacccagacccccaaattaagaagagcagtgtagagaacagagacctggagagcagagatagaaactgttaggatcagattatagtgttacaccagggctccccaggcctctcacatattgaaatgtacttgtccatctttctccaggccaggaaatgagagtctcaaagccatgttattctgcctttttaaactatcatcctgtaatcaaagtaatgatggcagcgtgtcccaccagagcgggagcccagctgctcaggagtcatgcttaggatggatcccttctcttctgccgtcagagtttcagctgggttggggtggatgcagccacctccatgcctggccttctgcatctgtgatcatcacggcctcctcctgccactgagcctcatgccttcacgtgtctgttccccccgcttttcctttctgccacccctgcacgtgggccgccaggttcccaagagtatcctacccatttccttccttccactccctttgccagtgcctctcaccccaactagtagctaaccatcacccccaggactgacctcttcctcctcgctgccagatgattgttcaaagcacagaatttgtcagaaacctgcagggactccatgctgccagccttctccgtaattagcatggccccagtccatgcttctagccttggttccttctgcccctctgtttgaaattctagagccagctgtgggacaattatctgtgtcaaaagccagatgtgaaaacatctcaataacaaactggctgctttgttcaatgctagaacaacgcctgtcacagagtagaaactcaaaaatatttgctgagtgaatgaacaaatgaataaatgcataataaataattaaccaccaatccaacatccagacacatagtgattttaattatttaagagtagtttagcatatattgctttatgatttaattaaaaatctccaaaatatatgccaaagaagtagaatgagaaaaatgtatatttctctttcacttcctacagatgcactgggccaggtcttgaaggctgtccaacgaatgggtaagtgttcacagctctgtgtcacatggacctcgtcaagaatgaccacactgctgtgggtgaagatgctttcctgcatttctgactgtcctctgtcctgatcaagtttctatggctctgggccagcctaccctcagccagggtttctgcagagactgcccagctggttccacgtggctccacgtgccaactttgtcctcagtggagggaaagttggacacacagtgctggggctgctccctgctccgccgttgctcgatgcatggcctgcctctgaattccttggttccactggttttgctgggtccttctgtgcctctagctcctctttttttctgtccacttaccccattggtcccatcacaagcctgtgtgtgagtggcctttctgttcgatgacaacctccagcataggggagtgtttctccttgctttctttcccagacacactgcccagcaaaggcaaaagggcttccttcaacatcagctctggccagtttgccagagcaaagccctgagaaaagcaaggttgaaaagtcttattcaaactcaccaggaaagagtggtgttactctcgatggcgtctagccaggaatcatggaattatacaccgagcacctgtttgccattttggatgtttccaaacatgaaccaaacttccaggcccctctgccatctctggtaacatttacaaagtcccttcctcaccactgcccttccttcattttggcatgctcctccgcccccgagttgacagccatagctctctctcctgccaccagtgtcacatgatcgaggaagaaggcaacttcaaaaagactgggtccccttccactcccatctcttcagtgagctgctaggacacccagcagaacttccccactccacactgcaatctcagggatcttagtcacggggctttccaccatgtctccacctggaaaccagtcatggccattccttcttacatctgctcttttccatctttttcttctcctcctgttcacccgcccttactcttgtggcgccctatggatatgcgctccatagcaaatgattctttatatcttacggtattctagtgagctggcacatgtggcttctggtttcctctctctggaactagacatgacctctgtgggagggaggattaaatgcaccctacagtctgaggctgcatgatgacatcactcatcacaatgatgctttctatgtctgaatcctattcctttataacccctttcaagctcgttcagagagtatttcacacaatccatgtgctcatcttaaaagccaaggacccagaggagtctcagcattgccaaaaagtcccttcacccagcctggccagaggcagtgcctggtccatgtgtatggactatggcacttcaattgcatggaaatactcttggaatgaacaaaataccaatccatgaaaaagcattattgaagtctaagttattttttgaatcatattttgttaatcaacaaattgaaaaatactcattatatggagaggtccagataaagcctcaattttaaaaaatgaggaaaagtgtgcctggtaggggactggggagagcttgagaaagttggaaacgttgccttagaagcctgttttttctccttttagaagctacatagtgtctcactttccaagatcattctacaagatgtcagtgcactgaaacatgcaggggcgtgttgagtgccaaggccatggaatctgtcagcaacctcacccttccttgttcctccacctcattccaggcctaagatcccgtccatcgccactgggatggtgggggccctcctcttgctgctggtggtggccctggggatcggcctcttcatgcgaaggcgccacatcgttcggaagcgcacgctgcggaggctgctgcaggagagggaggtgagtgccagtcctgggtgggctcaggagccctcgcaccccgacaggaacaagggccagccccgagaacgggccattagcagttgtgtatgttagatacataattgtattatgatgcagaaagaatctctgaatgtgcagttatacccagttggtgacatgttggtacatccatccgaggaaatggcaatgtttctaggctgcacccttcaatgtccacaaagctgtgtggcatctgcttaggacccggtgcctgtgtgtgcataggagggaggccaggaagcctggctgttgatcccatgctggcactgtggcgaaggcgagagattcctgctttggaaaacaccattgtccacacagtggctttgtccatgatggacttcgccacagcccagtcctgtgctggaagccatgttctctggaaagagcaacccagcggctcataagcataagcgcgtgtgatgtgccccaaccaaacgaccgccatgcacaacttccctaccggagttttcaatccagttaataggcgtggaaacagacatagaaattgtgtttgttgaaaggtagctgttcagttaaagaacacctgtatcagagcctgtgtttctaccaacttctgtcaagctctgtagagaaggcgtacatttgtccttccaaatgagctggcaagtgccgtgtcctggcacccaagcccatgccgtggctgctggtccccctgctgggccatgtctggcactgctttccagcatggtgagggctgaggtgacccttgtctctgtgttcttgtcccccccagcttgtggagcctcttacacccagtggagaagctcccaaccaagctctcttgaggatcttgaaggaaactgaattcaaaaagatcaaagtgctgggctccggtgcgttcggcacggtgtataagg

SEQ ID NO: 6139 - DNA, 477 bp, Homo sapiens
tttttttttttttttgcctcttccacttggtctgcagtctgattcactcctttactttcctccaatatactgacccttgggacttgggtattgctggcctgctttgggccctcaggctctttgcctgctggtttctgagctttccatagtcacagtctggttttaggcagaaactgtacctccatttgcaatcaacccttttgcagctgtgccttacgcttcttactgtgtttttaccaattcatctggaacaaactagaaaaggaacaactattaagtagaaatgaaaccatttgaaggctcaccaaacaaacaaaaacagtgctagtcacaggagtactgtttcccagcctatgactctggagctgactggtggtttgttgttgttgttgcccctggccagatctctgatggtagcctatgtagcaaagttattttagggctagatggctcctttaaagctaatacagtccaacc

SEQ ID NO: 6140 - DNA, 431 bp, Homo sapiens
ccttggttcttctttccgcagtcagttctaatgtaagatatgatacacctttccatctttggaaccccactatatacccttatttctacatgttctgtactttcctgggaaggggaagtagaaaagggaagaggttaatgttctttctggaatgtccatccacaatgtggtgattctattggagaggtaaacaagactcctgtaatcagaagggacagctgatggatctggataagaaattcgaaatctcgaagcttatgaatgtgcaatagatgttatttaatgctcattgtaaattcagattttgggcttctttatacttaaaggaggctttgaattttaaggctaaaatagaatcatgcatcttctttggagtgtttcttaccgaattattttttattttgctggaagcttttattgaagtttaaact

SEQ ID NO: 6141 - DNA, 697 bp, Homo sapiens
attgaggattacagaaagaaaaaaagcatttgctttatttttagacgtgatctctgatgtcttcaacttttatcgttctgtttttaaccttagattattataaccagccacctacaaaatctgcaattttctctaataagtcagcacctgttaaaaaggaggttgcacaaaacactcccatttgcagtttggaaggattattatctgctttggtctgtgaagtggaaagtcaatgttcttattcaatctgtgtctaatggtgtcattttgaggacaatggaaaacagatcatgtttgattccttaagatgtggccactgctatttgtggtacaatttgtgatctgagagctgcatgtaaaaaacacatgagcaaaaagaatatccagcacacaagggctggctttctgattctcagaggtatagtgacaacacagcttacctctgcattcaaagaagctagaacttaccgcggataatcattagtagaagacagcttaaagtagtgtctgctttctggctaggcctgattcacaggtgctgtgataaattcaaaaagacctgcctcctctgatgtgctagtatcaagggtgagggagacagttaaccaaactggtcaaaagcattgtcagcaaagacctggtgctgaatcatgttgggaaactggagtttggagctagagaggcaataccaagtatc

SEQ ID NO: 6142 - DNA, 323 bp, Homo sapiens
gtgaagtctgttttctaattagcacagtagtccctgcttctccgaggtttcactttctgcagttttagttccctgcagtcaaatgcagtccaaaaatattaaatggaaaattccagaaaagaataattcctaagttttaaattgcatgctgttttgaggagcaacatgaaatctcataccgtcctgccccaccccacccagggcacgaagcctccctttgtccgtcaactctgctctgtatatgctacacgcctgttagttacttagtagctgtctcggttatcacatcaaaagaaaaaaaatagagcgtgtatagagtttgg

SEQ ID NO: 6143 - DNA, 1362 bp, Homo sapiens
ctaaacaagattaagtttgaggctaaagaagctaagaataagaaaatgaaggcctcagagcaaaaagaccaggcagctaatgaaggtccagaacagtcctctgaagtaaatgaattgaaccaaattccttctcataaagcattaacattaacccatgacaatgttgtcaccgtgtccccttatgctctcacacacgttgcggggccctataaccattgggtctgaaggcttttctccccctcttaatgcctttgctagtgcagtgtattttttcaaggtgctgttaaaagaaagtcatgttgtcgtttactatcttcatctcacccatttcaagtctgaggtaaaaaaataataatgataacaaaacggggtgggtattcttaactgtgactatattttgacaattggtagaaggtgcacattttaagcaaaaataaaagttttatagttttaaatacataaagaaatgtttcagttaggcattaaccttgatagaatcactcagtttggtgctttaaattaagtctgtttactatgaaacaagagtcatttttagaggattttaacaggttcatgttctatgatgtaaaatcaagacacacagtgttaactctacacagcttctggtgcttaaccacatccacacagttaaaaataagctgaattattatttcatggtgccattgttccaacatcttccaatcattgctagaaaattggcatattcctttgaaataaacttatgaaatgttttctctcttaaaatatttctcctgtgtaaaataaatcattgttgttagtaatggttggaggctgttcataaattgtaaatatatattttaaaagcactttctatttttaaaagtaacttgaaataatatagtataagaatcctattgtctattgtttgtgcatatttgcatacaagagaaatcatttatccttgctgtgtagagttccatcttgttaactgcagtatgtattctaatcatgtatatggtttgtgttcttttactgtgtcctctcacattcaagtattagcaacttgcagtatataaaatagttagataatgagaagttgttaattatctctaaaattggaattaggaagcatatcaccaatactgattaacattctctttggaactaggtaagagtggtctcttcttattgaacaacctcaatttagtttcatcccacctttctcagtataatccatgagaggtgtttccaaaaggagatgagggaacaggataggtttcagaagagtcaaatgcttctaatgtctcaaggtgataaaatacaaaaactaagtagacagatatttgtactgaagtctgatacagaattagaaaaaaaaaa

SEQ ID NO: 6144 - DNA, 797 bp, Homo sapiens
gtttcttatatacatataagtatataaataagtgattgtttattgcttcagctgcttcaacaagatatttactagtattagactatcaggaatacacccttgcgagattatgttttagattttaggccttagctcccactagaaattatttcttcaccagatttaatggataaagttttatggctctttatgcatccactcatctactcattcttcgagtctacacttattgaatgcctgcaaaatctaagtatcacttttatttttctttggatcaccacctatgacatagtaaacttgaagaataaaaactaccctcagaaatatttttaaaagaagtagcaaattatcttcagtataatccatggtaatgtatgcagtaattcaaattgatctctctctcaataggtttcttaacaatctaaacttgaaacatcaatgttaatttttggaactattgggatttgtgacgcttgttgcagtttaccaaaacaagtatttgaaaatatatagtatcaactgaaatgtttccattccgttgttgtagttaacatcatgaatggacttcttaagctgattaccccactgtgggaaccaaattggattcctactttgttggactctctttcctgattttaacaatttaccatcccattctctgccctgtgattttttttaaaagcttattcaatgttctgcagcattgtgattgtatgctggctacactgcttttagaatgctctttctcatgaagcaaggaaataaatttgtttgaaatgacattttctctcataaaa

SEQ ID NO: 6145 - DNA, 290 bp, Homo sapiens
ctgagccttccactggtgtgactgagccgctaacgcctcatcagccaaaccaccagccctccttcctcacctctcctcaagaccttgcctcttctccaatggaagaagatgagcagcattctgaagcagatgagcctccatcagacgaacccctatctgatgaccccctgtcacctgctgaggagaaattgccccacattgatgagtattggtcagacagtgagcacatctttttggatgcaaatattggtggggtggccatcgcacctgctcacggctcggttttgatt

SEQ ID NO: 6146 - DNA, 302 bp, Homo sapiens
tggaactcaggtaacaggtaagcttctttgactgaaagtaacagaaaatccaactcaaattggcatgaaaacgataacaaaaaggcagggagggctctcaggttgatttaatggttcgaagatcaatgaagatccaggctttcactgtctctctgttctgccatccttggtattggcttctccaaaggctgcttttcctcttggtcaagatgactgccagagcaacctaagcaatgctttttgtttgtacctagtgggagagtactgacttctccttcccagcaagtctctcctcacatccc

SEQ ID NO: 6147 - DNA, 412 bp, Homo sapiens
gtgatatatattagggtgtggggggatctaacacaaatcttgattcatgtcttgaaaactttttatttcaaaggatggaaaaggttgcattcttcattcaacacattagtcatatgttcttctgtgttaacatatgacaaatttccatcccgaatagactgatgtttttgtaagattggctggttatcatagcaattacaaccacgcgtgtgggtgtgtgcactcacgtatgcatgcttgcttcatacgttaactcataaaataactaggttcaatgtatggcacctaagccacaggttaatttgctgattattaacctgtgcctctggtgagggcacagaggtctggccaaaagcagatggaccttattcacccaaggagagtgatcatggtcctgccattcctgcctggg

SEQ ID NO: 6148 - DNA, 412 bp, Homo sapiens; identical to SEQ ID NO: 6147

SEQ ID NO: 6149 - DNA, 412 bp, Homo sapiens
gtgatatatattagggtgtggggggatctaacacaaatcttgattcatgtcttgaaaaatttttatttcaaaggatggaaaaggttgcattcttcattcaacacattagtcatatgttcttctgtgttaacatatgacaaatttccatcccgaatagactgatgtttttgtaagattggctggttatcatagcaattacaaccacgcgtgtgggtgtgtgcactcacgtatgcatgcttgcttcatacgttaactcataaaataactaggttcaatgtatggcacctaagccacaggttaatttgctgattattaacctgtgcctctggtgagggcacagaggtctggccaaaagcagatggaccttattcacccaaggagagtgatcatggtcctgccattcctgcctggg

SEQ ID NO: 6150 - DNA, 412 bp, Homo sapiens; identical to SEQ ID NO: 6147

SEQ ID NO: 6151 - DNA, 411 bp, Homo sapiens
ggtaaagcattttcatctcgtgggtaaccagcagtgatccggccctcaccgcatccactgtctatgatgccattcgccacctcatggtaatgaaacccgctaaggcgggcttagcatttccacatgatcgcatttcatcctggcttccttctgaagtaggacaggactgtaggaagcattatcccactctatagagaagaaaggttaacgacttgcttgaagttgcccggcttgtgatctcagcacgaggacttgaagcaaggccatcatgctatgtagtgacatcctatttgttttttgggactgaaattcagagggtgtaaagcttttaagtgacagcttttaaagagagaactaagctttagagctctcagcaactgcatccacagcaaggtcccctgcaccccatcc

SEQ ID NO: 6152 - DNA, 338 bp, Homo sapiens
ccatctgtgtacccagagccaaaacaatgtttaaggaatattttagctgtgatttcatgtacacatctctccagtaattatgtatttacatggccatctccttctaaattgggcactgctggataacagggaccaggacttataaagtctgattcccatgtgcctaggacgctcgctggcacatagggagcattccgttgttgatgaagatgatgagagagatcgtgactcatctcatggtaaattccactagcatccctaagtagaattggctgggcactttttaaaaactgatgactatttcagaccattacgcccagatttcatctctacatttt

SEQ ID NO: 6153 - DNA, 411 bp, Homo sapiens
ggtaaagcattttcatctcgtgggtaaccagcagtgatccggccctcaccgcatccactgtctatgatgccattcgccacctcatggtaatgaaacccgctaaggcgggcttagcatttccacatgatcgcatttcatcctggcttccttctgaagtaggacaggactgtaggaagcattatcccactctatagagaagaaaggttaacgacttgcttgaagttgcccggcttgtgatctcagcacgaggacttgaagcaaggccatcatgctatgtagtgacatcctatttgttttttgggactgaaattcagagggtgtaaagcttttaagtgacagcttttaaagagagaactaagctttagggctctcagcaactgcatccacagcaaggtcccctgcaccccatcc

SEQ ID NO: 6154 - DNA, 338 bp, Homo sapiens; identical to SEQ ID NO: 6152

SEQ ID NO: 6155 - DNA, 338 bp, Homo sapiens; identical to SEQ ID NO: 6152

SEQ ID NO: 6156 - DNA, 411 bp, Homo sapiens; identical to SEQ ID NO: 6151

SEQ ID NO: 6157 - DNA, 338 bp, Homo sapiens; identical to SEQ ID NO: 6152

SEQ ID NO: 6158 - DNA, 411 bp, Homo sapiens; identical to SEQ ID NO: 6151

SEQ ID NO: 6159 - DNA, 316 bp, Homo sapiens
gacatgaggctatgatcaattcttttccttccccaaccattcccgtagctgtctctatgagtttagtgttaaactgggatgatctgggactctcttctcagtcagcaaaggcagaaggaagtgttttgaattctcccggccgtgagtggctgccatctaccttgctgatgccgcgtgatgcatggcagtaagagttaatgtttcccaagggtcctttagcagtggagatgctggaagagtggtacacgggtttataagttacttaacagattttatgaactgctaattaccttgtaaagacattttattgagctag

SEQ ID NO: 6160 - DNA, 10434 bp, Homo sapiens
ctgcctttttccctaaatataggcacacttgggtggagaggctgtttacccttgaccatccctctattctactcatctggtgcatccacagtgcccagaggatacaaagatatctcctacctgtacaaaattgacattctgaagcaaaacccagaacatatatttaaatccagttagactcatgtctggaaagtggtttagttatctcaatttgctattcgttgatgtccctattgccatcaccaccaccccaacacatgcacgcacacacacacacacacacacacacacacgcacgcactttccatcttgtcttaccctgcacagggatcatgtgctgtcctgtcactcatgaatgactactctgtctctagatattgatgagtgccgggagatcccaggggtctgtgaaaatggagtgtgtatcaacatggttggcagcttccgatgtgaatgtccagtgggattcttctataatgacaagttgttggtttgtgaaggtaagtggcatcatgactttatcatatccagaaaagagctaactgatgagctacttgatacacacttggcgaatttcacaacattgaaatttcagaaatgcattaagctctagaaatagtaaagggcatggtgtggaacaacatgaaatttcatgcaaaaaaaaaaaattcactaacttcagtggaaaaaccaggaggcacattcccagcccctttcccccaacacacagtgtgttaatattagacttcccagctgatatgaaaaagctttgagttcctgggtgtgtcacatagattgctttcgtttcacattgctggaaaatcagtatgagtggacagtcatcctagttgactctcaaaatcatttctcttccagacagagactttgctactcccaagtgaaaacaaggttaatgcagatattccaaatgcatgagagaattccaaatggcaagaacagcaaatttgattttatatgaagaatgttggcatgcacatgtacttttttcattttcaaattacctcctgttgccatgtatatgtactgtgattcggagcattccttatagcacttcatattttttcctgcatctgggaaagatagttctcttacattttagtaaaagggacattactggttattaaatataccatgtgcccaggatagttggaataattttctatttaatacttacacttcaggcctctagcagaatttttattcatgttagaaagggttattaccccttagagcacgtattatagcacatatgtcaacattttaatgttaaaaaaaaaacttttttgtctatactgaagacaacttatataccacaagtaaagttatagtcctaaccacatacttgttaagttcctgtcaccaggctttcagttactgtgtccaagtgggcacatgtcccttactctgcctgctgtgtgagttagtgggaatggggtaatagcccttccgagccttcctaagaagatagccagttcagaccttggcccaagtccctgggctctgggaagccatcaaggatcaggtacctggagaggaagcatggatgtgggagagggaacccacggcagatgatcttacagtgctagagttggctgcctccctcacagccgcacttttccccctctcaaacatgctcagcatgcctgccacctgcctgtggcattttcctccccacccttcccctcagagatggctttgatgatgactgtacccaggtaccttttaaccacttatatttgctgaagctgcaggccttggccagaacccatagacaagaccacccatgaccaccaagtcaacttagaccttgctagatccatgagattaaacacatgcaactgtaccaatgcaaggcattttgctgtcagggtagcattctgtggatattgagataactaagtgctccaacttctgatttccatttcacagaatatccgtcttcagggtgaatgtttaatccagggtcagctgcttcctagcatactcttagctcttagaataggaaaatgaaggttgagtgcatacatgcctcagcaatgctgaaattggaatggattgtagaggtgatttagggagcttccacgcctctgctcttgccaagtagccacattatcagatgccacatcatagaagtgcttctctgtgacactactcagtttctccagtggcgcaatctgccccctgtgtttctatacatcctgaatacaaagcagggcagacctggtgagtgaggtggtgctgggtcccttgtaacccaaggcagacacacttcctgctctgtgtctgttgcccagagaggcacaatccacctgccttagacaggaacccccactgactgactgacagtcttgagggttttccaccacagaatcacgcccaagaggcatcggctgatgtataagccacccccttgtaggaacttctttggtcgagccaacttctgtgtaaaagcccagaactggtactaagggccaaccttcacctgtgttataggccatcccctttattggacttagtctgtaaattagattgttccactggagcagggaagagggaaacatgtattttgccccatgatatagcatggacatgtagtaacttttgtgatgccatgaatttgaactatattagtatctgttttttgttgttgttgtttgttgttgttgttttgttttgtagacagacaaccccctaagcaaagtcaaaactctggaacacacaatatccattatccaaaatcttttctgttttaatgagagttggtttgttttcagtagttttatgataactcccatgttaggttttcttgatttgattgccttgtggtagtaatttgagcaggtgtctttacagccctgtacctcaaagcactctctacagaccaggagcacctgcatcagctgggaacttattagaaattcagactctcaggccattttccagacatgccaagtcagaatctgcattttagcaagatcccaagtgattcatgtggactttaagatttgagacattctgctcttgcagcctttcagacaatagcaaccttattgaatcataaaatccagatctttgagtaaatacaaggcttcctaggatattaatctatacccatgtcaagtgctggccctagcagccaagtttcatgacttttttttagatgtgagcatcattagagtccatatgtggtcataaatcaagccttgcatttataaatattactaagtgggaaagtttagataatggactttcggtcttcctttctttctttcttttttttttaatagactttattttctagtgcagttttaggtccacagcgatattgagaagaaggcacaaagatttatcatatattccctacccctacacatgcacagcctcccccatcatcagcatcctccatcagagtggtgcatttgttacaattgaatctccgttgacatcattatcactcagagtccactctgatgatttacattagagctcgctcttggtgttgtacattctatgggtttggaaaaatttataatgacatgtatccaccattccataactattcatagaataatctcattgccctaaaaattctctgtgctttgcctgtgtatcccctaatctcccctaacccctggcaaccactgattttttactgtctccagagttttgccttttccagaatgttatatggttggaatcatacattatgtcgcctttccagattggcttctgattcgcttagtaatatacatttaattttcttttttcttctttttctttttcctttttttttcctttttttttgtgtgtgttttttttttgtttgttttattttttgtttgtttgtttgtttgttttggacttggagttttgcacttgttgcccaggctggaatgcaatggcatgatcttggctcgctgctacctccatctcccaggctcaaacggttctcctgccccagcttcccaagtagctgggattgcaggtgcccgccaccatgcccagctaactttgtatttttagtagagacggggtttcaccatgttggtcaggctggtctcaaactcctgacctcaggtgatccgcccgccttagcttcccaaagtgctaggattacaggtgtgagcaaccgcacctggccatatttaattttcttccatgtcttttcatggcttgatagctcatttctttttagtgctaagtaacattccattgtctgaatgtaccacagtttatttgttaattcacctatcgaaggacatcttggttgcttccaaattctggcaataaataaagctgctgtacacatctatgttgtcttttcaatagaacagatcaaaataaaatataaatttgttttcatgtgagaggctttgttgactggacaccagattctgttctccttcaaattcagttctcttctgctcgtagatattgacgagtgtcagaacggcccagtgtgccagcgcaacgccgaatgcatcaacactgcaggcagctaccgctgtgactgtaagcccggctaccgcttcacctccacaggacagtgcaatggtatgtagtgccccacaggctggacatgcctacccaagagtttgtcttcatgaagcttcagatatctggatttattttcagatagttaagctgaagaatatatgagttaagatttagattgatgaactctaatattaaactaaattggaaaaagggatattgtcaaaatatctaaacacttagctttttaatcctctttctggatgagatattttcaaaacaagaagtaaatcattcgcatacatagatttcgtatttgcctgtctgctgccctgcctgcaaacactcacccccacacattacacacacacacaattatgcatacacacattcccctaagcaacatttaggaccaaatgatttttttccttccacagaatccctctcagaaaggtgaggttttcaccatcttggctgcataccccaaatctagacagtgaagctctcctgagctgggtcagattaatctgcagaaacagaacaaacaaagccatcgcttttcttcccagtcatcttacagggaaagggtcactcactgaaggcagcaaacatcaacagcctttattagctatttattcccatgacccctagagattagatttttttggtgttcacttttgtcagggatgtgatagaaataggaagcacgttggcatgttatcaacttcagtgtacggtgaagttattcagtatctgatggtatcttgtagccagtggtgtgaaaatttaaaagactgctgtttcagcccagaaacaaaataatatctcagaatgattttcttgtaagtttttaagtaattctgaatctgtatatttagcaaaaatcactgtatatttagcaaagcaaatcattgtatattagtcaggaagaatgtgttattttgctcacggttcatttcacggggggtttcctggatattttatgcatttgtgaatgaaacaacacaggggaacgtggtcagattttccttggatttccttgcctaccagtgattaagtggtaggaagtgcactgttctctttagggtattttgcattgttttatgagaccttggtgggaagagggtgtaattgccaaacaaaaaaatcgcattgagaatcaagacttgttttgttgagtttaaaggaaaatgtgtaagtatttagcattttgtcaacagagctgttgctatccatgtattaaaaatacaggacaggaaaagcagggacgtctctgatatgaaccacaataccctagagaaacttggcattgataccacttccctgcattttgctcataatttatatttctttagaactggatgaaataattccagtcaaaataaagaattgctgataatatagaatgagtcatttcacaccatttcacactcaggtaagaagtgggacagagctatttatagatcaagataagacattcagccatagcctgctggagcttaagtcatttactgttttcttgtaggagactatcatacataaaatgcagccagccataagtgttgtgagtgagcatcatttgcagccaaaagcttgatttcctttattcattgaaatcctcagaagaaagggaattaacttgagttttgcaaccattcagcctgttgggttgaagacctcattctagaaatgtctttatttatgtcttacttttaaaatatctttaaatgctattctatacttggcattttttttttcaggcatgctgcaaagtactcctttgtgcatctgtttaaaatgaaaataactaaaactttctctccatcatgagatccttatttgaattcataagcacattatttcaaatcccaaatcacacctggccatagcacccacattattgctgagagagctgagagaataattagatatctgagctcaggatgctagtctgacagcagaagctggatagttagaacaaatgcaacccccttctgaaatgtcttgccccacaaaagacaaggaacagtttcttcccagctacttccttgtggtttcctctctttctctgttgactatttgggtttctttccacagtagcctgttcagacctcctatcccaacctcaaatatgatcatctaagagttcaaattctggtgcttgtggaaacctagatttctgctctagttttaccagtagaactccaaagtactccccatgtttcatttttcatttatttaaaccatcatgaaatagggcagtagatgaaaggaaattcctaattggggatccctttctaataagatccttaaggctctccatttccttgtggaactcagatatgagacagacctcgtcccctgcatacctccaggtccagtcctacctgaaggtgccaaagttttgggccaactatggtaggacctgagacacccttcctcaagatcggaaatcagtctcctctgcctatactgggaagcagttggctcactttaaattcattttctcaaaagggaataatcataatttgttaaatagcatttctgcataggctagtagtagttcctaagctgctctatttcaatttcccctcataatgatatactccacttcacttggaacttctaaatggtatgatgattcatctactaaataggagataaccataacagtggcatcccggacacatgaaatggaggagatgtccatgattctggcacagggagggttgctgtgtgcagcaaaaagtgtccattcatgattactgtgttctgagtagacattgcaggcaaacggcaagtctggattatttaactaagagcgaaatgccatctgccctacagcatctgcagcaaagatgacactccatttgctttcttctgtgacagtaggaaaatcagaatggcacagtgctcttcaaagtacatttactctaaacatagagctttaaaaaattagagacgtaagttggcatataattatgtcatatgtgaattcatgcattaaattctgcccctcagataatcagatttcaggaaagcaacaaagattcagttgatgataaatataatttagaacttaaagactggcagaagcaagatgagagggcttccttttgaatggatgagagtaaaaagaaagagacagtgttcaggttgtcacatgctaaaaggagccctgtgtagacgtgaatacttggtgaagatggaacaaaaagttacaggcataagacaaaacaaagagatgcaacttgaacaagcagccatgtaggttgtccatcaagaaaaacttaatcttagtcataggatttgactttgatataaatttacaaaggaagccatgaactatccatgacttaaggcaccaaatcttaactagacaaaatacttcaattaattccacagtctgtggtgctgcgtaggccgataatcaaacagaaaatcctcccggcttgaatccccccattttacttctaagttttctcatctttcagaatattttttgattacttacccttattttttattgtgtcaagtattgttaacatactctgactatgcctggtaaatgagagtaagttttaatccattttgatgcaaaaataaatatatctgtttcactaacttagtttagagctaggattactcctgagaatgatagctagaagtaagttattcaattatattttgtcttctaagttctcacttaagatgcttcttatttacagatcgtaatgaatgtcaagaaatccccaatatatgcagtcatgggcagtgcattgacacagttggaagcttttattgcctttgccacactggttttaaaacaaatgatgaccaaaccatgtgcttgggtaagtatgcaattattattatttttttcatatgctgttgaaagcttcatttgattctaaatatggataaaatttaatactaagtcttttagtagtatttttgctatatacaaaataaaaacacagacagatatgcagcagtgatatcctatttaatctttggcaatctgaacatgataaacctcttcctttgttattcatttggctgtcagtttagaaaaaattgactaaggggtaaattgaaaaagatattaatacaaaaatattaatgttaataggctattattcatatgtaatattgatgtggattttcttttgagtttttgagtgtgagatgaccatttttttggaagggtttatagtgtgtaccagattctcaaaggcaaatttataaatcctacaaaggcaaagaaaagttaatcatttttctagaggaaaaagagctcaggattttaaatctctttcctgatttctctattatcaggatgctgatttagaataaacttcagtgtgtaatgaatcattttcttcttttccttcctttatttttctactttaaagcaataccattaagtctttttgggacattaagaacataaatcagattcacagctgaaagaacaattaatatagtaatgtttaagtccttgactttggctatgactgggttcatccatttgggaacatttctcataaagttgtatcttctccagagtaatgacaagagcactgacagccctactcatcactgggcagctaacctgtgtaaaagctatgatgatcctgcccaactttctttctacatctctcatctgaattttctggagccccctaacatagaaccttcccaaccaaagaacttcaccagtttggctaaaaatgaatcaaggcaaaaattcttgattactagcaatgactcatctgggtgtagtcttcaaccacagacacacattagagtccctttgggttagcaatagcttcctgattcaggaatcacagatcatttatcttcatgtccaaaatgtgaaaagaaagggaatcctagctctaatcattacattttgctattctccgttgttaccttccactctctctctctctcatttcatccttgtccctcttcatggtgcctcattctttcaaaccagcagtaacaactttctttcattaaattttttattacttcctccttaatataatgtgcatctactctttataagaaatatgctagctgctgtgatgagatgcaaagacatataagatgtcagagtagctttacaaaatcatcagagaaaagtacggaccaatcaaaaggcgaataagaatgcaagcatgtatgaaaagaacaaattaagtgccatctctttggggtagtttagaaaagtgagagaagtcatcattggtggaagttgttctatgtttttatgggtgtagggaaaaaggaaaagttgtctgaaatgacaggtgagctagaaagctgagttattttgttgctgattgtggggtaatgccaggtgagtcactgctttttggtaaactggagtgagaatcttgaaggttgaagtttgccaaaggtggcaacacctcaagacccagatgcacacagagttttttccattttcaagtgaaaatatttgagaaaagtggcaagggtggagaattctagaagtaaatagaataaaataattcttgttcaggtctcatgtccttagcttgcctcctttcactggccagccaaggaaaccatttattcccaagatttagagctttgccgctgcctggtatcttgcagggatgactgctgctggagctgataccaacatcaagaagttctcagcctatggatgaggcctggtgaaccctaaaatgctctttagccactgtaaccgtgtaaccactttttctacttataattatgtttctttatggcctttcttcctactagacataaatgaatgtgaaagagatgcctgtgggaatggaacttgccggaacacaattggttccttcaactgccgctgcaatcatggtttcatcctttctcacaacaatgactgtataggtg

SEQ ID NO: 6161 - DNA, 32172 bp, Homo sapiens
gccaatgcattaatacagtggggtctttccagtgccagtgcaatgaaggctatgaggtggctccagatgggaggacctgtgtgggtaagtacaggacttagaaagacctggaaagaatgcttccagagaccactcaaggaatcatgcagtctctgttctaatgcttctttctggaaacctggaggaaaagtcagagtagaattatattaatcctccctataaaggcttgtttttatttaagtatatatacacatatatatatgtatatatatatacatatatatatgtgtgtatatatatatgtatatatatatgtgtgtgtgtatatatatatatgtgtatatatatatataatcactttttcccttattttaaaaattaagctattgtactcaccaagaatactcaaactattaaacagtgaaattgctaaattgctctgtaagcaattgtgatttcccttcttaaatatttttctttaaaatacttttgtagtaagctctcatatcttttgagtatccttaaaatctatatactcactgacttttcacatgctacaattttctggaaacatttaatttgatgcaggtaaaataaaatatggttgttatgctatacatttttgaaagctgataaagcttatttttattattgcttatttttctccatggtggaattttatgaactttaatttgctttatgtatttctttgattcattctagtttttttgaattttaattgtttgatggaagtcatgccagtgggaacctcttccttatttttcccttttctttgcagatatcaatgaatgtcttctagaacccagaaaatgtgcaccaggtacctgtcaaaacttggatgggtcctacagatgcatttgcccacctggatacagtcttcaaaatgagaagtgtgaaggtaggaaagctatcagttgtagcaaatgaggagtgtcgggtgtccactggacttagcagaatgagaatttttgtaatgacgtcttcattttggaatactttatcagaaacaaatgcaagggcataggtatgacatggtctcatccttctggcaagacaagaagcactaattatcatgctaatctctaatgaagttattttgttctgtgcatatgactgatcatatgatcctgactcttttccactgtgctttcacacatttgttaggaatgctgtgtcctactcccagtatttccgaactacattttttaagtggcgattctttgcagctaaaaatagctcctgattccatttaaaaactttaaatgaccacattcaaggttggatgaatgtggttatatcgtttgtctattttgtttttacctatagagcagtggaaatgtcttatttcaaataaattctcagcaaattttacagtattacattcctttttgtttgtttgtttttaatggagaacaggtcttactctgtcaccaggttgaagtacagtggcacgagtatagctcactgtaagcttgaactcctgggctcaagtgatcatcctgtctcagcctctggagtagctgggactacaggcatgtgccaccatgcctggctgattttttaattctttgtagagatggggcctccctatgttgccaggctggcctcaaactcctggcctcaaatgatcctccttcctcagcctcccaagggccttcctttaacctcaacaaatatgtcatatcattaagtgaaggacattaattgctagaattcctaaattaagtagggtgaaagggattttcaagaagtcacgtagttcacacccttgactttaaacaggtctgcatctaatccacaatgagaattttctctacttttaatatcgtcaattagaaattttattatatatccaatttaagtaacaatcaagtggtgatatttaaaatggaaacacccttattgaaattgtctagatgcaaattttttaagcatgttattttacttttattaaaaattggctttattatcaatacataagttcgctaaattgaacagaatatatatagaaagaaaaatacctgcacagtcaatgaatgtgcccattctacaatatttggccctatcctaataagttggcatgtacaggctaatttctaccataatataaatagtcatagtaataattaaaaacaactgaaaacatttgagcattttcacaaaagttaacttttatattaagaaaaggttggatataggggtggaaggagtgtcagaatggagtaattcaatcggcaatagaagatcagattcattaataaaccacagggaacataacacaggtataaatgcaacccaataacatggcatgatggagaagctgattttgcgttgcacagaaagagaatcacttggcattgcacatttctagaatatttattgtgtggtatttacaatattaagtcaagataataaggttaatttctcaacttttccttagttgggcctcttgagaataaagttgtataatgcaagtacattttggtgtgagtagaaacctttgcacaaatataaaaataaagagcccaggatacaaggatattttgtgttttgttgaaaaaataaaaaagtattctcataaaagtagcatggctcagaattaagacttaccactttgttcactaaaaattcctgctgaaagtcaggaggaaagataagtgagtttgttggaatagagtgggcatatttttccataggtaatcgtatgttttattgaccaacccaagccaattttgaaagtagaaaagggcactattaacaataaagtcaggccaactggcatgagctggggctcccccaggcaaactaggacatatggttactcaagccattcaaacttcttattggctactcttaactaccactgtacaggagctaagatgtataatatactaaagaaaacatgccacaattctaagtgtacagtttcctattgtctatatgatgaaagaaaaagcctgtacaagaaaggtatttttgtgtcttcagaaagattaacccacaaatcaggagcgtcatcttctatgatatcgttagtttgcacttcataggattatacttattttcatgagtcttagtgttcttgtaaaattcacagttttagggctatagcatagggtattgggaaaagttctgtgggtggttggaggggagtaaatttggatcaaaggcctagatctcacattgagtgagtcactagcaatgtgcttaaagtctcagcatttctgcttcctgaacaatggtgcagtgtgactctagaatttcatgcttctttcctggcctagggtactatgaaattactctgacttttctagttagccaagcaactcagtctgggtaagagacgtttgtcactgcaccccttagaaggcagttgcacattccatttttatatcaataactgtcaaaactaattcttttgaagtcatgacaacctagaagtccagtccacagtgttatggtacagaaaaatacctttattattgtaagagtttggaaactcagttgccctttgtgtgtccacattgtgtgtttggtacctgatgatgtctccatcgtgttttgactttgtttgactcatgtgattcttttagatattgatgagtgtgtcgaagagccagaaatttgtgccctgggcacatgcagtaacactgaaggcagcttcaaatgtctgtgtccagaagggttttccttgtcctccagtggaagaaggtgccaaggtaagtgtctttgaaggctttgggctttcaatgctgcatgtttatttgtggtggtcttatttttcaaacatggcaaagctctgtttctttgtgaacaggaagatggagagttttcattcacccagaggtctaatgataaccatatgtcagaaggttcattttcacttttaaggttaaaaactcatccatcaagttatggttgcttatacaattgtactgacacataaacctctctcccactaagaacacaaatgctgataggcccatcagtggggaaacaccttgagccaccgaaacagcaaagcctgggggaagttgagctacatatcccctacctctgaagagataagctgaaaaatgtgggtccaaagttagacttgagactgaaaaactgcacattaacccatttgcccccacaatatggtaaccatcccttatatcacaaattctccaagaaaacaaaaataaatttaaactgatcaggattcttgctgggccattgttcatttttaggaataatacttgtcaactatttgagtaaagattttcaagggtttgccaatgactttcaaattttaaacaaaaatcaaaaggatcctgaactttggcataacacagtatgtacttaagtcccagaaaactgtttagacttttctaaacaatacagttgtgtatggatatctacatacacaaactagtttcatgaattccggggaagggagatgaaacaaacacatgtatttcttttttttccacttgtagcttttgttgtttggttgttactgttgttttgatgttgagttgggttttttttttttttcatggttttttggttttgcttccgtattaccaaatatggaaaaggcactggatatcatttaaggttcaaaaaattgagtttgggggcccagccctgccatatttagtctagagcaagtcatttaatcttttggaagctcaatttcctcattttaaacaacaataatatttgcccaaccagccttactgtgacaaagctttgttagtttctgagtcctttgtagactcttgtttttattctaatgatctgattaactttttacttttcaactagttatttgggaagtaagaaggagagggttgagagttctccggttgatttcagcttgttggtagttgtcagtggtctgtgtggatttcagggtggtgcttaattcgaacagatattctgcatggtacagaccagtcagataaattctaactcctactcccttgtttttgtgtgcctttggcttggcctgaatttggaaagaaagcagtgagaaaccaggtgtgaatctgccgatgtggcaggccagaggaaactcctaggctattaattcaatttgcactggcccatcacagagcaagctaacgctgcaggaagaatcagcccagctgtgagcagccctgccacatgctcagctccaggaggcagagccaggtctgaggaatgcaagcagggaaagtgacttttgtagttctgatgaaatttcgaggtcattaaggggctctttgcagatggactggtaaacaggcatcccagtgagtcctgaagtatgtgggcaagcacagctctcttccccaatgcaagacacccttgattaataagccaattctagagaatcaccacaagctaaagtaagtctcctacagagcacagattttgctggagccaggaaattgagagctgggtttttcttgtaagatgacaaattaggagtcagacttctattgctcatgaaatgagaaaattccacagaaccgtggataatgttttttaaaaagcgaatgccatgggactcaggtggacagagcctggcacaaaagaccacaggtgtaaatgagccactcccacttgcaaagttcaacgaagagaatttgccacttagactgactcaagacttcgtgcatttgagtctctgtctaatgccaagatttttttttttcggggtggagtggtgtgggggagatagagctggggtctgggacgaagtcagctattaaaggaaaagagaatgagaattttaatacaccaatattacaacatacatatttaaagaaacactacaaactggaagacaaagcagagttaagttttcatatatttgttgagacatttttgtgagtagtcactgaattatatctaaaggtagttggaggcataaataacaaaaacaagactgataaatacaaaacattatatgtgacaaagaacttgaagaataaaagagatcaaaagtgttctccaagaaacaagaatttgttcagtcttgaagtttctcagcaaagcaaacatttgggtggcagagatgccgcaggattgacttttattgctcttgaccttcagaaggataattcattgaaaggtgcttgccaggtccttgccacaacagatggggaagtggaatagaaattagagagatgatttatctggatgagttggtagccatgaaaggttgagcaggtttactggggaggctacctgaatttgatttacataacttggtaaatataatagatagatagatagaaactttaattcatgaaaacctttcctttgttatctctggcaactctgttattcctacattgtcttctttgtcatgaaataaaagctggtgagactgtcttaacagaagtgcttaggtggttatgatagtatggttcctgggattgaaaaacagtgatggaagtgaatgaaaaaggcagaggtggtcagatataaagaaagaagaatagtacaatatgggtatgaaagcatttcttttaaacctgcagattgtggcctctgtgtaatgagaggagttttggaaggctttaagaagtcaagttcgagggaaaacacagtccatacctctggttgagctcactttttggagtcaatgtgttgtatgagaaatggaaaagcccgtttccaaaattatgtcaagcaatgttggagaattttataggaagtagatcccatcttctttgttggagtcatcaaagcaataatcaatattgaaatatattctttcaaagaaagactattctgttcccacccacccacagccctgccctcctcttccttccctctctgtgttgagctaaacaagcttcttttaaaaatttaacattgacacagctctgcatatgtgtgtgtgtgtaaaatctacaaaaagccccacttgcattttgtagccagcatctccgggagtatctgcttcagtgaccaacccttgtgttgtatttttgcccatctacaaagttgccacttctgtatttgttctgtgcctgtgatctgggattttattttagttccagagtttaggggacacagaataaaccacaaagtgtgatatcacagtaaatattagaactaagaggattctcttactctagtgtgctcattaaacatgatattgcaagcagagctatcaatgaaggaatcttgtgaatgattccttctgtggactttccaatcctgaagtcactgacagatgtcagttttgaaaactgtcagttttggattttattggattcacatcgggttactttgaaatagtgactaaaatgagaagtaataaatttaagttcatagagttgttcatcagatctcactatacaaaagatacccatgactttaacaatctcagctcagttaccattagaatcacgtaaggagtattgctgtggtcctgagaggagaacatatataacatagtgggttgttctttatttgctatggtgcaatacggactcagtaggaaagcaactgaagggtgtcataaatttatgctgcagatttgcgaatgagctactgttatgcgaagtttgaaggaggaaagtgttcatcacccaaatccagaaatcactccaagcaggaatgctgctgtgccttgaagggagaaggctggggagacccctgcgagctctgccccacggaacctgatggtatgtctgtcatctgcatttctctctgggccatgcagggtgcagactggccatgatgtaagtaagactgtaggccttaaagacagtaacacaatttaatttaattgtaagtctaattagaatgttcattaaaaattattttatctcaggagcttggtagttattttctttttaattatgtcatgaatcacagatgcccaaggagtagacacaacatcttagggagtctcgttaaataacttcctctggtttctgggcttgttttttccatcatttatcaatatgcacagcatgtagcaattttctacctcaaaatacttgtggagaagcttgtaatgaattgctattgttctatctattaatgagtgtctccaccacagaggccttccgccagatatgtccttatggaagtgggatcatcgtgggacctgatgattcagcagttggtcagttgcctgtgctggattctcagcatttctcagtattctcaatctgcttcttctctagttattcttatttttctccatctatcttggaaaattaagtgctacttttttgtcccttcatttagatagcaattatattattgcattattagataatcttttgattaaacactgaaatgatcataatttatcttcacgtttaaaaaataccttgttattcactattttttttctcttgcttaagatatggacgaatgcaaagaacccgatgtctgtaaacatggacagtgcatcaatacagatggttcctatcgctgcgagtgtccctttggttatattctagcagggaatgaatgtgtaggtgagtaataagttttcttccataggaactttacaaattaaaaattaagctatacagtattcactgtatagccatgaatataggtaccaagatggcactgaaataagttttatccatccactcatacatcattcatttagaatactagtgagtcaccatcaggtcccaggcactgtgctaggctctggagctgcagcactgaaccacaaagacaagttccttcctttcatggaccttacagcctaatggtgaaggcagacactggacatatcagaagagatactagaaaggacaacatcataatgaaagtctttgtgaaattttttaaaaattgttaatggtcataatcttattcccttatcaaataaaaattttatctggattcttttacatttagtaagatgaaaggctatataaccagtacacaatcttttttttgtaaccctgtttttaaaatgtcaaataatggctcctctggctggcctttgacccttaatcaacactaactctaacttaaatccaaggatcatatttagttatctaagaattccagagtgattcaatataacataattaatactagcataaatgctgagagtttgtctgtgtgaattagaaagtactttttccatacaagaaatcaggttatgaagatttcagctccagctatggctgtgggagtttaagcagtttttttagcttttctaggccttagaatataatattatgcaagtaaaataacatttctaattacctttgcagctctaaagatcaatggtatcgggatttttattaacttgaaacagaaataatattcttgacagtaattgaatattatagtagaacaaaagcaaatatttcaatgttttctcctcagaatcttcagttagtgctaatatgtgcatatgaaatgagcctcttcgcctaggagctccccaccatagcctcttgcctttacttttgacttaagaacctcagcacaagaaacaactgttgacaagagccattactcttctgtgccttagatagctaaaatatcaatgttatttctcaaaattatttctttcctaaggggagatattctccccaagggatgtgtcagaataagaatggtgagtattctaggtggatgggttagaaggcatatatacacacacacacacacacacacacacacacacacacacatatacacatatatatacacacatatatatacacacatatatatacacatatatatacacacatatatatacacacacacatgcacacacacacacacacacacacattttaggtctctggtcaaagatttgttctctccgcctgtgttttagagcggtcataacctaaacatatttttttctagcctttcctcttcctaatgtaaaccatctggtttcaacagaatcaacacaatctacttgaatcttgattttatttgatgtattaattttacttaacctctggtcttttattttacgtaagtttagtcttttattttatatctggcaaaaatccatcatgtttaaggcttcttggggagtgatgtaatgtaaggccaaactgtggatgtatttctgctttaaacaagcagaaacttttgacgagtgataggggcctttttttttttaacccttagagcatctactccaagtagaagatttagtttataatgtgggaggctggagaaactcatggagaagagcactgtaagggctatatgtccaggcactgtcattctcactgtcattgccactgccactgagcaagtcgaatttcacggctataaacctgagataataagacatgcacactccctttttgcaagaacagaatgagaattaaacattacagatcaggctgggcttggtggctcacacctttaatctcagcactttgggatgccgaggtgggcagattgcttgaggtcaagagttcaagaccagcctggccaacatggcgaaaccctgtctctactaaaaatacaaaaattacctgagcgtggtgatgtgcacccataattccagctactcaggaggctgaggcatgagattcacttgaacctgagaggcagagtttgcatgagctgaaatcgcgccacagcactgcagtctggatgtcaaagtgagactctgtctcaaaacaacaacaacaacaaaattacagtttaaaatcctctgatagaataaaaggtattatctcaattcatcatgttttggacacattcctggtttcttgcagatactgatgaatgttctgttggcaatccttgtggaaatggaacctgcaagaatgtgattggaggttttgaatgcacctgcgaggagggatttgagcccggtccaatgatgacatgtgaaggtacatctcttaaacagagaacagttgattacgtgtactgatcctgggaacaattggttgattacaagtcttaatattaaatacaactcagggtgtatataataaagatcatctaggcctgatgggccatttgatcattcttcttttgtggcctcttctctgtagggaaagagagatatccaagaatgatacagttgtgtgttcatggcacatctacactgtatatcacagagagttctcattggtgtttccctaccacttatatttagatgcttccgtgttgtttaataccttctttcttactctcactttctccttctttctgtctctcatactccctttctttttcttttctctttttctcttcttttctatttctaggagcactgcacactaagatacccaccatcatcctgtagccatttggaggcaatcacagcaaaagcggttgcctgtaatatataagcatctgaaaagtgtccatccgtaagcctggtggaatgtatggaaagaaggaaagggagggagtgtctagagcagtggctctcaaagggtggttcccaggagcagctgtatcagcatcacctgggaacttattagaaatgcacattgtgaggcctcatccaagacctcctaaatcagaaactccgagagtggggtggagcccagcagccctctaggtgatctgatacactctcaagtagggattcactggcctaaggaaagaatgaaggagaggtgaaggcagagaataaagttggtagcaaagagagctcttcatcagatatgatctatcaaatgcccattgtcagagttgtggtaaatctttaaaggttgtgactaagtcatgatctgggctctcactcgtgttcttagtcagcactggccttggggagcaacatgatagttgagatggtctattttaatcctgcttttccaaaacacattctgatggttccaaactctgcagtctgcagaaatgactttttttccattaacagtaaactcattcccatctatttaaggtttgaacatgggcatctgtgtaaactgagtgtctctgtcagtataaaatgatctggaacactatttgcttgggcagaagaattgctgttatttcacaggagcctctttgtttgggggaaagagaggtggttaacaatattggaggagttggtttctgttctgaccacaattgttttggcggaatggggcaaaactgattcccacgccatgtaactgttgggagtgacaaatggtcaacctgagccttctaagccaaaatttcagaagagcccctcaaatgttgggtggcctgtaatttcccatccacctaaataatcattaataattataccaggacaacaaacataaactgggactgtgctgggagaaccgggatggagagtcactctgtttataccaaatataaaataatcaacccattttataatttccgggaaatgggagaccacttgatccatccatgtttatgacaatgaagcattgcaacttttggtaaagttttagagttttagttcaattggtaggttcccttttgttgctgtccatgatcccttatttacttactctcctctgctgcagatataaatgaatgtgcccagaatcctctgctctgtgccttccgatgtgtgaacacttatgggtcatatgaatgcaaatgtcccgtgggatatgtgctcagagaagaccgtaggatgtgcaaaggtgagtcatcgtgttcaaggtcatctaagccaggaagctttatctgtgaggggagatgtccctcaaagcttcccttagtaggagaaggctgggaattggaatataaatagtccgtggacaatacgggggttgtcactgccacgtttccccctaaattgtagctggaagcatcatcaagccaagttgaggactgcactgcacatcctttattaggtctcactgtgcatcgcatgctcacaacacgccagtatttctacaagatatgggaatagaaagaaaaagacatttccccacgttcaaaaaacccaatatgaagagattgagacagatataaatacgttctcataatacagtgtgataaatgctatggtgattatatatacaaaatgctctgagaacaccaaaggatattctatttcaagaatggggtaacacgtggaatctactttagctaaaccatctccattaaaaatacctcctgaacacctgcaatttcctaagcactgaactaggctctatttcacaaactgcagtaatcatagagtttgctcttgaagagctctgatttgctcctgtcaatatcttaaatgaacagacacctgttctctcaagatggcgtaaatataattttgcttaagggtggggaaatttcctaaatgaaaggtcctaatcatatgcagaataaatttcaaatttctcagctcagagcatgtaaacgggaaagatagaaaaataaagaagtacaataggacagaaagtaaagactgaggaaggcccaaccaagtccagaaaaggaaatgaaggagggaagaaccagtagagaataagatatttgagatatataatataaaatagtcatttactattatatcctgtttactaatattatcatataaaaataatgtcatattggccaggcacggtggcttatgcctgtaatcccagcactttgggaggccgaggtgggtggataaccagaggtcaggagtttgagaccagcctgaccaacatagtgaaaccctgtctctactaaaaatacaaaaaattagctggcgtgatggcgcattcttgtaatctcacctacttgggaggctgaggcagaagaattgcttgaaccccggaggtggaggttgcagtgagctgagatcatgccactgcactccagactggatgacggagtgagactccatctcaaaaaaataataatatcatattataatatattgtgttattattataattattgcactccacgtaagctttggtttgttactcttacaatccattatgattgtagtactattataattattgccttatcatatattgtgattataatgctgttataattattgttatattaagatatatccattatattataattacatgaggcccttttagttcaattagtcaacaagaattagaaatcatgcttcaacaaaggagtataaaacataaagggacagccaggcacgatggctcatgcctgtaatcccagcactttgggaggctgaggtgggtggatcacttgaggccaggagtttgagaccagactggacaacatggtgaaaccccatctctactaaaaatacaaaaaaaattagccaggcgtggtggtgcatgcctgtaatcccagatacttgggagactgaggtatgagaatcacttgaacccgggaggcagaggttgaagtgagctgagatcgggccactgcactccagcctgggcaacagagagagactctttcaaaaacataaataaataaaaataaaaataaataaaaaataagggaaggagaagagagaaaaggcatgatcagaatcatgcttcttgaagaggtcatcagttgattagggagcaatttcttcaagttcaaaggtggttagaagattcctttccattctttagagatcatactcaacagagcagaaggaaatacagccagtagtgaaataacagatgaaaattggttacttactaacattttatgtttaaaagtcaggtaattaaggcagatatatgcattttctttgacaaatttgtgattgtacattttttacagatgaggatgagtgtgaagagggaaaacatgactgtactgaaaaacaaatggaatgcaagaacctcattggcacatatatgtgcatctgtggacccgggtatcagcggagacctgatggagaaggctgtgtaggtaagaggatccctgtggaaggagctttgagtgcatcagaagtgacagtggacagaaggaacctgggctctgagttcttgggatactgttcttggcgagacccattttgttctcttaaccgcatgtcaggactctccatggtggttcccttgcctcgtgatcatttgtgaattccaagagcactgtcattgtccctctgatctggcctttgtctgctttcttgacccatttgctgccaggatttgaacagcatgccttttctctattctcctcctttactttccatactcttttgttgatttgggggtcaattctccccatcacattggaatgcttccctattgacttagctttgctacaaatgccaggtacctctgaatcaggaatatctcaaaaccattgggatctacctccagaaaatctggtcttgtctagagtagcatccaggcactgatatttttttaaagctcctcagctgattctaatagggatccaacattgaggacttcagccttagaccaggagttggcaaactgcctacaggctaattccagcctgccagcccactgtgtgtttttataaataaggttttattaaacataggtataaccattcatttgcatattgtccatggctactttcatgccacaatggcagagctaagtggttgcaactgagaccatatgacccacaaagcctaaaatatttcctatttgaccctaacaaaaagtttcctgacctctgcttagataataattacaggagaaaattattaaaaccttctcacacgcattctctttctttttaataataaatggtattataaagatatattttatgttgtcattcaagaagattaagaatcccattgcccttttactctgtacaatacagattgaagcaggaattaaagaacagattctaaaagcacagaatcagaaaatatgtagattaattgtcacacactggatcctcctggatcagtaattctcaacctctgctgcactttggaatcatttggggagctcaagtccaacctcagatattctgattgaattgttctgggggtggctggggcattgcattggggttttgaacctgttttaacactgttctggattcaccttccaactttctctctttcctagtgagagctccatctgagggaccctgaactattctcaaaggaagggaagcacctcagcaaattatttttgatctttctaaataatcatcagataattctaagaatctgtagatattttaatgtttttttaaacctgggaaactgagttgtagtttatgatttcttaataatattgttgaaatattacaataaatgcaacctatattggagatataatctaggttaatctgaagattaatctagacaaactcccccagatcaatattgaccattacagatattattctaacatgtattaaaatatttctttcatatgctgatattcacatttttccctccttcacttgaaataacactttgagagtcctttttatgtcctaatatgaaaagatttaaattttactaagtgaaaaatgtaagtgtgcataaaatgctaccatctatgtttaagtatataaaatgctatcagttaggcttttaaaagatctgaagtgcacacacacatacacatattatgtatgtatttgcttttatatgcataatccagctctggaaggatacattagaaatcggccccagaattggttgcttttcaggaggggagtttggtgtctgggaaataggaaatgaagggggtacttttgctgaatctccttttgtacctttttaattttgaaccatgtgaagagataagctatttacaaactatataggaaagaagaaaatctattcttctataaaagattcagatggctctttctgttttcagtctttcaatgaaaccaaacagttaagaatgaattgaagtctcttttataccttttaaattttgagccatgtgaacagattagtgattcaaaagctaagttaagaaggaaagatgtgagagagggaaggaaggtgagagggagggaagggaggaaggaaaggagaaaggaacaaagggagggaaggagggagggaggaaggaaggaacgaaggaaggagctccatcctctataaaatggtcagatgactcttcttgtttttggtccttcaataaaatcaaacagatgagaatgaatgtcagacgaagccagggatctgtgagaatgggcgctgcctcaacacccgtgggagctacacctgtgagtgtaatgatgggtttaccgccagccccaaccaggacgagtgccttggtgagtacagttggcaccgcactttcctaacctcagcctccacactgggatgctggaaacccagacttcttatttaaaatacaagaaaatgtcaaaatctgaggaaggataaaaaatgttcatattttggagatgccgtaatgactgtgattgtccattgggctcagcaccaccctgcagctaaattcttcctttgctaattggatcctgaatcacttgtttggaatttcttggctgcctttgaagcccttggtgatcaggatccacttccgtatgtttctctgcccctctgtctgtaagcatggctattcccctgtatttctgggagcagagagagttataagcttgtctaggccaatgtctttctgcctacttactgaatgtcttatttgtttccctcagacgtcatcctttctcttttactgctgtctccagctttcccctcttgcttcttctcacccagggtaaagtgttacatccttttttggtttttatatctgaccaaatttttaatattttgtttgctcttaaaatttcctgacatcccctttgccatataatgtcccttccagacaatcgggaagggtactgcttcacagaggtgctacaaaacatgtgtcagatcggctccagcaacaggaaccccgtcaccaaatcggaatgctgctgtgacggagggagaggctggggtccccactgtgagatctgccctttccaggggactgtgggctttcaagaaactctgtccccatggccgaggattcatgaccaatggagcaggtacttcatttatagtccaaaaatacttgcagggaatctatttatttgttttttgtgtgaaacacagatgaaaatatggagtttgcaatatgtgcctaggttgaattgcacagctgaggccaacaaaaattcttcattatggagttttagacatttgaggtcatgctgccaaagtggccttggtccacttgattaagctgtgtgtgcttaggaccctccctctgcattccagcgagtcttcaactttttaaaccgtttactataagtcaattggctactcagaatataatttttaaattttttagataaactttgaaataaatgattattaaatgtgcaaaccagtccaccaagatgtggaactcctaaaactggccaaactgtattgcataaaagaagtataaatcatgctgatatcctggcaattagacacaattgcatctggaaaagcacaagctccttaactagagcaggatgaggaagtgtcagactgtctaaggcaactctagagatatctaggcctgtcaccaatatgattcctgtgtttatcaactgtaactacaattggtttttagttcataaaaggactgagaaaaggtgagagcttttttgagcttcttgggagggaattagaagtgaaaggggaagaaggaggttaagaaggatttgtgtttgtattggaaagatgtggctgaaggcagaataatggaactggatgtgatttaaaaaaaaagaaaaaacagacctagaaaggtaagatggagtgaccaaaagcaatttatgattctttggaggatgtagcaataagatagccgaaaaaactcacttctggagaccaataagagtgtgctaaattgcacttcagagtagacttgtaaaggtcagatacacccagctgttggtataaaatggttatttggcagtcaagggctgagaacccatgtagaaagtgcttgtatcggcacttcgccaagcagtaaggaggtaaaatgggtcaagatgtggaagacagtggttttaatgctcaacagtgcatattgacccagtctttctctctgtggtacagccatgagtgagggtctcccttccttagcaggctgcaaaaacccagcactgtcatccacctcagagccctggttagtttcccccctcaccagaggacagaagttcatctcatttccccaatattatgtaatttgaactttttcaggattaaccacaaagacaacaaaaataatgtaaaaacaaaaaacaaaaaaccttacttattttgagcatgcaatactagggggtggaaatggggtttcctcatcaaaaggatctgcttctgtgattcatttattagatgtcagcaggaggcaagcttaatggcatgagatgacacaaaaagccaaatatgtctagatggggtggctgttctatggatccagaagagaaaaatatacatttagaagaccagttgtttttaaagtttttctgtggctgaattattttatcaattgtagtctaatgaagttatttgtttaccttttgatatagctactgttacatattaaatttatgctgtcatcttactggtttaatttcttaggcccaaaatatagtaacacaatttattagtatttacactgaagtgaccccctacatattaatgttgtcaattttatgatatatttcttaatttatatttgttaaattacagatatcgatgaatgcaaggttattcacgatgtttgccgaaatggggaatgtgtcaatgacagaggatcatatcattgcatttgtaaaactgggtacactccagatataactgggacttcctgtgtaggtaagtgtctatttctgatggcttatcctcaagtggaaattttagattatggaaaaaaaaaaacccaaagctaaaaatctaaaaagtctgtgcagtttcataggaaagcacaggacaatcatcaaagtctacacagagtttcctttttctttccccgaaactaaaattcttcgttagaccctgtggaaattgagcgtgtacacatcatttttagatgcacagtcacgctgtatttctttgatcatagatctgaacgagtgcaaccaggctcccaaaccctgcaattttatctgcaaaaacacagaagggagttaccagtgttcatgcccgaaaggctacattctgcaagaggatggaaggagctgcaaaggtaaagtagaattgaccattgcccctcacctagctcctgacacatggctgcattcctttgcctgtaagaactccacaggcaagccgaaagacctgctctacaggcaggaggtgcttccctggggttaatgcctccatgggacctacctcctgtgctggagggaaggaggctaaagccagggagattgtggaggaagcagctgtccttgctgcatgccccctgggcatccatggtggccatccatgactgtctcagagatagcagggccagcttcaatggctctggtggggcagattcttaattggtgacctcctctctgctttctgttttttgtatttattctttatagctatatagttcaggtttccaggaaggtcctgcctcggaataatcagtgccatgatcgtagaggacattgtgcctaatgaattagatgctgtgtccagatttttgttctgcagaaaaagtctatttctgccctgtaggagcttccctgagacataaatatcacacagaattaagaaccagaaaagctctgggcagaaatcccttctcaaccagaagttatcctttgcaaaatttttttggtttaattttactcctgtaaacatcttcctccacaataagaacattatatttagtgaatagcactagtgagtcatacttaacaataatttgggaaatcagagatttggagaagaaaagatagaccaagtggtagagcaagagatatcatgtcatgccatgaaactttgaaggaaatttatagaaacatacagaagtaaggaaggtaaaggatagagtggagtctttttcctattttttctcataaagcttaagttcttccacttacttggtatatataactaaatatcaaatgaatgatgcagctgtgtgtaccactgaactgagaagaggctagaagggtggagggtgggaccagcacatccccacggaggatccagattggaggagaggagaggagagaagtggagagcagagagaagttgggctcttgacctctttcctgtgtctgctgaaagggagagttaagagacatgtaatagtggatgacatcatgggcaagtgcctgaggccttcctgtgcagcacaaagcctgtataatcctgtagtttggggagaggaagttgagagacctacttacacattctaaacatcttaaatgaagtcgctcatagctttgttcttctcaaatgtggaacttattttacatctggggtcactgtgagttctaggcaatgtgaagctataactcagagccataaatttattcatataaatgaagaaccaaattcaaggggaaaatatctctcattgtatatattatctgtaacaagcaaaacaaatttatagcattttttctaacctctgggggcagaaaattctcaaaagtttccagcaattaaaagatgaaaaatgaaaatgcatcaataaagttctctttatggctttaggagtgcaaagagcaactgtaatttttacatgtccactcacaacttgtcccttttcctgttttttcccataaggttcaaattcttccacttacttggtatatataactaaatatcaaatgaatagtgcagatagttgcaccacagtcactgagaaggaggaagccagaagggtggccgtgggagcagcacatccccagtgagagatgggtagaatgcagattagaggggagaagaggaggaagggcatcttggaggcaagagcagcaagtgctgctgttcttcatgtgttgtactcatgaaatggtgttaggagaaatcactgagtcatcttcctcacctgttgcaggtgagcttcagcaaatgtgtcatgatgctccagccaagctccttgggccatagacaggggaaaccagtccacagactctgagaaagctgaacagagagtgcatatcagtcaagatctcagcagtggaaagagcacaggacaggcagcattataagagaagccggaactaggacaggtctcgggagggtctctcagtgtaggtccactccagatgttactctagccaggaactggccctgtggagtggaagcagtcactggcaaagctggcactgatctgcagctccaaagcagttgtgcagatggtgagggcatagtggttgaatttgtgataaaataaagtcactaatgttttttcctgaatatgcgacaattttaaaattatcattaaagtttagctagaagctagaacacaacatttcatctcttggtattttgaaataacattggagttgagaatgcaacttagaagttgaggcgttgagaaaagaggcctggtcaaagcagagggttttattgagatgtgggaaacaatgttggataaacactgcaggcagttgtcagttttggatttttgttttttttgttttttgttttttgtttttgtttttgtttttgttttgagacgaagtttcactctgttgcccaggctggagtgcagtggtgcgatctcagctcactgcaacctctgcctcccaggtagctgggattacatgcacacaccaccacacccagctaatttttgtatattcactagagacaggttttgccatgttgcccaggctggtctcaaactcgtgagctcaaagtgatcagcctgccttggcctcccaaagtgctgggaatacaggcatgagccaccacgcttggcctggaggcagttttattaaaagtgcctttagctattaaaatgaatttttcctttgctttgtttccttcctgattgctcaattttggtttatcctaagaagaatcacgactaaagaaatcagattttgtttttgatgacttcatttgagtagattaaaaacagcaaacagaagagaactaagccagcaaattcatttccagcttcaacatttctctttatgttttaacttaaatagatcttttcaaagctctggaaaatttgcagaatcattcatctttcgcttcatttaaaaatttgtttaaaatgtcatgatttatttgaaattcctttgttgaggaattcctgcatttctccaattagaattgtgttttcttggatcccctaaagatctctttatatttttttgaggggaggagggtctaaattgacaccttgttttatctttcagatctttaccccctgtgtctctccttgccttttgctgtggcttctttctagtcagggtcatttgagacctccaaatcaaacgtggagctgcttcatagggtcagcttccctgatcctgttttgttggcttgactcaaatgcctctcttgcattttcttgtagatcttgatgagtgtgcaaccaagcaacacaactgccagttcctatgtgttaacaccattggcggcttcacatgcaaatgtcctcccggatttacccaacaccatacgtcctgcattggtgagtaggagaggaaaaaatcctacatggattgtagcgattcttttaagggattattttctatttcctctgctgttgggataagaaaataaaagctcaaagaaatatatgagtgcatgtatgtgtgagcacacctgtacatgtatgtgaagcgttgttggccttatttggccttttccgagttatccttctaattttcttttaaatgatacaaagagagctttggggaattttaacccctctttgcccccactgcttctcatagataacaatgaatgcacctctgacatcaatctgtgcgggtctaagggcatttgccagaacactcctggaagcttcacctgtgaatgccagcggggattctcacttgatcagaccggctccagctgtgaaggtgggtggagacttcagctgcgatccagctggtgaatccttgtggaggtggcctgtgtggctattggcaccttcatcatcagcctctatgagatagcagatctgagcccaggggggcactcagctaaaatagtgtgcacaggtcctgtatcttagagagtcgtgttttgtttcatgcttgattgtgtctaacacacatgcctttcctaagtatatcaagactttttctgctaagtttttaatttaacctaatagggaataactcagtcaagaaaaatatacttgattttgattcattaattttctggtcactgggtccagagccataaagggatttcccccatgtggactaaacatatgaggaatagctcttctgatgacatttaattagaagtttaaatgatatttttagaagttgactgtggctttgacacgttttggtttctaattgtggcaccaaaaataaaaaaaaaaaagagcaaacacaaataacttataacttacagagctgtcccagagagtgctttgggctttgcactaatttcctgacaatttttatttgtagactttgccagggctctctgaatgattttctccttggacttagcagcagttccagaagagagattcttgaagtttttggtggtagaataatgtgtaggatgtgtaggggccagatttcttattagaatccatctggcttcagagagagatgttgagttggcatcatggtggctctgcttctttttcagacgtggacgagtgtgagggtaaccaccgctgccagcatggctgccagaacatcattgggggctacaggtgcagctgcccccagggctacctccagcactaccagtggaaccagtgtgttggcaagtaacttttcctcactctcaagatgcatggctatcaggtcctatgaagcaaaacactgcttgctttctgaagctgtaaatgtgttattgaagcaacaaatactcatttaaaattgccctaacctggttgaaacccgaggtaagtaacagtctttgcaaaacagcaaactaagaaaaaaaattataattgagggtgctttgagagcatctgaaatgaaatgcccccagaatttcttgaagcgcaatatcctccaccctcccgctgcactgctagtcatcagcccacacttgagttatgttcatatcaggggtcaaaaaatcttacttatgactgaaaaatatcagccagccaaaggctattttgagtggcttttggcctgaagatgccaaagtagttctgttcagctctacacattttgagacagagcgcaagcaggaaacacagcaaggttgtgtttttttgtgtgttttgttttgttttgttttgtttttcaagattgctaaattcttttgataattaagggagatctactgactctctcattaaattgaaatgatgtcatctttgattctacaatgtcatgggaaaataactcttaatgcacatcagagaatcaaaacattgtgagtttggagggataccagaagccacttagctcaggcactttgttttacagataaggacctagaagtccagaaagggacggtaatatttccttgcccagttcttttgtgacatgcttggaactagaacccacaactcttaactttctgatgtagagctgcctttcaagtgtcacattcacttgtttatgttcattcagcaagcgtctgtgaagtgccactgcaagcttggtgctttggtaacctgttctagttgccacattattctgtacagagccctccttagcaaaaactcaaagaattactgcttcccgggtgcaggctctgcattgcaggggttcactttcatgcagatgaagacatatttggtgtgttttcatttatcaaaatcatctctgtcatctagtttgattctacacaagacagttttgcagtggcatgtagggttgactgaagtgacccctgtgctataggagtttcgactgcgtgagtctctggctagctatctggttttaataaaaatgtctttgttcattagcagctcagggaggtctttgattttaatcaccagtttctgacattgttcacagaacttccagagtgaactttgttgattcaacacccagtttatgagcctgtctgttctcattatttaggtcattttaataacactggagctaagtgaaaaaaacataagagaggaaaggtatgtcgctcctgtaccttatcctcctcctcctaccatcagtctgaggatggtagaggcgaccaggccatgcactagtgtcctggagattctgctctggtctcgtgaagatcatctcctggctggacactctaaaaaaacaagttgatttagaagtcagaagaagtttggggttcttaatgtctccaaatgccaaattgctctcatcaatcttgagaattagagttatctagaatgagcattgccgtgggctaaaatagcttccccagaaccacaagaaacagagcagatctcttagaccagccctccctggatcctcactcccaggtggctggaagttcactctttggggtaagagggccactaatttcattgctttctagaagtaaatttcaaaaaattcagcttgcagatagatagagttgacccattttcccctagagaaaatgagtaaaagaaagcccatcctgcatttgtgaagtttcctatcggtactcccttaaggccacagctaacatgaacagtgcaagctggatgctgaaacctttgattttagaggacagagtggtgggtttcaatccacttttaaggagtagttttcagactttaatgctattttggtaaaattcgaattgtctctttttataaaacaaacaaaaccctcaccaatctaagtaccaactggaagaataaaacaaatattttggagtgtaaaaaaattccttgtggagtcatttgctccagagtgcagaggatgaaaaaggtcaggaaaagtgcaaaacatgttaaccaaatcgtggtgtttgtatattgataaaaagggcgagtgcacaaacatgctgttttcaaactgtaaacactgaatatttgccaatttcttattttaatctgtgctctactccatcctacctctccaacctagataagcaagtttaatttaaactttattaaattctcagggaagggagaaaatgtaaaataaaatttaaaagaatgtgaaaggagagggggagaactcttgatagttgtagtaacacagatagatgctcaaagttaaaaagaaccttagagatctagccttctctctttcctaatatataaatccttctctaacttccttgcttatcccagtttggcttaaataccaccttgaagggtgcccactttctcccaagatagcccaatctatgtatagacagcttttaatacttagaaatgtctttttttgctataaaaaaaatcatttctcctccctctaatttctcaccattggtcctacttctgctctttggaggaaaaaacacagaataaatctaagctatagaatgacaagtcttccccctcatatacccacgccttgcaggttttattagtcagggtcccagcaagaagcagatggctgaggccaaccaaaagtgagggacaggggagcagagcttgctcatgctccatagatcagccacctggggccaagagcaagtggagaggatggaggatggacgtggaggagcaagaagacatcagcccaggggtgttctctccaatgaagtaaatatgcttcgttcttcattctttgtttgacatggagcttggtgccagtggtttctgttgctctctattgcacacttcgtcctcaatttaaaataaggagaaagaacacagataacgtgttgagcacagaaagagaaagggaagaatgagaaagataaaattattatttatattttaagagccctggagcctaagtgaccttgggtgaagacttgaaggtctttggatacaaaagattttcagacaggcagttaagatcaaagacctgtagctgaagggaaggagggaaagagagaaggaaggaggggaggagagaaggaaggaaggaaggaaaggaaggaaggaaggaaggaaaggagggaggggaggggaggggggaaggaaggaaggaagaaagggaaggagagaaggaaagaaggtaggagggaaggagacatggaaggagggaaggcaggcaggcaggcaggtaggaaatgtgaatatatactaagtatatacaagtgagcatccttccccaccacttttatccacctgttttctaatttaaaaaaaaagaaaaaatagatttgttgagaaacattatttttctttataaatgaatgtgccttagcaaagaaggtaaactaattacaggagaaaggaagcaccagcttaaatgtggagcgtctcttgagaggcactgtggtataaaggaaagcgcatggatggcctttgcagtccaacagacctggctgtgaatttctgccctgctgctgctggctgtgagatcttggaagagctttctgagcctcactttcttcagctgtaaaacagagaatataatacctctttctcaagattgttaggaaagctaaggaaatggtcaatacctgtatcctatctatcataaaataggtatctaataaacattcattcccttccccttcctctctttcataggaagtggttattcgctaagtgaagagaaggccaatctatctacattcaaatgaacgtatgcctgaaaatggactatggcagttaagaaatgtcttaccagcaactttccaacctgccctgcaaaggcagatctacaaaaatatattagagacttccaaaaattataaatcagaaataatgagaaactcatggttttcccccttctagctgatttttttaaagtaagatttctttttcctgcttcttagcatcagacttggcaggtccctgtgggtagccagccctgcagcttctgtctcacttgtgggttttccccaattactgcttgtgaagtctgcaccaaatctcttccagccacacttagttttagacagggctcagacactctgggcaggaggctggtttgaataaggagggggccgattcggtgatgggagcagacataccagaaggcattattcatctcccagaacaggtacctgggggcttttgcagaattttgaaaaggaagtccaagtggggcagacacgtggggcagacacttggggcaggatatcagcctttgccagatcagcatatcctgaaataggctgacagggaaagcagcctgcgggaaaatggttggtctctgcttttgagagatttgtctcctcgctgggcacttgtgaagcaagtacgcagagaactgcaagattcctttcctccccccttgaaccctaaatcttagctacggaccagccccatgttggttcatgaccggatgtttacatggagcagaagataccagtgttgacttctgatgagaactggagtctgctggtcctcagaatgccatcctctaatgccctctgcctggtgcatttgacttcatcttccatgtttcatcttccatgtttactcacaacatagcaagaagccacatccatgcccgcatctttctctgctgttgctctccccacccagccacctctgcctgtcttaccttcctgagagcctagctgagggccagctggccggcagcaagtggccagatccaatgtcctcaatagaaatctctggctgctgccacacatgccgcttcttattttgcctgcagatgaaaacgaatgcctcagcgctcacatctgcggaggagcctcctgtcacaacaccctggggagctacaagtgcatgtgtcccgccggcttccagtatgaacagttcagtggaggatgccaagacatcaatgaatgtggctctgcgcaggccccctgcagctatggctgttccaataccgagggcggttacctgtgtggctgtccacctggttacttccgcataggccaagggtaagcagtgctcttcctggtcatggttggagattctttcattcgtaatataattaagtatactgaactcaaaattacctgtcctagcagaggagaaccatgctttttgtaatcctaaaattaattccagttagcttggcaaaagttttaggttattttatttggaaggaagcatctggatttctggaaacgtcaaacaaagtaatgaaactacattgtaaatatctcgctatatgacttctctatcttattctcttgatcttcacatcttgttgggaagtgattcatctctctgtaaatacacctctctgccaacccatgacagaactgggctcaccctgcacacgactgatccactcttctcctggggcagggaggattctatctggacttaaaatgcctttgtatctagctcctgttagaataagtcaaagacatccctttgggttgaaaattatttagggttttaaattatattttacatttcagacttgaatttacattaaattttaccaaaggtgcattgaaacacttactgtattttcctggttaaaaaaagaaaaacaaaaaaaacacttcaccaaattataggtgtgtctgtgtgagagttggggcagggaaggccttttttttttttttttagacggagtcttgctctgtcgcccaggctggagtgcagtggtgcaatctcagctcactgcaagctctgcctcccgggttcacgcgattctcctgcctcagcctctggagtagctgggactacaggtgcccgccaccacgcccggctaattttttgtatttttaatagaaacggggtttcaccgtgttagccaggatggtctcgatctccggacctcgtgatctgcccgtcttgacctcccaaagtgctgagattacaggcgagagccactgtacccggccgggaaggcctatttttattttacccagtgatttaaaagtttagtgttaagttttcaaagtttggatcttttttcctgctgaattaatctggactcgggtgtccacctagttttagctatcctgagaggaagtgcacattttaactttttaattaggaacacatagacattaaatatatatatacattatgtactcctccacatgcgtgtacacacacacccccacacacatccacacttataccaaattattaatgtagcagtctttgatttcttgacatacaaacatcaagtgattcattttggatctgggtaggtagaagaatgtttcgtgggaagcacacagaatgccagcaatcagacacaaattcccagatgtttgtgtctggctctcagtagactcattctttatagtttaatgccagaaccatttcttcccagcaaaaattgtgacactctaaactggcttttggccagtgggattttgtagtcacacttcttataagtggtgctcccgggatatgaaaatactggaaaggagttctgagaaaggaaccaaagcctgcaaatttgcagtttacctcctaataatttaatcattgtgtgaatgtatacgcatgcgcacacacccacaggatgagcatttatcacttcatccattgtattgtttctacatatttcatgttgcaagataaagaggaaaggaaatgtattggactctggcaagattgggggaaacagtaggaacctataaactgctttgaaatacaacagatattctgttcattggcaacatattttgaatcctaagggtatataggaaaattagttctaaagagcagatcagctattacagaaaaacagataaataatttttggtctatattatgacccattgttagaaatctacccatttaaaacagttttggcctctccgaatcactagaatggactctgcccccaaataaagattcttttaaggaccattcaaatgtttcaacacatttggaaagaggagcttgataaatacacattccaagtggcctctgaaatagtaagcagaataacaaaacaaggtacttgtgaaacattcgagcctccctccgtaacttggctttgataactgaaaggcaaagaaaaacagctgaacgagttctctcttgggcatgggtttgtttatccatcttcacatgagtcggagccagtggccctagtggttttgaatgacttgaaacagtttcccacagttgggcaaactctgatacatgcattttatatacggcatatcttcatagtttattattaaattaaccttcattatca

SEQ ID NO: 6162 - DNA, 333 bp, Homo sapiens
gtcccatatgtaacaattgtttccctcccagaagtgtgtttctggaggagggtgctgacttctgtgccctctgtggcacccttaaccaaggacttggatgtttgctcagaggtctttcagctatctatccatgaccatggatgtcagttcacagccctggctgttcctcagagatctaagtaaccactttgatgatttcagggttctcttagatatttgtaataaaccgattcctttattactctagttcagttctgtaggcagctttctcagccctttgttgtttttgttgaggagagagtatgaaaggtttctgtaaaccttgtttgggat

SEQ ID NO: 6163 - DNA, 333 bp, Homo sapiens; identical to SEQ ID NO: 6162

SEQ ID NO: 6164 - DNA, 333 bp, Homo sapiens
gtcccatatgtaacaattgtttccctcccagaagtgtgtttctggaggagggtgctgacttctgtgccctctgtggcacccttaaccaaggacttggatgtttgctcagaggtctttcagctatctatccatgaccatggatgtcagttcacagccctggctgttcctcagagatctaagtaaccactttgatgatttcagggttctcttagatatttgtaataaaccgattcctttattaccctagttcagttctgtaggcagctttctcagccctttgttgtttttgttgaggagagagtatgaaaggtttctgtaaaccttgtttgggat

SEQ ID NO: 6165 - DNA, 431 bp, Homo sapiens
gggattacaggcgtgagccatggtgcgaacggcccaccctgcagtcttaataccccaaagtgatcatgtgctttcagctctgtggcaaatttcagctctgtggcaaggaaacctgactttcccaggatcataaacaatcaaacacttcaggcaggaaggtgccctcacttctcaagtgcaaagcctccgcagccggtgtggtagccatgcagtctgtacctgtgacggaaccgctggattttgcaacctgccgcagcgcccactgttaatgccgcatccttttcatagtgccacctgcggtgggtctgcggcaggatgtgaggcctgagaagccgggctcttgaagcgctccttccaactggcttcctggggagagaaagtcaacacaattacagctggtagtaaaatcaatatgtcagagttttaatggg

SEQ ID NO: 6166 - DNA, 430 bp, Homo sapiens
gggattacaggcgtgagccatggtgcgaacggcccaccctgcagtcttaataccccaaagtgatcatgtgctttcagctctgtggcaaatttcagctctgtggcaaggaaacctgactttcccaggatcataaacaatcaaacatttcatgcaggaagtgccctcacttctcaagtgcaaagcctccgcagccggtgtggtagccatgcagtctgtacctgcgacggaaccgctggattttgcaacctgccgcagcgcccactgttaatgccgcatccttttcatagtgccacctgcggtgggtctgcggcaggatgtgaggcctgagaagccgggctcttgaagcgctccttccaactggcttcctggggagagaaagtcaacacaattacagctggtagtaaaatcaatatgtcagagttttaatggg

SEQ ID NO: 6167 - DNA, 379 bp, Homo sapiens
cccgccacgctgggcttccgtgtttgagccggtttgccttgtgatttcccctggcagctggggaatcagcttccccctcggaacacagatcattcggagcagccgacggcttacttctttaaaaaaattttttaaaattttattttaggataaggggaaaaaacgctggggggaaggccttttagaaaattccttcggtgcagaattaatggcttgtgaaagtcagcgcggggtgggggaggggggagcggcttcccagcgagctcccctccctcctgctcccctcctccctgctgccctagcccacagatcaccccgagctgggcgcctggtccgccttttcccaggaccccaccctggctggatgtcagggtatgcc

SEQ ID NO: 6168 - DNA, 293 bp, Homo sapiens
gtcctatgtactgggatacagaggcacacatggcaggtaaacacatgctatgatctggatgttagtgtccccttataatttatttgttgagatcctaaccgccaaggtaatggttttaggaggtggggcctttgggaggtgatgaggtcatgagggctccaccttcacgaatgggattaatgtccctataaaagatcccagagcctttggtagttcatgagcatgatgattgggtgttcacgcatgggggggaagatgtgccgccttcaaacctttgtacaatgtacaatgtg

SEQ ID NO: 6169 - DNA, 1563 bp, Homo sapiens
aattttatagagacagtggctcgccatattgccaaggctggcctcgaactcctgggctcaagcaatccttccgcctcgacatcccaaagtgctgaggtaacaggcgtaagccactgcgcccggcctcctatttttcatcaaataaaatacaaccgttcagagcagcatgctcagcaaccacgaggaccagtcccagcgcatccaaggtgccgggagggaaaggaacagaactcccccaggtaagccggtttccccacgccaaggcgcagtcgctcaccacccaaatcgtcgctggggagagacccacccggcgactgcgcgcttcgcactcgagtctgcgttaggaagcctctgaccctttcccgggcccctgcgcgtggaagcctcggacacaactcggagaaccagcgaaccccggcagcacagaattcgaaccgccgcgggagccgttgggacgcgcctacccggtcactgccccgccccggcgcagactgcgtgaggcgccgccgaaggcgcggggcttgccggggatcgtggtcggcgagcgcgcccgagcccactagcggagcccgcccgggactacatttcccacaattaccgccatgatgcccattggtgggggaagccatgggaaccggaggccgtcagggggtagaggcgggcggcgctcacgcctggcctgagggggccgagactgaggcggttgcggaataggactgctagccccgcccagagtccctaccctttggagaactgcgcttctctttcggagggagtgttcgccgccgccgcggccgccacctggagtttcttcagactccagatttccctgtcaaccacgaggagtccagagaggaaacgcggagcggagacaacagtacctgacgcctctttcagcccgggatcgccccagcagggatgggcgacaagatctggctgcccttccccgtgctccttctggccgctctgcctccggtgctgctgcctggggcggccggcttcacaccttccctcgatagcgacttcacctttacccttcccgccggccagaaggagtgcttctaccagcccatgcccctgaaggcctcgctggagatcgagtaccaagtaagtgcggaggataaaccagcctccttcctttaacccagctgcactgcgttgtcgcctctcacccgtttagaaacttctggtggacggccctggtggtgaagaggcgagggccgttcaggaagccagcccgctccgcgcaggcgcgcgaggcgaggcgaggctctcgctggggccggggacccagaacttaggctggacctggaattgatgactacccgccttctcccctttcctccggtgggaaggaggccagaactggtgatgtcgctggcttttctctttgtttcctaattcgcccactgcttttcttagccactacacgctctcatactgagaatttcacaatgcagaactgatacacgttctccttcatcattggacaaggtgatgacacttgtttgaatcacccccacccctttcacacagttcagatgttacaaatcactgtctttg

SEQ ID NO: 6170 - DNA, 132 bp, Homo sapiens
atttttgtatttttagtagagacggggtttcaccatgttggccaggctggtctcgaactcccgacctcaggcgatccacccgcctcggcctcccaaagtgctgggattacaggcgtgagccaccatgcctag

SEQ ID NO: 6171 - DNA, 83 bp, Homo sapiens
gaggcggaggttgcagtgagccgagatcgcgccactgcactccagcctgggcgacagagtgagactcggtctcaaaaaaaaaa

SEQ ID NO: 6172 - DNA, 627 bp, Homo sapiens
ggagatggaaaaatcaaatgaggtggtcagggcaggtcttcttgaaaagggggagtagaacaaagattggaagaaggagaacgagttagccaagtagatatcaaagaaactgatacctaggttggtggaacagctagaataaagaccctaaagccgattggttgatgttcttgaatggttatcctttaaaaacaaacatttgtcttctctctcattagtttttatattgatgttttcttttcctgataattttacaactgtcataatatcccattttcattttcttaacaatttatacatataaaagaacatttataatgtgcaaggaagttataaacacagtcataaaataaacaaccgggagcctactctccaaatggaaaatagaaccttattgttacttttaagtcctgtatgccctgagctcatcccctcactgttcctagaggtaaccgctattctgactttttgaatcgtaatcaatttgcttttctttataactttaccatatgtggattactaaatagtataaatttttattattaaatgttcacattctttgtaaggtttatacaaatggcattttataagtactattttttcactcagatttctgctacttatatg

SEQ ID NO: 6173 - DNA, 648 bp, Homo sapiens
tgataggatttttacatccttgttcatgaatgtgttagacagtaattatgtattttttagatgcggcttattttttcccaaactatttaaaatagttttttattttgtagtataaatcagattaaatgttaagccttcagagttggctggtcacatagacaactatggctgagggccttgactcaaagttttagttataaaattataaaattacacagcgtagttagccgtaaaacctaccttgggtaaatgatacatactttattatatgacttactattttctatcttcttccattatcgttttataaatttctaaattcttatagttataaaaagaaaaaatatatagaattattccaaaaaaattatttttccattttttattgtggtaaaatacatgtaacttaaaatttaccaccttaagcatttttaattatacagttcagtgatattaagtacattcacattgttttacaaccatcaccaccatctatttccagaacatttttcatcttgcaaaactgaaactctatacccattaaagtccatattcttccatcttcccagcccctggaaaccaccatctactttctgtctttgtgattttgactactttatgtatgtcatgtaagtgaaatcatacagt

SEQ ID NO: 6174 - DNA, 190 bp, Homo sapiens
aacaatttcataactaaaacaaatgttgttcaaacattgtgatataatcaacagaccttgttttgatagaccactcacaaaaatttaatttgggtcatattatctgattgaagttgttcccaacttatgcattatcagtaaaagaaataatttatgaaacggaaacatgggactgatatattatccagga

SEQ ID NO: 6175 - DNA, 462 bp, Homo sapiens
ccgggcgtggcggtgggtgccatagtcccagctactcgggaggctgaggcagaaaatggcgtgaacctgggaggcggagcttgcagtgagccgagatggcgccactgcactccagcctgggcgacagagcgagactccgtctcaaaaaaataaataaataaaaataagactagagcagcgaaatgtgacgatcacttagagaaacaggccattaggaatccattctcactgtgttcgctctagacaaaacaatggtagattaatgtgttcagaagccaccgtcattactgcttttgccgaagtatagttgtgaagtcacaactacacagagatttctcaacctacaaagtgtgtctgtacatttcttttttttaataagccttgtttgcagaataaacaaggcatttagcaaactaaaaataataaaataggcagagcaggagttcaagactagcctcggca

SEQ ID NO: 6176 - DNA, 463 bp, Homo sapiens
ccgggcgtggcggtgggtgcccatagtcccagctactcgggaggctgaggcagaaaatggcgtgaacctgggaggcggagcttgcagtgagccgagatggcgccactgcactccagcctgggcgacagagcgagactccgtctcaaaaaaataaataaataaaaataagactagagcagcgaaatgtgacgatcacttagagaaacaggccattaggaatccattctcactgtgttcgctctagacaaaacaatggtagattaatgtgttcagaagccaccgtcattactgcttttgccgaagtatagttgtgaagtcacaactacacagagatttctcaacctacaaagtgtgtctgtacatttcttttttttaataagccttgtttgcagaataaacaaggcatttagcaaactaaaaataataaaataggcagagcaggagttcaagactagcctcggca

SEQ ID NO: 6177 - DNA, 106 bp, Homo sapiens
cacgcctgtaatcccagcattttgggaggctgaggcaggcggatcacgaggtcaggagatggagaccatcctggctaacacagtgaaaacccgtctccactaaaaa

SEQ ID NO: 6178 - DNA, 405 bp, Homo sapiens
tggctaaaggagcagaggaaatggagacggtcatcctgtagatgtcatgaggcaagctgggattaaggtcaccattgcaggtctggctggaaaagacccagtacagtgtagccttgatgttttcatttgtcctgatgccagtcttgaagatgcaaaaaaagagggaccatatgacatagtagttctaccaggaggtaatctgggtgcacagaatttacctgagtctgcttctgtgaaggagatactaaaggagcaggaaaaccagaagggccttatagccactatctgtgcaggtcctactgctctgatggctcatgagatcagttttggaagtaaagttacaacactcccgcttgctaaggacaaaatgatgaatggaagccattacacctactctgagaatcg

SEQ ID NO: 6179 - DNA, 603 bp, Homo sapiens
taactatatacctcaaagaattagaaaaagaagaacaaactaagctcaaagttagcagaaggaaggaaatagtaaatattacagcagaagtaaagtagaggctagaaaaataataaaaaagatcaacaaaatggtatttgttctcatactatgataaagacatacttgagaccgcattatttatggggaaaagaagtttaattgactcacagttccacaggctgtacaggaggcatggctagggaggcctcaggaaacttagaatcatggtggaaggtgaagaggaagcatgcaccatcttcacatggcagagcaggagagagagagcaaagttggaagtgctacacacttttaaacaaccagatctcttgagaactcactcactatcacaagaatagcaagggagaaatccacccccatggtccaatcatcttccaccaagcccctcttccaaccttggggattacaattgaacatgagatttgggtggggaaagaaaagcaaaccatatcagagattgaatcaataatccaaagcctttcagcaaagaaaagcctgcaaccagatggttttactagtgaattccacaaacatttaaaaaat

SEQ ID NO: 6180 - DNA, 375 bp, Homo sapiens
atgcccaatttgggggtgttggccttcaggttctgattctcttcttgtggatctttgtattttgtgacatacagcatctgcccattagcatgagcctctaggttaattcagaccatctttatgtcttggtaccaaggatataaactctctatgtagagtaaacatagaacttgtaacatcttgggtgtatttgaaatgactctatccccagtgatgactggaatagaaacacaattggtcatcttgaagatactgtccataggaaagggaaaagtaaaggatcttaggtcaaagtgagtttgagatatccaaggcaagacatttgcttctggtacttccagtgtggctccatctcagagccatgagagaatgccc

SEQ ID NO: 6181 - DNA, 375 bp, Homo sapiens; identical to SEQ ID NO: 6180

SEQ ID NO: 6182 - DNA, 375 bp, Homo sapiens; identical to SEQ ID NO: 6180

SEQ ID NO: 6183 - DNA, 319 bp, Homo sapiens
gccagagtcaggtagaaagcagaccatgctatatagggttaaaattaaaactcctctgatgagactttatggtttgtaaggcatgactccccaggtgccttgggtaggaatttgggcaagataagaaaaaatcagagtttagtcctcaaagagtagaataagatattaatgtcagaaattattattgttccccagactacctttggcaatttatagttaataatacagttagctggcccaatattaaacagtggtccctgaaaacttaggactaagcattgctgagttcctggtcaaaaacactgatttaaaaaaccac

SEQ ID NO: 6184 - DNA, 319 bp, Homo sapiens; identical to SEQ ID NO: 6183

SEQ ID NO: 6185 - DNA, 319 bp, Homo sapiens; identical to SEQ ID NO: 6183

SEQ ID NO: 6186 - DNA, 261 bp, Homo sapiens
gagactgagtctcgctctgtcgcccaggctggagtgcactggcgcgatctcggcccaccgcaacctccacctcccgggttcaagcgattctcctgcctcagcctcccgagtagctgggattacaggcatgggccaccacgcccggctaatttttgtatttttagtagagacagggtttctccatgttggtcaggctggtctcgaactcccaacctcaggtgatccgcccgcctcggcctcccaaaatgctgggattacagg

SEQ ID NO: 6187 - DNA, 261 bp, Homo sapiens; identical to SEQ ID NO: 6186

SEQ ID NO: 6188 - DNA, 261 bp, Homo sapiens; identical to SEQ ID NO: 6186

SEQ ID NO: 6189 - DNA, 2678 bp, Homo sapiens
  SITE (221): n equals a,t,g, or c
gaaaaacaaagatgctttgcagcctattaaggaagacaggactgggaaggcccaggatgatgctttctgggtaaagatcaagtttcttttataatctctctctgtgtgtgtgtgtgtgtgtgtgtgtgtgtgtgtgtgtgtgtgtgtgtgtgtatgtgtatatgagtgtatgtattctttctagttctgtgttccccgtgtcattagcaaacttgttcctncaattgctcaaatcagaagcagagaaatctttacttctccttccctaatcttttatgtccaatttattactatttttaggaaaattaccattagctatcttaccaatatcctagtctaaactatcttgtgccctgtgcagatatcttgtgccctaaatgcagatagatgatactgaacaaactagaaacaacgtctgcctttatggagcttatagactggcagagagccaaagaagcaggaagaaaaagaacagggtaatgagatggggaataattgggaatgttgaggaggcacctggtctacgtaagataaggtggtcctggaagatctacctgaaaaagtgatgcttaagctgtgatctgagtggaaccagccatgtggaaagtggtggggtgaagtagcccaggcctagaacagccagttcaaaggccccgaggcaaggaagagcttgacttatcctaggactcattagcaaggaggtcagactgtcagagatcagatcatgccacgttctgcggactaaagcaaaggattttgggtttatttttaatgcagaggaagccatggcaaagttttgttttgttttaacgggatctcactctgttaccccagctggagtgcagtggtacaatcatggcttactgcagccttgacctcctgggctcaagtgatcctcctgcctcagccttctgagtagctgtgactacagccatgaaccaccacacctggctagtttttcattttttgtagagactgggtctcaatatattgcccaggctgatgtcaaacttctgggcttaagcgatcctcttgccttggcctcctaaagtgctgggattacaggcgtgagccctgcgcctggtaatggcagagttttaagcaggtaaaagggagtgaatttcagctgagcaatctcacataagtttgtaacctttcctatccttgctacttgtatcctgagataaagaacctaacctctcaggaccgtggtaaggattaaataataacatctgcagaacacttaacacacttggcacaaaaaagctcactatgtgttaacttaaaaaagaaaacattctgtttaaatggaataattttaaatgctgttttcccttttaattcagtactaagaataagtggaattgtgggctgtatatagtaaattgcttccttattaaaatagtattgtatatttaacctgtaagatttttttaaagataaaaaatcttttatagtttaaatgtttaaggaaatgtctgttattcaagtatatatacttttttttttttttgagacagagttttgctcttgttgcacaggctggagtgcagtggtgcgatctcgactcaccgcaacctccgtcctaggttcaagcgattctcctgcctcagccttccaagtattacaggcatgcgccaccacgtctggctaattttgtattgttggtagagatgggattgctccatgttggtcaggctggtctcgaactcctgacctcaggtgattcgcctgccttggcctcccaaagtgctgggattacaggcgtgcgccactgcacccggcccttcaagtatatgtacttagaagcatgtcttagctaatgtgcaggcagaaaagatgaatttcattcattatggtcaatttgcatacttattatctataattattagtattatttttcttccttctattatgatcatttatgccacttagtgagtgatcataggcttgaaatttttagtgttttacgaatccccaacattgctgaggatcttcacctaatgatatctgaaactgaagtgttgttttccttgggtcagtggttcccagacttcagcatgcacgagaatcacgtgaaaggctctgccctgagtgtgagtgctaacaagtcccaggtgatgccagcgctgttggtggtctaggaaccacattttgggaactcttgtcttaaaccaacggaaacatcaatcatttgtgaaatgattgtttactattcaagatagagatctccattctatatttaccctatattatttcacactgaattcttattgataatgagatcagttagaaaattactataaaataaatgttggtggggaaaaagtaatttgcaaactatcatctttccagcttcaatcaaatattacgcccgcattaaagataaaggatttcagaaaataaaagaatactttcaacagaaagagagccactttcctcaaaaatataaccgtcttctattataccgtcttgacagatcaataaataaggcaagttggtatgctttgtgaccaaaatacaaatgtataattatttataagtgttttaacttagtgtggtttatacctaggaactagataaaaatgaatttcagtctgtgtcactgttgctgaaatgtattcagcgattcctcgtagatggcctgaaagaagatgaacctctgctaattcggcagg

SEQ ID NO: 6190 - DNA, 369 bp, Homo sapiens
cgtgagccaccacatctgaccgaaagcaataattttaaatgctgaatttggcctagcaaagcaatatccagataacagaaaacatcatttttttcaattatttgcaaaacagcctcatttttaaaaatttgactttatgagtttaaacttagcttcagaccatttgctagacaaagttttcccagacagggtgagctacagcataaaaacctaaaaatggaagaaatggaaaaaaaaatctaccaattgaacatgagactggtgagtcatgcataggaatggacagaggattgtgaaatccatcttcaactacagcttcagagcatgccattgagtcacttcaccttaattaaatctcaactcccactc

SEQ ID NO: 6191 - DNA, 411 bp, Homo sapiens
atcctggacagcattaatagtcataaaagcaaattaaatagaaattctccttttatcttaattgaagccagacattgtacaatgtcagatattgtacaacatcatatatcatacaagtcagatattataatcgtaatatctaagtcagatactatttaatatttatacaatatcaaaatgatatggattaatatttctttagtttctaagcatgtgcagtattttctctggagtgaggtaatcccagcacatatttttcaagcattgaaggctgcaaaaagtaataatgtgagtaaagtcgaagtagttttcatttgaccctcataggacaagttttcctttccaatgagagttttaaattagcttatggaaaaaagaagaaaatggacaaataagttagagataaactta

SEQ ID NO: 6192 - DNA, 106 bp, Homo sapiens
cacgcctgtaatctcagccctttgggaggctgaggcaggcagatcacgaggtcaggagatcgagatcatcctggctaacacagtgaaaccccatctctactaaaaa

SEQ ID NO: 6193 - DNA, 258 bp, Homo sapiens
cctaattacctcctaatgccaccatctccaaatactatcacactgggaattaggtctttaacatgtgaatcatttggggtggagaagacaaacattcagctcataacaggtaaggtagaaaatctcaagaatttatattttgtatatgaaagatcattaatgagcagaattttaagtttaatgccaattttaatctatttttatcttttctacgattcttttttactttttaatttttaaactttcatatacaaaggg

SEQ ID NO: 6194 - DNA, 466 bp, Homo sapiens
taaatatcttattccaggatcacagatgatgctgccagtggcagaacctagatttggtgcagggccccctctcagtgctagtctgtaaacattggaccattcttccttgaggaggtaggctaaacagttgtggatggaataataaattaactagcatggcttaaaacttcacacttcagccgggcgcggtggctcacacctgtaatcccagcactttgggaggccgaggtgggcggatcacgaggtcaggagatcaagaccattctggctaacatggtgaaacccccccccccgtctctactaaaaatacaaaaaattagccgggcgtggtggcggtcacctgtagcccccagctactcgggaggctgaggcaggagaatggaatgaatccgggaggtggagcttgcagtgagttgagatcgcgccactgcactccagcctgggtgacagagcgagactccttctc

SEQ ID NO: 6195 - DNA, 1460 bp, Homo sapiens
gctgttcagagtgctatagttaaggtggtgtcagcactttcaatataaagccctactttcataactctacttacactatgagttttcaaaaaggtgtaaatggaatataaattctttttcctgtagcccaaaattgctacatggggtcgcagcctagtgtttggcttgtttctttttctttttcatttcttgcttttcaaaacttatatcatctgagaataggtagatagttcagctgctgcattgaaggcttgcaaactgctgaaatgcacttgaatttaaaattgtaatgcatctgttttctcaaacatagtatgataagaggattttcagatagcaaatgcccaataccagttcttcccctctgacatgctgtaacaaggaattaggagtgttgtatgctgcttcttccttcaacaagtgttctccaaaggcctatttaataatttgattgtaactaggaactacatattattcacattactttctacttataatgtttcttcctatattttttctttttatgttttatatttgagtccaatacctagttgtttttagggcagtttcacataaattatcttatttgaatgatctcagctgaatcatttaaaaacaatcctgggtagcagagtaagtgggtctatccccacttgacagaggagaagaataaggtacaaagaagctgagtgatttgttgaggtcccagtggagtgtcagacctaaacttccagtttcccaattacttaaataaggttcttctcatcagaccctctttcctcatctctctactaaaaaactacagtgaataacttccactgtcatcaaatagaaactttctgtgctggtttcccctaccccacctttctgtgcttgataacagaagctgttgggagccccaccttcagtcttatttgtccttccttgtgggttttctttggcagttgaatttattcctgctaaatgcagaatgatgcctgaaagtgttgctgcaacaacttatgcacacttccatgccaaccgtcacccttctaaacctttttttcatccctgagaactgcagagcttggtctttgtgcagccttcggattaactgtgcacagtggcttttccatgttttccctgtttgccttttctggcaggcatggatgtgtaagctgtgccagcatttggcctgtagtacatgtcctaaatagttatttacacagtttgagtccattttagtcaactgggtaaataacagccctcttcaaaagatttataaatccataaatatgtctttatacatacccaatagacagaaataactcaatctgtcaagaacatatccaaagaggtgtttcccccacagacaggagtaatacatattttaaaactttctctgacatattatttttactgcatttcttttttcctcattccttttccatttttaccacttcattatggcacctgtggtt

SEQ ID NO: 6196 - DNA, 405 bp, Homo sapiens
tggggaattttgaatgactgataatttgctgaattagtagctgttgtgatcagtgaaagagttttagtacacatttttacctaaacattaaaaaaagaaatacaaaatccatggctgggagcagtggctcacgcctgtaatcccagcagtttaggaggccgaggtaggggggggtcacaaggtcaggagttcaagaccagcctggcccacatggtgaaatcccatctctactaaaaatacaaaagttagccagacgtggtggtgggcgcctataatcccagctactcgggaggctgagccaggagaatcgcttgaacccaggaggcggaggttgcagtgagccgagatcatgccacagcactccagcctgggtgacagagcaagactcccctctaggaaaagaaa

SEQ ID NO: 6197 - DNA, 630 bp, Homo sapiens
cattgtcacacgagggaaaaaaataatgccaactggaaagtcaggtgggttggacctgaccaaagtctcatcatggaagaagggaatgaaccaagcaacctcagtatgtttgctggaattttttcatcttgtctatgctattgtattttaataataagcgtttgtcctaaattctctgtgaggtattaaaaaaaattagagcatgaagtggagttttattcttcatccatgacttaaatttaaacctccagatttataaaaataaattttaactagcggttatagagcatagattttatttctttcttagaaaagacttaaatgacagaatggattcataataatacacatttcactgcaatcactgtacacatttcaaataaattatcactatccttgtttcttgggtgaatgactggtatttggggctagtgtgtcatcctgtacgcctgcttacccctcttcttcctttaagctctctgtattattccttttctgtgttcattctttgcttaaaattcacgcctttgttccccacagctgatatgcttgcagccaatattctggggctccaagtcactttgttttctcctccctaaaaattttcacatctacccagatacctgattt

SEQ ID NO: 6198 - DNA, 630 bp, Homo sapiens; identical to SEQ ID NO: 6197

SEQ ID NO: 6199 - DNA, 540 bp, Homo sapiens
tgtgtgttaagcaatgattttatttcattctggcaattaatgtggtttttaagaaaaagagtattttttaaacaaagatatttgtatgaaacatgagtaatttgttatttgctgtcatagaaaccaaaaactttactcatgcttttctggaaagctgccaactttggattgagcttattttatttagctaggtactggttgatttattttgtttaggctagcttttttgttttggagacaggctcgctgtgtcactcaggctggagtgtagtggcatgatcttggctcactgcaaccactgcctcccgggttcaagtgattctcgtgcctcagcctcccaagtagctggaattgcaggtgcacgccaccaagcccggctactttttttgtatttttagtagagacgaggtttcaccatgttggccaggctggtctcgaactcctgacgtcaggggatccatctgcctcaaagtgctgggattataggcgtgagccaccgtgtctggcctaggctagtttttaatctctcctcggtgtccc

SEQ ID NO: 6200 - DNA, 540 bp, Homo sapiens; identical to SEQ ID NO: 6199

SEQ ID NO: 6201 - DNA, 114 bp, Homo sapiens
ggcgcagtggctcacgcctgtaatcccagcactttgggaggccgaggtgagtgaatcacgaggtcaggagattgagaccatcctggctaacatggtgaaaccccttctctacta

SEQ ID NO: 6202 - DNA, 114 bp, Homo sapiens; identical to SEQ ID NO: 6201

SEQ ID NO: 6203 - DNA, 10462 bp, Homo sapiens
aggacacaaagatgggaactcccaaagaaaaaaatgaagcaatttctaagaaaataccagaatttgaagtggaaaattctccattatcagatgttgcaaagaatacagagagtagtgcatttggagggtctttgccagctaaaaaaagtgatccatttcaaaaagagcaagatcatctggtagaagaggtgagaaaagactgtaatgagtatacttaaatatcagttattggatgggcacagtggcccatgtctgtaatcccaacacttggggaggtttcggcaagaggaacatttgagcccagaagttcgagaccagcatgggcaacatggcgaaacccatctctacaaaaaaattaaaaaaacagttgagcatgggggcgtgtctctgaagtcccagctacttactggtgaggctgaggtggaggatcacttaaagcccaggagactgaggctgcagtgagctgtgtttgcatcactgcactccagcctgagtgacagactgagaccctgtttcaaaaaacaaaatcaaaaacaaatattttctcaatggtgttgggatcctaagcgaaatacagttaattattgattacctcgggtaatatgggataaagaaggctacagataataaaaattatggttaaagcaaaattggtcttcctcaaaagtgagaatagatttaatataaacttatttagctaatattacatctgtggtttagaacccacttcccattctttaaacattacctgaaagtatacaaatgatacatttgagaaattttggagattaaccattacatggttagataaatgtacccagtgtttatactatattaaaatacttttgtcagtgttgtttgttgcttagctgagtttcctcttttttttgaatattagaacacactgcaatatcatatcattatcactgagcataggttttgttctttttgctgtctaaaatatttcagaagtgattagatgcattgttgttcatgaacttgattttcctaaccagccccctcccttaacactattctgctttttactggtaagtgaccacacaatactaccattgctcagcattacagaactcatttcactcaagctaaattctgaagttatttgctaatgttatttttagtacatgttttccacaacatgctttagcattgcttgaatttggttaagcagccagaaaatcagtgttactttttattcctgagacactgaaagaaaaatttggtttagcagatattaattcaggtattagagttccctcctttattgcattcctgatcaaactaaatgagcattgtccaaataagagaactggatgtcagacacttttcttttttcttttaagacagggtcttgttctgtcacccaagctggagtgcagttgtgtaattatagctcactgtaacttcgaacttctgagctcaagggatccttccacctcagccttccaaacagctacgactataggcgtgcaccactttgcctggctaagttttttattttttgtagagttgggaactcactcttttgcccaggttggtctcgaacccgtagcctgaagtgatcttctagctttggcctcccaaagtgctgggattacaggcatgagccaccatgcctgactggatgtcagttatttttcttgtttgtaacatgaggtctagtttcatggtccctaagtacttttaaatctctaaagttctattgtttctcttcattgactctacactaaagtaaagatggttagtattttttactttcctaattttgaaaggaaaaacacattttctgattaaaagaatttatattagcaatgggatcagatagaagaggaaagtcttaaaatttcatgaagctctgaaagtaaaattaattttctttaagagtgtttatgacaggggatatttagtgttttaattcccagaagcactctgttttcttgagggagaagccctttttttccatgggccaattttatttgtatttttaaattttatttatgttatttttttgagacggagttttgcacttgttgcccaggctggggtgcaatggcacgatcttggctcaccgcagcctccgcctcccgggttcaagcgattctcctgctgcagcctaccgagtagctggaattacaggcatgcgccaccatgcccagctaattttgtatttttagtagagatggggtttctccatgttgttggtcaggctggtcttgaactcctgacctgaagtgatccgaccgtctcggcctcccaaagtgctgggattacaggcgtgagccaccatgcccggcctcttgggtcaatttaattatggcttcaagaagtttattttttagtgatgtcgggggcagagtttttaatttgcatgttttttctttttcggttttattgatatttaatagagagcactattttgatattggatacttttttagttttagaatgtacgtatgcttttttcagtaatgaagatgtgataataggtttctggtgaagaggtatgttgtcagaatgattctgtttcttaatagagatgtcactgtccaaattgattataattgagaagagtctgcttcctttaaaactagtcattttagtgaatacagagctgtcaagctcacagttgtggcagacagcagcttaggtcactgcacaactggaactgcctctaaatcttcccagcataaagattcttatctattctctcctttataatgggatatccatttaagatgaggaaatacttcagtgtttcatttcactttacaggattgtacctggatggtctatacagagttgttggggaacttctttgttgcttatttttgtgttgtctgcaatgggaggggctgctgactgtgaagtgcttattatccttatcaggggttttgttgcattctaccaatgggcttggtaatctttgctttactttttcttttctgttttaggttgccagagcagttttatctgattcaccacagctctctgaaggaaaagaaataaaattagaggaactaattgactctctgggttctaaccccttcttaacaaggaatcagattccccgtactccagaaaacttgagtaagttaataatgctttctgttacttttttctttcatcgacataaccactgttagaaccatggcctgacagatctttttagctgagttgccaaaggctgtttatttatgctgttgtaatcgacgtactaagtgtgggcattctcacataacagtcttttagcagtattttgtgccttcagtgtactcaatatacagagatataaaattttgataatgtacaattttgtctttgttgttatactttgcttttatctagaaagatcttatttgagcatttaaaaaaaaaaatctcttgcctcctggtctgacctgtgatctacatatttatagagtacataggctgtgttctgccagtcatcaaccagaagcatcagccataaaccatgtgtgcggaggtctttacccctcccaaatgagtcaaactgcccaataccttttttcctataacctgtaatttgtgtaggcaaagttctgatattggtgtccttaggtaggcacatcatcttggttgagtaattaaataatttctgttttgctgctgatttaattcagtttgaactgagccacagcctaggtcagcaaactatagcctatgaaccaaatttggccccaccttgtgtgtttttgtatataaaattgtattgaacataagcatattcatttgttgacattgtttatggctactttcatgctatcatggcagagttaagtagttgacagaatggatggcctgcaaagcctaaaatattgctatctggcccttatagaaaatgtttgccaaactgtggcttagatggacaagaaaaggtctttttaatacatgtaattcatatgtgctgtgtaaaattggatgcatatttcaggaacagctgtctttatatgtgtttatttgtgcgagcagttggagatggggttcttcgatgttgggatttgttatattgtggaggcttatcatccaaccagtatatttatggaacatgtactgagtcaggagctttatcttcagtgttagaaataaaatgattcattgcatgctctatgtttgggaatgttagtaaactgtgtttttctcccctttaattagtaactgaaattaggagctcatggagaaaagctattgaaatggaagaaaacagaactaaagaaccaattcaaatggatgctgaacatagagaagtattgccagaatcattacctgtgttgcacaatcaaagagaatttagcatggctgattttctcttagaaaccactgtatcagattttggccagtctcatttgactgaagagaaagttatttcagattgcgagtgtgtgcctcagaaacatgtgctgaccagtcacatagatgaaccaccaacacaaaatcagtcagatttgttaaataagaaagtaatttgcaagcaagatttggaatgtttagccttcaccaagctttcagaaactagccgaatggagacattctcccctgctgtcggcaataggatagatgtgatgggtggcagtgaagaggagtttatgaaaatattggaccacttagaagtttcttgtaacaaaccttccacaaataaaactatgttgtggaattcttttcagatatcaagtggaattagttctaagagttttaaagataatgattttggcatattacacgaaactctcccggaagaagttggtcatctaagttttaatagttccagtagttcagaggccaattttaaactggagccaaatagtcctatgcatggtggcactcttctagaagatgttgtgggagggagacagactactccagaatcagactttaatttacaggctcttcgcagtagatacgaggctctgaagaaatctctttccaagaaaagggaagaatcttacctctcgaattcccaaacacccgaaagacacaaaccagaattgagccctactccccaaaatgtacaaacagatgatacgcttaactttttggacacctgtgatttgcatactgagcatataaagccatctttacgcacgtccatcggtgaaagaaaacggtctctttcaccactaattaagttttctccagtggaacaaagattgagaaccacaatagcatgtagtcttggagaactacctaatttaaagggtaaggtttaaatagacctatgcatattcacctgttgaagttttctctcaacttttgataaaaccagtacacaaagaatgctgcatgacctttattgttaatgtgctcccccttccttcatttaggatgaggggaatgatccctcactggacaggtcctttcagaatctctgtttatgtatatatagttacaattgatttgagacaggggtgggaaaaaaaagcccccccaatctgaagcttacaggttttataatacaaatgactgaaaagtaaatgtcatcaaaatcttgcccagtggaaggtggtttttaaacacttgagaaacccaattttaaatatcatcactataatggtgtaatatctgggggtggggtgtagaaataaaagaagccaggtcagtgtattagtttcctagggctgccataacaaagcaccatcaagtgggtggcttagaacagcagaaatttattgtctctggagacagtaagttctagaggctagatgtccaaaatcaaggtgttgacagggccatgttccctctgaagccactagaagaggatccttctttgcctcttctagcctctggtagcaccaggcattccttggcttgtggcagtgtaattctaatctttgcctccattgtcacatggtattcttcccttgtgtgtgtattgtcttataaggacacagtcatattagctaattaatgggtcaccctactccagtatgacctcatcttacttagctaattatatctgtaatgaccacatttccaaataaggtcacattctgaggtactggggttagaacttcaacatatgtttttgggggtattcagttcataacagttagtattaataattattgaagctaggtgatggatatattgagttaatcacagttctcttcacttttgtatgtttgaatgttttcctcataaaaggttaaaaaaattgctcttgtagctcattaagagagataaggatctggtgatacagattcattacatactctgatttgcccataatagttatacactgccatattgaaaagtatttggctgggcacagtggctcacacctgcaatcccagcactttgggagtccgagatgggaggatcacttgaacccaggagttcgagactagcctcagcaacacagggagactatgtctctacaaaaaattaaacaattagctgggcacgttggcgcatgcctgtgatcccaggtacacaggaggctgaggtgggaggattgcttgggcctgggagtttgaggctgaagtgagctgcgatcgtgccactgcactccagcctgggtgacagagcaagaccctgtcgcagaaaaaagaaaaaaaaaaaagtactctgggaggaatgtattgatctctggagaaagagggtactttggtgagaataataataattttatcataatcaagtatttgcaaagctatgaaccttttttgtattgactaaaatttgctattgcttggaatctattgtttatttttctttgtaatgtttgcttatacttttttaaaatcaatttgcagaagaagacattttgaataagagccttgatgcaaaagaaccaccgtctgacttgacaagatgaagacgtacccatttaatataactatgatgcacttaaattgaagctatgccacaggatagaaaatgaattacaacttaaatacatgttggaagtgtaacactgtttttcaaggtttaaaaaaattcctaatgccttttagccttctttaatatttttaggtaaggaaagtatgtttggattttttcctctttgtaggtatatgagattgaaatgtgaagtatttggacaacaaacgtcaagcaatgggaagccattttgatttcttgagtaatcttgtaagcattaagtgaatgacaaagtagtagtgtaacttatttcttatgttataacttcagtcaattaatataaggatagtttttgttgtatgttcactaaatggttaatataatagccattgaatatactaatctttcatcttagagaactatacaacttttattgtttcttaatggaacattctggctaaccagaaaaagtgagaaaagtagtaccttgggatgtgtagtcaagatgacaaattttaagactggaaaagctctaaacaggcttaatgattcttcaggtagaatgatcctgagaagtgatgtttgatggaataaagtgcatgtgatgattaagtgaagactggggcagaatgatttaaaaaaaggaaaaagatggaagatgagtagacacttgcaaggaacactgtcaaactataaatccattcagtgggttgtataacatttatatttagtctaatttagactttgataatttaatgctacttttatattttaacaaaaatataaattaaaattttcattagtctgttttgttgttgggtttttttgtgaggtactccctgttgggggaaaggaacaaggaacaaccatcagaatcccccagtccctacagaatagcctcacagtaacttgagaaaactgaacttggggttaaataacttgtcacacttgcagtctcctgcctcactccttcaggtgccctgcctagaaaaagacttgtgtctagcatccaagtgaacacatactattgccctctgtgaaccaggaggaatggaacaggcaatggaagggtgatagtacctacaataccctttgtagaccccatctcactaccatcaaaatcttgtccactagcccccaaaaaactggcaaggaaagaaggtggaggggaaatttatggaagtagatggcttaatagttatttcttttatcttgggctgcctttctctaagttggttgtcctgtcccagtgtgaagacccatctttttgtgagaaaagacaaaagaaagcacatgtaactaccttctttgcaatggaaaaggagaaagaaaaaatcttctcctaagttgctgttttcttttattagttaataaaacaaatcagggactatgcaggtctatggggaaacctttagtctgctttaagaaaactcagtatctgaaaatcttaacttagcatgtgatactgtcttatcagcatctgcagaagtgccaaagccactgctagacacttaatgtgtattatttcatttaattatattttaaatgtgcttccttggtaattcttaagctcgagaaagagtttgagaactgctgctaggaaatagagattcacatttaaccctgtggtacttttaagaagcaggtacgttgttgcatatatacttgggtagagattggtaactatctgatagggaagctcaagttggccacccaagtctgagaaacccttaattactgagaatcaaaagagcagaatgtctgtagacattttggatttgtaaaaatcacattgttgagttatacctgtgatgggctgaaagtttttggcattctttcctgttcttcatatgccagtaccataaacaaaaagtatctcagatctgtcactttcttctcctaaaccaatgtgatggcagctttttgccttcagccttttccctatccagtatctcctacatagttaccttttgatcttaaggaactgttttgattgggtcacttccttgcctaaaattccattgattgttcattgttaattctaaaatagagttcaaatttaaaggcatgtaagttcccctgtaacggatttcctctactcccccttccgctgtaatctcccatttttttactgaaatgcttcagtgagcatgggtctttagaggtcttgatatacaattttcctgaagcaggaataccttgctttcctctactagtttaccacaattacagctctcttttaagcctcagaaaaaaatctcacttccgtcttgaagtcttaatccacgctttttatatccatgtgcctactccttctctgaaatctcctatggtttatctttttattcatttaatatcccacgaattgattttattatatattttttatggttgcatgtggtctttctagttatagcaatatacacatacatgcataaatacatatacacctatgtaaatgtgtgttgggagtatgtattcacacacatacatataccccaaggccatgtgtcatctttatcaatatttaagttttggaattgttttgtttgcctcctatatcatggaataaatggtaaagagggctaatttattactctaagtggatttcttattacattaatatcagacatatagaatgtactttgttttactatttgtaagatacaaaggtatataaactgacatacatcagcttgaaacctgagataatgctaaaatgttctaattattttaaatgtttaaagaggacaaccatgtaatgttgctaaacatgaaaaatgtcatcaagtggaataaagaatagctgaagttaacatttgggggaaattgagctgaaaacaaaaatatgagtattttgataccttttctttaccatgagactcttgactatgaagtcaaatttatctaaaggaaaaacaggaattctggagacctgtgtaaaagcagactattatcttcctactgtgagagtactaaaattaaaatacgtttaatgacgttttcctcaatgtaaaagcattgaagtaaatgtttcttttatgttgcagatacatagttgctctagagatcacctttttctttatgcattgtgaatagcagtctgcatcctaagtttaaaatatttgagaatcctctatgggactctctgtaaatgttttaaatactgttgttttcaataaatattttatactatctggctctggaatttcctatataatctcaaaaagaactatgcccctgcaaatcataagatgatcacatgtaaagttatattaataacctgatcaacaaatttgagaggttcagtgattcaggtcaacatattttgttacttccattttaattactagatttacagtatatagtattttaaaatgaatttttaaggttatatctatactgtcagtttacacatctggagtctttatactaatgtattggcaatggccctaattaggtaatttttataaattacacctgaatagcttcttactcttcatgagtagcgtcatccacatctgctgctagaaagggtttaatgaacattaaataattttataaagccttagaaattctaaagccctatcacttatgtttactg

SEQ ID NO: 6204 - DNA, 298 bp, Homo sapiens
ctgggccaggtgtggtggctcacacctgtaatcctaggactttgggaggcgcaaggtgggcggatcacctgaggtcgggagtttgagaccagcctgactcacatggagaaagcccatctctactaaaaagacaaaattactcaggtgttgtggcgcatgcctgtaattccagctactcaggaggctgaggcaggagaatcgcttgaacctgggaggcggaggtcgtggtgagccaagatcgcgccattgcactctagcctgggcaacaagagcgaaactccgtctcaaaaaaaaaaaa

SEQ ID NO: 6205 - DNA, 3961 bp, Homo sapiens
gtgtactggtccgttagcaaattctctttcagagaaaacaagagacccagtagaggaagatgatgatgaatacaagattccttcatcccaccctgtttccctgaattcacaaccatctcattgtcataatgtaaaacctcctgttcggtaagagtatgggcagatttttgccacttacatctgcataagcattatcatttgtaatgtttgtttttaaacaattgattcacgtctaattaaaaatccttaatttccagctcaaatccttctcttcctattataccatttccagcattacttttaaagaaaactaaaagatgcagatttctcattaatcaggaagtcactttattttatcagttctaaacacctatctcatgaagaaaaattagtgctcagaaactaaggtattattctgaccttccttagaatttttcttcatgatgtacatactagtataatttaaattcattttccttcttgatgtacttgctacctacttctattcagattttgaagaagtgggaaaaaaataccaaggtgtttctcttaactttttgtttttctatcaagtgctatttaccttcctttagatcaaataagaatgtgaggaataggccaggcgtggtggctcacgcctgtaatcctagcactttgggaggctgaggcgggcagatcatgaggtcaggagtttgaaaccagcctgaccaacatggtgaaaccctgtctctactaaaaatacaaaaatgagccgggtgtggtggtgggcgcctgtaatcccagctactcaggaggctgaggcaggagaatcgcttgaacccgggaggcggaggttgcagtgagccgagattgtgccactgcactccagcctgggtgacagagcgagacaccatctcaaaaaaaaaaaaagaatgtgtggaataatgggggttttttccttacttttgtggcttattctcacttacatggggatagccttggtctttgacttggaagctccatcgaggtaaataagagttattaataatgggttgtttgtattgaaatattactttatctttaagtaaaggcatgagtctgcatttatattattgaatttataaactgaaatctattatttctgggtttgtttgttttacctgactgaaatatatgaggtactcagtactcccagctacaaaacttactttctgagttctggtttcctttgtataacattcctggggccatgcttggcacatagaatagggctcaagtactgctggtggccctacattccagcatctctccatgactgactgagggataggggagatggcaattacttcagtcatctgtgccatctttacttagtgtgccatttccttttgaggtcaagtcaatcaactgaaaacattttataagtacagtgttcccttcttttccaatgaaaaactaaaaaatgttttaatgtgtttcttcaggcatctcactgaggtaggaaatgcagcacttggaaagagaagcacattttcattttaagcagatgtctgtcttaataagtgaccctggttagaattatcaacattctgctgaattattacccagaattgttaatagtctacagcgcaggactttatttttttaaaagcaagaacctaaacactccttgctattgctggtgtttagataagacatctgttgataaaatcatatcattgagaagacaaagaaataacgaggagctaattttatgtatcagaagaaccaagtagctagtgatgtatttgagaacaaaagatattccttctcatcaaatataagttgttacaattttcggttctttggctcttacaaatgtgcagtaatttttaaaaactaaagtaggatgagctttttttggtctctttgggagtcttattttttttcattgctggataagtgaggagtataattttaatacgttaaattttaattgttacatcatattggatgtgattttttgtggcagagctcccaaatcttgaaaataaatttgaattataaccatcattaccatttttctattgttacagaaaagtaataaacgttgataatccctaaatgtaattggagtgaattctttatctaatttgttcttgaaagctgatggatgaagtatcttcttttgtgctctccaaagagctctttaagcttaacactttctttccctgtgtgtatttttccccctttggaacatcaggagaagtgaattgtcaatatgtagaaaaagtgacccagtaaatgagtaattcaatttaatttcagtaaaaatccatcattattatgaagattcaatacatgataactatttttaaatgaactatatctggccccttaaagagaagtggccaccagagagaatagaaatgaatttcagatgaagcattcttgcattatctattcaaatatccgtctcttccattacatacgcacttttactttgctctaaaaattcagagtaaatcagagaaaagtaaaatgtaaactctgatttctatagctctttgtcagttgattgttatagagctatatgctgaaggcaaaatatgctccttatcttctcttcctgctgctatcttcccatggctcaattttaaccattgtgttcatagtatgattccgaagaattaataccaataatttggctgggttcggtggctcatgcctgttatcccagcactttgggagggtgaggtaggcagatcacttgcggccaggagtttgagaccagcctgggcaacatggcaaaaccctactaaaaaataaaaaaaattggctgggcgtggtggtgcacgcttgtaatcccagctacttgggaggctaaggcatgggaattgcttgaacctggtaggcggaggttgcggtgagccaagatcatgccactgcactccagcctttgcaacacacagatacacacacaacaaaacaaaaaaagccccaacaactcaagcatacttttctggtaagtagtaccctttacaaacacattaaaaactgtacttgtcgtgtacccaaggcctttgctaaagtcattttctgtagtgtcagagggccagaattttgttcttggcagtggtgaaatagtaccacaggctctagttctttgaatgttcctgtcagaattgtaatggaattattgaaagttcaataatttttcttcttttatgtgctgtagcttatttttattacaaggaaattttaagttacagaagcaaaaatatgatattaaatactatcaacaaataataaagtcattgagactgctatatgtttttgccttggcacatacatctttttttacttcaaaaacttgaccaggttctattgaattcttccacagagataagttaattttacatagtgtttaggatatcaacaatttttgtggcccttgtaattcttggttatagtttaaaaaaagagagactgtgttacttgagatatttacttctacattttaaaataagggatgagtatcttgatgttattactggtaattttgagaaaagaaaaatatatgttcaaactttattaaataaacaggaatactagttccctctacctctcaagttacttttaattggaaagtattctccttatataattttactctgaactgtcctttaggtcttgtgataatggtcactgtatgctgaatggaacacatggtccatcttcagagaagaaatcaaacatccctgacttaagcatatatttaaagggtacgtatagaatataatttcctttgtgatgtacatcttaatggtcagaatttaaaggcaaaatttcatgccattgtactgaaaatacattaaggttttgtgttatcctctaggagatgtttttgattcagcctctgatcccgtgccattaccacctgccaggcctccaactcgggacaatccaaagcatggttcttcactcaacaggacgccctctg

SEQ ID NO: 6206 - DNA, 3961 bp, Homo sapiens; identical to SEQ ID NO: 6205

SEQ ID NO: 6207 - DNA, 531 bp, Homo sapiens
tttgaatgtcctatctaatgacttagataatatggttgaaacttaaatctttagatttttcaaaatgccttcttgtaatggtcacaaagaaaagcccctaaaattgtttctgttctaactaataaaaagaaataaaaatgaatgttaattcaggcatgtttgtttaatataccaaaggcctcttgctccctctatagaaggtgctgcaaaattgcagtcacttagtttttttgttttttttttttccttcctttttaaattgaacagatttctcatgaggttcatgatgattaacaaaaagatttggatccatgtgtgtattcccaatgccttgcaaactagttggtcgtcctaaagtgaatcaggatgagtttgtgcatttctgccttggcatttttcattggcttcagccagggttagattaaactctggtagcaacagttacgaaaaacattgtttatgtttgcccatttgtttgggtttgttttatttggtttatttactcttatggataagtgaaatgcttaatgt

SEQ ID NO: 6208 - DNA, 403 bp, Homo sapiens
aacacagactcactgggttgtgaatttgcctgaaatttgaatgggttctccaggtgccggtgactcccaagttcacgagaccattactccatgtagatgattaaggtagtagtgtagtagttgggcatcagtcaggttttaagcaagttgttttgtccatactaaatgtagtctaaaaacacatgagagctttgtgctctagtagttttgaagtgatgacttgaagtgttgagattttctttaagtataataattcttaataaatatgaacttgcttttcttgcagcatgagcaccagttccacttacgctaattaaattatgcaaaattaaatagttgtatgtagagaactgataataaattctgttttattctaatcattacaactgtaacacattcaaaa

SEQ ID NO: 6209 - DNA, 531 bp, Homo sapiens; identical to SEQ ID NO: 6207

SEQ ID NO: 6210 - DNA, 403 bp, Homo sapiens; identical to SEQ ID NO: 6208

SEQ ID NO: 6211 - DNA, 271 bp, Homo sapiens
ctgtggtgacttcttttgctcaagggttcacaagggcagcagactgatctgcacaagagggactgagcctggctgcggccgcacctgatgcctgtgcacacctgtccctggtgcaggcccttcccccgcagccccgtgaccttgtcctgtgaggctcacggtgcctgctccttctcagagtcctcatttctccctttaacgcacgccctgtcagcgcctccgtctagcccgtgtcctccagaccttcgaggtcaggggcctcaattcctgg

SEQ ID NO: 6212 - DNA, 297 bp, Homo sapiens
aggctgggggcagtggctcacagctgtaatcccagcactttaggaagctgaggcaggtggatcacctgaggtcaggagttcgagaccagcctggccaatatgatgaaaccgtgtctctactaaaaatacaaaaaaattagccgggcgtggtggcgggcgcctataatcccagctactcagaaggctgaggcaggagaatcgcttgaacccgggagacggaggttgcagtgagccaagattgtgctgctgcactccagcctgggtgataagagtgaaactccatctcaaaaaaaaaaa

SEQ ID NO: 6213 - DNA, 25619 bp, Homo sapiens
gcctacaacacagcagtcccctcaggatgagcaggaaaagctcttggatgaagccatacaggctgtgaaggtccagtcattccaaatgaagagatgcctggtaagaatggagatgtgggaggcacagttgcagttcgtgtgttcctaaggaagcatgtgcagtgtcttctagagtcaggtgtttctggtaaatctaatcttcaccgtttaccagcatctatcttcagtctcatctccctcaagcactttgtggagcaatttcaacaaagagccctgtttactcacatgtatatttatggtttgggattgtctgtcttccctactagaatacaagctcataagaataagagacccttccttttatttacacattactgtattattaccacaccagtgtctgaccagaattactagcctccttggttctatacctcagacctgaggaatatttaacatataataggtactcagtaaatatttgttgaatgaatggatttaaatgctttgcatttgaattattcagctttttttctaaatatcttgaaaactttaatttctttgctgaatagatatatttattgtagaagctagcttaaaaattatacttaacacttatttacatatttttatattctaaaagataaagtaagagataatctgtgtagatacttttgattctctggattaaaatgtaaggaattgagccaaattggttagtactttaaactataaattactgtgatgaagatgatgctattttacctttgtaaaatgtcttactgtgctttctaaagcatagtaatatgctcttgtgtcttttattggtttaattcctaacaaattgggaatgaaaaataaatgtcttggaatggagaagctgggtttgctattgcttgcttctttctcttcctgtgtatggatagtgtttcctctatctcaaggaattgcttgcatttctgagttaagtggaacatatgggcattgtgagggcttgaagaatgcaagaggaaagcaaacttacatggatagtcatttcagacagctctgaagagtctttaacccatgacaaagccatgtcaggatagtatcttccttcacctgaatcagtatgccagttctcttgattgcaggtaaaatgtgatgaatggagctagtttcctagtctctatagattgaaaagattagcattctatcaagaagcttgcagtcttagctatgttaagtcttactaagaatcatgtatctttttctttttcagtagagacggcaaggtgaaccgatctaagttgtttttttaatgtggttaaaatcatttaagtgcggtattcttttaaaactatgtaacaagtccttgatgtaaagaatttgtacaaccaagataaatgtttatttaaattaagcattctcatctattctcttggtatttctgtaggacaaaaacaagcttatggatgctctaaaacatgcttctaatatgcttggtgaactccggacttctatgttatcaccaaagagttactatgaactttgtatcttttgaatgttgaagactaaacatttggaccatacctttttcttgataaggcctattttgtttgttctttatgaagtttttctggagttatcttattcttcgttatctgagtcacatggcactccttctccatgcagatgtgctaagtgagaaaaacactttgagagtactcctttcctatgcttaaacatctttaaatgtgttgtcggtgcatctcaattttcagacccttcatgaggatatttaggctatgacacagttggttctttaatacttagattttgttatgcagcagtctcaaatggacaggaatttaatcatttgccatttcaaaacccattagcagtctgacaggtaaccattgtatttactgctttgcttgaccacacatgctttaaaacccttattttaaagtaagaaaagtccggctaaaattcatccttcgcttgaacactttcttaaaggactaaaacttaagatgtctgcccagtagttagtaatgactccaacaagtttcaaagttttgtttaggttggcttatttttatttttagtccttaatcataattaaaagatatggccatttctgatgaactgcactacttggaggtctacctgacagatgagtttgctaaaggaaggaaagtggcagatctctacgaacttgtacagtatgctggaaacattatcccaaggctgtaagtaattacaaatcagagaacttttgtgtctgtatttctcactatatgttacgtcttttatgattatcagcttaagaaaaagttttaagggtaacttcttaacaaattgagatgaacattttggtagatattctcttacttgttttagagtaactagatttacgttttatgtagatatttgaggaattttggaaatagaaaaaatggacatgcttgctattttttttaatgtcttgactattagaaaaattaatataattgttctcttcctaatatgtttaaaggtaatatctatgttgtatatatacagtgtgtgtgtgtgtgtgtgtgtgtgtgtgtgtatagtttttttagaggtcagtcagtggttatattttaaatgagatattttccttgtcatgcgggagaaaacaacatggttcctgtcttgtttatttaatgttttgttcagtgtgtttggaaataaattcttgatttgaatattttatttctaatcagcatttcttcataattttcctagttaccttttgatcacagttggagttgtatatgtcaagtcatttcctcagtccaggaaggatattttgaaagatttggtagaaatgtgccgtggtgtgcaacatcccttgaggggtctgtttcttcgaaattaccttcttcagtgtaccagaaatatcttacctgatgaaggagagccaacagagtaagtgattttctttcttaattttgttgcaatatttctttcattgtagaatgtataaaagtgtggaaacatatacagaaacaaagtgtgaataattcttccacccagtcagccatttaggtagcatttgtatatagatttcctttgtaatatagaactcctcagtatatgtggtatcatctaaaatgtactcttatgcaaattttatctttggattgttaggacctgcttttttcatttaatgtaattttttctactacattaaatcttctttgaaaataaaacttttttaagagagttgtatttggaaattgaatttgtaatgaaataataaagtgtgagccagctggatttcataattgttcctttagtgtctatcagtttttataatttatagactgctagttaccttggaatataagtgatttgaattatctgttacgagttagctattaactccagagaaggaaaaataaaagccattcagagacactcctgtctcttgtgttatcagtattctagcatcaaagtctactgtacttttatcccacagcaggggcagatggtcagccaactgtggtcttcagtggggtgagctgttcacatgacaggtccccagattaaagaacttcattccttttttaaaaagtttattcatttattttctttctttttttaatttttaatcttttttcagtttgccccaacagattttgtttttttctttttaatattttcatttatttctaaggtttttaatatatcatttatttctaatgttttttaatatatctgcatcaatttcttttaaaacagtacagaaaagataaaacatttaacaatgtagagaaattgatgaagttacttgctttattatgttttgagtgtccgttttgagcatttaattaggcaatcaataacaatttttgaaaggtactgaggtctccatcctaggagacgtagaaaaataaagcaggaaatccatggtctcttccctcacaaagcttacattccaattaaaaacaaaatattcaacagtaaaatgatgtagttagcagtacaccataagtgttacattttttagccttttgtttttgtttttggtttgtggggatggggtctcattatgttgcccaggccagttttaaactcctggcctaaagcgatcttcctgccttggcctcccaaagcactggattacggacatgagccaccatgcccatccttctagcctttttcaattaaggaagttgccataagagcaagtccagttggcccaggatgaggagttggggaaagtaatttgccctttaaatttatactgtcctctccatggtactttttaccctagagtctgttccctttgaaatttaacactaagccaatgaagttgaaagtgattttttataaagcattggtgtactatagagataagtaggaaatacacaaaggagaaggatagtagtaagttggtcctgtaaatactgtgtaaagacttttctgtttctttgcagtgaagaaacaactggtgacatcagtgattccatggattttgtactgctcaactttgcagaaatgaacaagctctgggtgcgaatgcagcatcagggacatagccgagatagagaaaaaagagaacgagaaagacaagaactgagaattttagtgggaacaaatttggtgcgcctcagtcagttggaaggtgtaaatgtggaacgttacaaacaggtttatatatttttgttacctcttcttatgttcagagataaactgaaatctgatttttaaaatcagaatatttttgttatacaatagtacattgaaaaacatcttaaaatggctgttattgaagaagacttaaacggaaagatatatatgcagtgtttgtggattggaagacttaatattgtcaaaatagcatttaaaaagaattgatttatagatccaatgtaatctcagtcaaaatcccagcagacttttgtagaaattaagaagctgattctaaagtttatatgaagaaacaaagaacctggaacagctacaacgaatttgaaaaggaagaacaagttgaaagacccaagcaacctgaattaatgatttactctaaagctgcagtgagatcctgtgtggtattggtgaaaaggatagacacacaaatcaatggaggggaataaaacagggaatggcaaactttacctgtgagggaccagataataaatggtttttggctttgtaagacatgtgctgtacaacaagcttgtccaacctgcagcccaggacagccttgaatatggcccaacataagtttgtaaactttaaaacatgagattttttgcttttttttttttttttttttttttttttaaagctcatcagctaagtgtattttatgtatggcccaagacaattctaattcttcttcaagccaaaagattggacaccctagtctacaactaataacagtgcagatatggtgcaaaagcacccacaggcaatatggaagtgaatgggcatggctgtgttctagtaaaactttatttgtaaaaacaagcagcagctcagtttaccgatctctgactggacaatccataatagacccagatatttatgatcagttatttttgataaaagtacaaaggcaaccttttcagcaagtgattctggaacaattggatgtttatatgcaaacaaaaaaccctgaaccttgacccatccctcataccatatagaaaaaacacagaaatcaatcagagacctaaatatagaacctaataatgttagaagaaaacacagaggaaatctttatgacctaggattagacaaagatttctgaggatatacaagcacaagccatgaagaaaaaagctcacttttgagaggccaaggcagatggatcacttgagtccaggagtttgagacaggcctgggcaacatagggagaccccatctctacaaaaattaccaaaattagctgggcatggtggaacgtacctgtagtcccagcactcaggaggcttgaggtgggaggatgacttgagcctaggaggtggatgttgcattgagtggagattgtgccacttcactccagcctgggcaaccgaacaagaccttgtctcaaaaagaaaaaagcttttaaagtttagaagtgaagtcttggtgagaaaaatctcaaatacgattttcaagttagtagttcaaatgcgttactagaggaatagcttaagattttgaaaacagattttaacccttatgtgtgttttttctcttttagattgttttgactggcatattggagcaagttgtaaactgtagggatgctttggctcaagaatatctcatggagtgtattattcaggtagctgggaacatttcatttttttttaaacgacctattttatctttcattaaatttaattgttttgaaaaaattttgatggaataggaaataagctttcctgaataaagagttttccttgcggggtgtggtgactcacacctgtaatctcagcagtttgggagttcaaggtgggaggatctcttgaggccaggagttcaaaaccagcctgggcaacatagcacgatgccgtttctataaaaaattaaaaaaatttttttagtgtttcttttttttttcatgtaatcttgcttcttctaaaaataatttaaaaataggaattttctgtttctaacttataccttggtctttgtatcaatgtggtttgttttcctccaaaatgtaggaatgagtaatctgagttttctaggtctctgtagctttagtttaattgtaggtgcactttgtttattggaatatttctgtctgagcttatgtttagtagagaggttcaaaagtaatgtgtttgaatttagttgtataagaatacagtgtttttttcccacaaatgtgaactttaccatatgtgagtccagaatattacgtgaaatacttttatttgtattgatcatttgattttcaggttttccctgatgaatttcacctccagactttgaatccttttcttcgggcctgtgctgagttacaccagaatgtaaatgtgaagaacataatcattgctttaattgataggtaagaccttccaacactggcggataaatgctctgacttgggaataatgaattttaaacatttttttgaattatttgtttctgttacatctttatcataccaatgatcttaatttaattatactataaataatttagctttgtgagtatgagtactaggtacttgtctaggttagacatgaaagaggcttaacttaaatgtgcaggagacgtgaagataatgaatatctttattctgtgtgcttaattgacatttaaagatgttgtacagacttattttttaaatcatacaaatccaaagatcatattgaagaacaaaatttgttttttaccatgatgtaagtatcttgcagtgggaactcatttgatttagagtagccgtaagatactgatgattgaaaatgttcaagtaatcactctatcatcacattttcttaaagaaaaaattttaagtatcaaatatgtttagtacatccacttttttattttcttaggtttttttttttttttttttttttgagacagatcctcactcttgtcacccaagctagagtgcagtgacgctgtctcggctcactgcaacctctgactcctaggttcaagtgattctagtgtctcagcctccggagtagctgggattacagacatgcaccaacaagcccagctaatttttgtatttttagtagagacagggttttgccaggttggctaggctagtctcaaactcctgagctcaaatgatctgcctgcctcagcttcccaaagtgctgggattacagacatgagccactgcgcttggccaatgggtggcttttttgcagccatgttatgtagtagtatatgatgtctgtcctacacttgtaagcattgtcatgaaaccagaaacctaagagaagatttatttctgcagataccttttgtatgttttttaaaaaactaagttattagttttaaagtctgagaatttagataacaaatttttccaaattgtcagctcaatcctgggcagcaaaaattccatacttattgggcccactcttaaaggaagctagtaactggattttcctgagttgcctgtaatgtcacttacacatctctgtcagtagtgatgcttctgggcatagcaaaatgtggatgtagttgtgactgacaaacagataatgataatgaaacatactattttgagtaatttaagatgtgggaaataaaagttaattttatgaattttagacttagttgtatttcaagctttagtaaaaatgcagtatcttaaaatagtctatgtacttttattttttaaaggttatttatttaaatcatggttgttgaatacatttgtcactttaatgcatttctgtccatatctgcttaattatgcttcaaagagttgagagaattatcttgttgaaaatctacttaatatggtgtgaaataagaatgctgatgaaaaaggtttcattggcaaaactgtttagttaaaaatgaattgaggaggccgggtgcagtggctcacatctgtattcccagcactttgggaggccaaggagggaggcttgcttgagtccaggtcagtaccaccctgggcaacatggtgaaaccccatcactacagaaaacacaaaaattagctgggtatggtggcacatgctgttagccccagctactcaggaggctgaggtggaaggaggatagcctgagctcagcaggtggaggtttcattgagtggagagtgcgtgactgcactccagcctgggcgacagagcgagactctgtctcaaaacaaaacaaaacaaaacaaaaaaaacaaaaaccttttgggctcatacaaaatatagaaaagcaataaagaataagatgtcatccatgatctcactacccaaaccctgtatcttttaaaataaaggggtgttttttttttttttagattagctttatttgctcaccgtgaagatggacctggaatcccagcggatattaaactttttgatatattttcacagcaggtggctacagtgatacaggtttgtgtagcatttctcctaagttctcaaaactttgaaacttctctgccttccttttacaattgtttaaaataaattgtgtggttttctaaacattccagtctagacaagacatgccttcagaggatgttgtatctttacaagtctctctgattaatcttgccatgaaatgttaccctgatcgtgtggactatgttgataaagttctagaaacaacagtggagatattcaataagctcaaccttgaacagtaagtcagttacatttttgtaaaaatcctcaaagatatttttgtcctagatttgcttttctttctcaattgttttttgaactgctggcatttgtcttgttttaatcatgcattaagattgtcatgcttagcactactaggggcagaaagtagtgaccaattacttgtttttttatattaaggaaattgtggtacctatggaccataggcagtcttcagggaccagtgtctccaatttggatccctttctgtgtgtcaggggcatccaatcttttggcttccctgggctgcactggaagaagcattttcttgggccacacataaaatacactaacactaacaatagctgatgagcttaaaaaaaaaatcccaaaaaaactcataatgttttaagaaagtttacgaatttgtgttgggccgcattcaaagccatcctgggctgcatgcggcctgtgggctttgggttggacaagcttgcatgtgactgagtttgttcttaaactggtaaggaaactttgtcaggcagtatttatttccataagtggtgttttcctacgaatcagcacatggtgaaaaatgaggggctatgtatatttaaggtgcagaattaaattggtttaaatatcttttctattttgagctttgattttgataccttaaaggaaatatcaacagtactatttccaacctgaagcctcctcagctgttctgtcctagacttatggcgtcctctagtggccactatgggcagctatgatcctgttaccttccccagcagttcccttcctgccctgttccccactgctctggcttgggtcaagccaggcctgcctcccgccaacatattcttcagaattttacctcatgtaatcttcctcctttctatctcccttccagtggtttacctgcatcaagaaaatttcttctttttttcctccctttgtgttacccttgttcttttggtcatttttggttttgtgtgtgtgcaaactgaaaacaagtccagatgtggaatgataagtgtgagagaaaattaaatgatgtgccaggtgtggtggcttgcacctgtaatcccagctattcaggaggctgaattgggagaatcacttgagtccatgagtttgagaacagcctgggcaacatagcgagaccccgtctctaataaaaaataaaattaaaaataaaaaaaatttaaattaaaaaaactaaatgatgtatctgtgtctttctccccaagtgaattttaaagtaaaaatagacaaagtaattagaaataacaacctctaaagaggttgtaataaatgccccaatatgcctcaatatctacagaatgattttactaacaactacgtaaaagtcagtcagcctgcttttccttaatcaccaacatctgatgcagaagaaatagtttatgtgtttttctgttgtgtcaaattgctggttttgcatggagtttttttcctatttattttcatcatgaatatacaatacttgttggctggcccctgggaaccaaactaccacttaaaatacttcccttagaaatgtcatcaaattctagacagtcatcttaactccagctataccatctgttcatgagttggaaactgtatctagttttgtatcaacagaaaaataatagatgaatatatatttgtgtttagataagcatttttatcctcctgaaaggaggttgttatagtcttctgtggtggtatgattcacttgacccatttcctttaatgtgtaatgaaaaatttcaaattcttatggaacaaatgctatttgtgtatatagaaagttaattttattcattaagacttctgtttttctttttgtagtattgctaccagtagtgcagtttcaaaggaactcaccagacttttgaaaataccagttgacacttacaacaatattttaacagtcttgaaattaaaacattttcacccactctttgagtactttgactacgagtccagaaagagcatgagttgttatgtgcttagtaatgttctggattataacacagaaattgtctctcaagaccaggtaagagaatacctacgtgctattttagggaaacagtgttacaattttagactttggacctagatacctgagatgggaggggagggtaattcaatactaaataaaatttacaagtaactttttcattatataaattaaaaattggagatgtataaagaattataaaacatttataattccaccagatagagaataaccactgttaattaacatttggtgcatatctttccagacttttgtctgtatatgtgtgtatgacatacatgtgtatcgactttctcaccaaaaaaaggaatatcttgttgatactgtattgtaattttataactggaaacacttttgataatggctttgtatgccaatggtttcacctcagtgggtttcttgtgcctcgcatgttacaggtggattccataatgaatttggtatccacgttgattcaagatcagccagatcaacctgtagaagaccctgatccagaagattttgctgatgagcagagccttgtgggccgcttcattcatctgctgcgctctgaggaccctgaccagcagtacttggtatgagtttacccttagtatatccctgtatcagctcctagtgaaatcacatgttcaagtgcttaaaatggtttaattcactttctggtcttagatggttttgaaggaattgcaactgaattaaagattcacttgaacctgggaggcggaggttgtagtgagccgagattgtgccactgcactccagcctgggcaacacagcgagactccatctcgaaaaaaaaaaagattcatggcatccatgggcttttactttatatataaacacataattgtttgtaaacttctggagcatgtgagtaacaattcagttgctctgatttcttttgaagactctctgagaattacaaaaaagtctgtcttcttttgcttgagtgccgataattattccatgttcattttttctgaactatgtattgcttataataaactttataagaaatacaattcttatatttaattttacttttccaaatttgcaagtataaattatatttgtcatattgaaaatgtgagtttttgttttttgatgaaagatttaaaaattcattttgcctttttcttaacttttttttttctgataaagaacaatcacatgaggttctctctttattattagtccacagggaatcattgtgaaatggataaaacatgttgcctgagtaggtgtatcagtgaccgatactagatagatagtttattttagtgaagggttagcacagttggctgcttaattattgtttgggcaaagtagtttaaccattcttggatgcataaggctattaggctgctatgatgaaaaagacatttgcttgaggatgtcctgactgtctcatccctttctgttgactttcttcattgtagttgacacacctgtacttcataatcagtgtgaaataagaggctgacttctgttgatagtgtgatggtctttgtcttggtttagtgacaaacattccaggactgtggtattgtgctctgtgagctatgtgatctgtacagagtgactgtcttaagtattttaactgattgccttatgtttctgtgtgagattgtttgtatctgtgtgttttcattttctattgcctaccaaatatagtagttagaaactattccttccggcggggcatggtggctcgcatctataatcctggcactttgagaggctgaggtggatggatcacctgaggtcaggagttcaggatcagcatggccaacatggtgaaaccccatctctactaaaaatgcaaaaaattagctgggcgtggtggtgggcgcctgtaatcctagctgctcaggagactgaggcaggagaatcacttgaacctgggaggtggaggttgcagtgagtggatatcatgccattgcactccagcctgggcaacaagagtgaaactccgtctcaaaaaaaattatgccttctgcatgtggctgattggttattcccatgtatggagatctttaatgatagggtcattagctctgactgcccctaggggaaatgcattctcttattcatctaccatatcaggaatttcacaaaacctgaatgccattgtgtcacatatactaaaaatattttataaactctgtgtttttcttgtaatttttctgaattggctatatgttgtgccatttcagaaaaaaaaatccaagaaaaacacagaattcatggaatatttcacaagtagctcttttaaagtatgttagcattttccttgacttaaatggtcttaaaatttttttgaatgaggaggtatgatgtaccagtaatatgcatatagttgttgtgtatcatagtaatagttaatattactgagcttatgccttgtgctaagtagtggtaagccttcacatgtgtcacttgatcttcccaacaaccctaggagtttatagaaacttgtggctaagagaaggtaaataatttgcccaaggccacacatgtaataagtattagcatctgcttttaaatgtgagtctctgagtatcttcacagccttctttttttctcttttcttttttctttttttttttttttgagatggaatcttgctctgtcacccaggctggagtgcagtggcatgatcccagcttactgcaacctccatctcctgggttcaagcaattctcctgcctcagcctcctcagtagctgagattacgggtgtgcgccaccatgcccagctaatttttgtatttttagtagatacagggtttccctatgttggccaggctggtctcgaactcctgacctcaactgatctgtccaccttcggcctcccaaagtgctgggattacagacatgagtcaccacacctggccagagcctacattctttatcagtgcagcatactttgcacatgtgtgtatgaaaatatatttaaatatatctttgcttctaactcgctaccttgggcaggttatacaacctctctgaaactcaggcttccccatttgtgaaatggaatagtatctgtctctgggttgttgtgacaacttgaggagataagaaatatgtaaattgcctaccataaagtatggtacattgtatatattcacaaaatgttagcaatgatgattagagcccacatttatttcacaaatgattaatcagagtttggaaatttttttttctttaatgcttttgggtcagattttgaacacagcacgaaaacattttggagctggtggaaatcagcggattcgcttcacactgccacctttggtatttgcagcttaccagctggcttttcgatataaagagaattctaaagtggtgagtttacttttaagtatttaggtactttttttcctctttcatcactctgagtgtgtgtgtgtttgttttatattataaaaaatttcaaacgtacaaaaatagacagtggtataataaaatcccattttcgccaactctctatttgttacttatcctgtgctaagtgttcctaacggtgatggtggtggatcacatactgagggatcacgtaaaaagcacttagaaatgcaagattaaagcagtgtgaatttatgctgaaactctttcctaagttctaattcaggttagctttaaaacctaaggagagggcctagcattgcagtcgtttctctctaaaggcatatcattgaataatatgagttgtgggcaactttttatgagcttttttcttcctcaaaatggaaccatggcttgagtcttcacagtgtagttttgaagaaaatacctcaagctcacgtacctgaaagttggacattcaggttaatgttaaggaacaacctcagtaacttaattttgtttgtttgtttgttttgagatagggtctcattctgtcgcccgggctggagtacagtggcgcagtcttagctcactgcaacctccaactcctgggttcaagcgattcttgtgtgtcagcctcctaagtagctgggattacaggtgtgcaccaccatgcccagctaatttttgtatttttagtagagacagggtcttgccatgttgaccagttggtctcgaacttgtggcctcaggtgatcctgctgcctcagcctctcaaagtgctaggattgtaggtgtgaaccactgcatctggcctcagtatggacttgattttctcgtaatagagaaaaaagatgtatgcagtagacctaccagcatgaaacagcagcttttggccaatttttattaggccagcttatcattcactctttaccagcgtttatggataggaatttgtgaatataacaataaaaatagcaaccagcctacattacaaagccatagtaattaaagcagtatggtaatatggtactggcataaaaacagacacatagaccaatggaacagaatagagagtctagaaataaacccacacatatgcaataaactaatctttgataaggacaccaagaatacacaaaggggaaaagaatggtctcttcaataaatagtattgggaaagttggatatccacatgcaaaagaacgcatttggactctcatcttatgccatatataataatgaactcaaaatggattaaagacctgaaaccataaagctcctagaagaaaacatagggaaaaacctccttgtcattggtcaatgattttttggatatgaaaccaaaaacctatgcaactaaagcaaaaataagtttaaaaataagcaaaaaataagtttaaaataagcttaaaataagcaaaaataagtttaaaataagcaaaaaataagcaaaaataagtttaataaactaaaaaccttctgtacaacaaaggaaacaatcagcagagtgaagagacaggcaatggaatgggggagaatatttgcaaactatacatctgaaaagtggtcaatatctaaaatatatatggaatgcaactcaatagcaagcaaatgaataacttgatttaaaaatgagcaaaggatctgaatagacatttttccaaagaagacatacaggtggccaactggtatatgaacagatgttcaacatcatttatcaggaaaatgtaaatcaaaaccactatgagatgtcacctcacatctgtcagaataactgttatcaaaaaaacagaaaatcaagtgttggcaaggatgtagagaaatgggaaccctgtttattattggtgggaatataaattagtatagccattatggaaaacagtatggaggttcctcaaaaaactgaaactagaactaccatgtgaccctgcagtcccacatctagttatgcattcaaaggaaaggaaatcagtatctcaaagagatatctgcactcccatgtttattgcagcattattcacaatggctgagatatggaaacaaccttagtgtccatcgatagatgagtaaagaaattgtgttgtgtatatatgtgtgtgtatatacgtatatatgtgtgtatatgtatgtacgcacatattctctacatagtagaataatactcagctatagaaatgaagaaaatcttgccatttatgacaacagggattaatctggaggacattgttctaagtgaaataagccaaacacagaaaggcaaatactatatgacttcatttatatgtagaattgttttttaagttgaattcatccagcctgggtaatatagcaagacccaatctctattaaaaaataaaaaggccaggtgtgggggctcacgcctgtaatcgcagcactttgggaggccgaagcaggcggttcacctgaggtcgggagtttgagaacagcctgaccaacatggagaaaccccgtctctactgaaaatacaaaattagctgggcgtggtggcgcatgcctgtagtcccagctactcgggagtctgaggcaggagaatcacttgaacccgggacgcagaggttgtggtgagccgagatcgtgccattgcacttcagcctgggcaacaagagtgaaactccgtctaaaaaaaaaaaaaaaaaattaaaaaattagccaggcgtggtggtacatgcctatagtcctagctactcaagaggctagggcagggctgggtgtggtggctcacacctgtcatcctagcactttgggaggccaaggtgggtggatcatttgggatcaggagtttgagaccagcctggccaacatggggaaaccctgtctctactaaaaatacaaaaattagccaggtgtgagggcacatgcctgtaatcccagctacttgggaagctgaggcaggagaatcacttgaacccgggaggcagaggttgcagtaagctgagatcgcgccactgcactccagcctgggtgacaaagtgagactctgtctcaaaaaaaagaggctagggcaggaggacagcttgagcccaggagttggaggctgcagtgagttatgattgtgcttttgcgctccagcctgggtgacagagggagacccagtcactaaaaaatggttgaacttgtgtaagcaaagactagaacagtagttgccaaagaatacaaactttcagttataagataaaaaaattctggggatcaaaacgatttagggcaaataaataaaagtaactagcctttacttatttactagcatttcttactgtgttgtcacccactgtgccaaggtctatgactgccactgtcacttttttttttttttttgagtcaaggtctttgttgcccagactgggatacagtggtatgattacggctcactgcagcttcgaactcttaggctcaagcgatccttccatttcagcctcctgagtagctgggactgcaagcatgtgccaccacactggctaattttttattttttgtagagacagagtctcaccatgttgcctaggctggtctgaaactcttgggctcaagcgatcctcctgcctccttggcctccctaagtgttgggattacaggcatgagccaccatgcccagcctgtcgccatcttttaaaaatgaaaagaactgattgctttaacaagaagaaatttggatagtcaatcatgataaaatatttaacctcgcttgtaattacaacagcgaaccttttaagaaatcaaattggcaaagagaaatgaaaaataaggttcagcaatggcgatggtgtgatgaaaattcattctcatctaatgttggcagtgtgaattactataatacttctaggaagttggcggtgtgtaagtagggtgttaaaatattcaataattttacttccaagtggaattccaagaatttatactaagggaataattagggtctcaataaagcttagtgtatatagaacattcattgtaatattacagattatgtctaaaagggaatagttcaataaattatgccatagccagtctccataatattttctagtcattaaaatgatttcgaattagtatcgggaagattgttaggacaaaataggaaaaattagagctgggtgcagtggctcacgcctgtaatcctagcactttgggaggctgaggcaggcggatcacctgaggtcgggagtttgagaccagcctgaccaatatggagaaaccccgtctctactaaaaatacaaaattagctgggtgtggtggcgcatgcctgtaatcccagctattcggtaggctgaggcaggagaatcacttgaacctgggaggcggaggttgtggcgagctgagatcatgccattgcactccagcctgggcaacaagagggaaactacttctcaaaaaaaaaaaaagaaaagaaaagaaaaattagatacaaattacttgaagtgtgaatcgattttaactctcaagaaaataaggtctagatgcagtggctcacgccagtaatcctagcactttgggaggctgagatgggtggatcacttgaggtcagcagttcaagactagcctggccgataaggtgaaaccccttctctactaaaaatacaaaaaatagcagggcgtggtggcgcgcttgtaatcccagctactcaggaggctgaggcagaagaatggtttgaacccaagaggcagaggtggcagtgagccgagatcgcaccaaagagaaaaaagaaaaccacacacaaaaatgccagttatattacagttacatagaaaaaaagaaaggaagacatttagcatccgaatgttaccagtgattatccgtgggtggtagatttagggatgatgtgtggatgattttgtgtatttttctaattttctccaatttgggaatgtaacttacaaatcagaaaaaacaattatcagccaggtgtgatggctcatgcctgtaatcccaacactttgggaggctgaggcgggaggtttgctcggggccagtagttcaagatcagcctgggcaacagaatgagaccctgtctctacaaaaaaaaaaaaaaaaaaaaaaaaaaaaattagccaggtgtggtgatgcaagcctgtagtcctagctattcgggagtctgaggtgggagcatcacttgaacccaggagttcaaggctgcaatgagctgtgatcacaccactgcactccagctgggtaacagagctgttgaaaaaaaaaaaaggaaagaaaaaacaggttgagtgcagtggctcacgcctgtgatcccagcactttgggaggctgaggcgggcagatcacttgaggtcaggagttaccagcctggccaacttggtgaaaccccgccccacttggtgaaaccccgcccctactaaaaatacaaaattagctgggtgtggtggtgggcacctgtaatcccagctactcgggaggctgaggcaggagaatcacttgaatccaggagacggaggttgcagtgagccaagattgtgccactgcactccagcctgggcaacaagagcaaaactctgtctcaaaaagaaaaaacaaataccaaatacattaacattgcaaaggcaatttaacctcaaatgatgttttgagaagacatcctgcttgatttacttgtttgccctataactgaaacagagaaggaaaatgacaggaaaactgtgcacacaacttacagtattttgttctattaaaatggatatcctggaacaagttaattttgaatttaaggtaacttaaaatgttttttcttgttttaggatgacaaatgggaaaagaaatgccagaagattttttcatttgcccaccagactatcagtgctttgatcaaagcagagctggcagaattgcccttaagactttttcttcaaggagcactagctgctggggaaattggttttgaaaatcatgagacagtcgcatatgaattcatgtcccaggtgatgatctgttctttctgcgttgtcatgtcagctctgctgggttcagttgcttgtttgcaggcatggtggtaatgcacatgaatttactcttcttttactgaatgtgtaactaccaccttcccaccatcatggaacctgttaatattattgttgtaattgactggtgttgatcatttgctgatgaaatctaagatttccaagtgggtcatggtaaaaatgtttcatggaacataaaattcgggaaatgcactcaattcccaaaatccagtttgggaaccctgggttaaacaaagttgaaagaagtttctttattgcaactttttagcgtttttaccatctcagttgtgtcctgtggctctcaagagagggtgcagcatgttctgatatgaaggctgcagaagtctcacaggatggaggtttggtgacaagtactttggaaaatgctcaactagaggatggttggtccttgaaagtcctttctgctttatgttcactaggcattttctctgtatgaagatgaaatcagcgattccaaagcacagctagctgccatcaccttgatcattggcacttttgaaaggatgaagtgcttcagtgaagagaatcacgaacctctgaggactcagtgtgcccttgctgcatccaaacttctaaagaaacctgatcagggccgagctgtgagcacctgtgcacatctcttctggtctggcagaaacacggacaaaaatggggaggaggtaaggtcattcctgactgcatgatagcagacaggatccataacagggatcagttgtcatggccttgtgttctggaggtgaaacatttggggtgcttggaaatctgatgaacaaaattgctttgttttgttaaaaaagagagtctcatcctgtagtgaagcctctgctttgaggatattgtaacatagcaagttcaaaccactacctgtttttaaaaaaatacagctgtatacttcaaaacaagaagaaggagaatgaaaaggatttaaatttgttatgtccctttaaaacacgaaagagccacggtagtgttgtgtttctttgtatgaaaacgagatgtttcattaatctcttcactgtccccctgcccttttattttagcttcacggaggcaagagggtaatggagtgcctaaaaaaagctctaaaaatagcaaatcagtgcatggacccctctctacaagcgcagctttttatagaaattctgaacagatatatctatttttatgaaaaggaaaatgatgcggtaagtgaattagtaaagtgttgttaataaactaatattttcccttcctactcttaggagatttgatatgtacaaaagtttatcattctgatactttaatcactgttcatttgaaaaatgtaaaataatttacagatgtcaaataataggctaatttgtcataatgttctagtttaagataattcctaggctgggcgtggtggctcatgcctgtaatcccagcactttgggaggctgaggcaggcagatcacctgaggtcaggagtttgaaaccagcctggccaacattgtgaaaccccatctctactaaaaatacaaaaattagctaggcgtggtggcaggcgcctgtaatcccagctacttggaagcctaaggcaggagaatcgcttgaacctgggaggtggaggctgcagtgagccaagactgtgccattgcactcctgcctgggcaacaagagtgaaactccgtctcaaaaataataataataataattcctaaacgcagtatccttttagcaatacagttttggtcaagatttgtaagttaaataaaattttgcttgtttttctttttttgacagagtctggctctgtcacccaggctggagtgcagtggcaatctcagctcattgcaacctctgcctcccaggttcaagcaattctcatgcctcagcctcctgaatagctggtattataggcgcccggcaccacgcccagctaatttttgtattattactagagatggggttccaccatgttggccaggctggtctcaaaactcctgacttcaagtgatctgcccacctcagcctcccaaagtgctgggagtacagggatgagccactgagccgagccaattttgcttgttttaaagggttgtttttttttttttttttttgatagtcagtaattgttcaaactaggaattgtatccccatctttcttttttcataattactcaggtaattgatgagtgtaacagaagctcctcaaaacagttttattaaattgcctttcattttttgtggtacgtgcttgatcatgaatttgtacatattcttttgtaggtaacaattcaggttttaaaccagcttatccaaaagattcgagaagacctcccgaatcttgaatccagtgaagaaacagagcagattaacaaacattttcataacacactggagcatttgcgcttgcggcgggaatcaccagaatccgaggggccaatttatgaaggtctcatcctttaaaaaggaaatagctcaccatactcctttccatgtacatccagtgagggttttattacgctaggtttcccttccatagattgtgcctttcagaaatgctgaggtaggtttcccatttcttacctgtgatgtgttttacccagcacctccggacactcaccttcaggaccttaataaaattattcacttggtaagtgttcaagtctttctgatcaccccaagtagcatgactgatctgcaatttaaaattcctgtgatctgtaaaaaaaaaaaaaaaaaaaaacacaaaacccacaagcacttatcttggctactaatgaagctctccttttttttgtttgtttgtttgcttcattgttgattgtgtattttcttcattcctggggagtactaacccaaaagcgtctgtctcttgttttctagtccagtttgagattaatttagaagaaaggaatactgtatgtgaaattcatcttgggctttcccctaaattgcaagataaggccatgtgtaagattttccctaaaactagaatatattaatgcatgtttgagaattttaaagcaccatggtcaaaaccagaagctatattttgcatatttggactcagccatccattaagaacccatgttgtcctctggacatatttatcaatataattgggttttaaatagtataaaagaaaacttgtgatctatataatttatgtatcaccttcattgtaaatttagcaggaaatgcatcacaattatgatttttttttttgcaccagtgaaacaataaagatgctattaacaattttggagctttttttcccctttcatactatctttaattgataaaaagtactagtagtatggctatagagtttaatagtcattctcatatattcacagagctcacttaactctagttttaagcacttgttgaacaaggcagcatctactcttttagtcatttataccccttttctttcctcaactttaccctgcttttcccaaggcatgatgaattcacataaaccccccaaaggctcaccaccgatactagttacctactatataataaaccatcccaaaacttactgtcttaaaacagcaaacatttatctcacaggtctctggatcaggaatttgggagcagcttagctggtggttctggcaaagagtgtggtgtaaggttgcaaacaagatactggttggggctgcagtcatctgatgctttgactggggctgacttttctgctcactgacctggctgttaggcagaggccccagttcctcttcttgagggcagaggccccagttcctctccttgagggcagaggcctaagttcctttccttgagggcagaggccccagttcctctccttgacggcccttccatagagtgtcctcacagcatggtggctggctttcccctgagtatgaaagcaagaaggaaaccacagtgcctttcagtggcctccctgtggaagtgacatgctcatttttgccttattctgtaagtggggagtcactaagtctagcctatattcaagggtaaggagaattaagctccacctcttaaagggaaaatttatagacattttcaaatgactacatcacttaacccctcaccatctgccctcccattgctagcacttgatgactagcccttgctgggctttacatgaacagatgtttcccaaagttataaaattagtaccactaaaatgtatcaaatgttaagccattctgtggtatgtcatagtccagcaaaccctttctgttctttgtaggtgttagtttaccccgtataaacctgattatggcttgacatgtccatattatttacatgttttgtgaaatacaactggaatagtagaaaagacatgagtcaagaacacttgagttggagagcttggtttgcaagtaaggtaatgtcagtacagtgtgtaaattatctcttattttctgggttgaggtaaacccaattttaaaaataataaaccaacaaaagtaaataaaagtgaaacaaaagcactgctagtatccttaacttacagattttttttgttgaacaaaaactgggtaccagatatagttaggcactgaatctaaaggtgaagaagatcatagcctctagcttcaagaacgttagtctgctgtgaagacagacctgtagttacagaagatggtaagggtttgtgcaggagagcagtgaagaagagctttgagggattggggatggggaagttctgcagagggttgtatgaattctcatggaacatcaagtccaatagtttatttagccttctgaggccagtgctttggcctgcagtcccaggctcctcagacccatgggctgaagcaagttatactcttggctgcctgtagtgaaatagatatttagaaattgacttagcatttaaaaccctttatagcaatttgacagagtaattttatgtctattggatgtaataaatatttggctttgtgctttgtg

SEQ ID NO: 6214 - DNA, 5770 bp, Homo sapiens
ttttttttttagattagctttatttgctcaccgtgaagatggacctggaatcccagcggatattaaactttttgatatattttcacagcaggtggctacagtgatacaggtttgtgtagcatttctcctaagttctcaaaactttgaaacttctctgccttccttttacattgtttaaaataaattgtgtggttttctaaacattccagtctagacaagacatgccttcagaggatgttgtatctttacaagtctctctgattaatcttgccatgaaatgttaccctgatcgtgtggactatgttgataaagttctagaaacaacagtggagatattcaataagctcaaccttgaacagtaagtcagttacatttttgtaaaaatcctcaaagatatttttgtcctagatttgcttttctttctcaattgttttttgaactgctggcatttgtcttgttttaatcatgcattaagattgtcatgcttagcactactaggggcagaaagtagtgaccaattacttgtttttttatattaaggaaattgtggtacctatggaccataggcagtcttcagggaccagtgtctccaatttggatccctttctgtgtgtcaggggcatccaatcttttggcttccctgggctgcactggaagaagcattttcttgggccacacataaaatacactaacactaacaatagctgatgagcttaaaaaaaaaatcccaaaaaaactcataatgttttaagaaagtttacgaatttgtgttgggccgcattcaaagccatcctgggctgcatgcggcctgtgggctttgggttggacaagcttgcatgtgactgagtttgttcttaaactggtaaggaaactttgtcaggcagtatttatttccataagtggtgttttcctacgaatcagcacatggtgaaaaatgaggggctatgtatatttaaggtgcagaattaaattggtttaaatatcttttctattttgagctttgattttgataccttaaaggaaatatcaacagtactatttccaacctgaagcctcctcagctgttctgtcctagacttatggcgtcctctagtggccactatgggcagctatgatcctgttaccttccccagcagttcccttcctgccctgttccccactgctctggcttgggtcaagccaggcctgcctcccgccaacatattcttcagaattttacctcatgtaatcttcctcctttctatctcccttccagtggtttacctgcatcaagaaaatttcttctttttttcctccctttgtgttacccttgttcttttggtcatttttggttttgtgtgtgtgcaaactgaaaacaagtccagatgtggaatgataagtgtgagagaaaattaaatgatgtgccaggtgtggtggcttgcacctgtaatcccagctattcaggaggctgaattgggagaatcacttgagtccatgagtttgagaacagcctgggcaacatagcgagaccccgtctctaataaaaaataaaattaaaaataaaaaaaatttaaattaaaaaaactaaatgatgtatctgtgtctttctccccaagtgaattttaaagtaaaaatagacaaagtaattagaaataacaacctctaaagaggttgtaataaatgccccaatatgcctcaatatctacagaatgattttactaacaactacgtaaaagtcagtcagcctgcttttccttaatcaccaacatctgatgcagaagaaatagtttatgtgtttttctgttgtgtcaaattgctggttttgcatggagtttttttcctatttattttcatcatgaatatacaatacttgttggctggcccctgggaaccaaactaccacttaaaatacttcccttagaaatgtcatcaaattctagacagtcatcttaactccagctataccatctgttcatgagttggaaactgtatctagtttgtatcaacagaaaaataatagatgaatatatatttgtgtttagataagcatttttatcctcctgaaaggaggttgttatagtcttctgtggtggtatgattcacttgacccatttcctttaatgtgtaatgaaaaatttcaaattcttatggaacaaatgctatttgtgtatatagaaagttaattttattcattaagacttctgtttttctttttgtagtattgctaccagtagtgcagtttcaaaggaactcaccagacttttgaaaataccagttgacacttacaacaatattttaacagtcttgaaattaaaacattttcacccactctttgagtactttgactacgagtccagaaagagcatgagttgttatgtgcttagtaatgttctggattataacacagaaattgtctctcaagaccaggtaagagaatacctacgtgctattttagggaaacagtgttacaattttagactttggacctagatacctgagatgggaggggagggtaattcaatactaaataaaatttacaagtaactttttcattatataaattaaaaattggagatgtataaagaattataaaacatttataattccaccagatagagaataaccactgttaattaacatttggtgcatatctttccagacttttgtctgtatatgtgtgtatgacatacatgtgtatcgactttctcaccaaaaaaaggaatatcttgttgatactgtattgtaattttataactggaaacacttttgataatggctttgtatgccaatggtttcacctcagtgggtttcttgtgcctcgcatgttacaggtggattccataatgaatttggtatccacgttgattcaagatcagccagatcaacctgtagaagaccctgatccagaagattttgctgatgagcagagccttgtgggccgcttcattcatctgctgcgctctgaggaccctgaccagcagtacttggtatgagtttacccttagtatatccctgtatcagctcctagtgaaatcacatgttcaagtgcttaaaatggtttaattcactttctggtcttagatggttttgaaggaattgcagctgaattaaagattcacttgaacctgggaggcggaggttgtagtgagccgagattgtgccactgcactccagcctgggcaacacagcgagactccatctcgaaaaaaaaaaagattcatggcatccatgggcttttactttatatataaacacataattgtttgtaaacttctggagcatgtgagtaacaattcagttgctctgatttcttttgaagactctctgagaattacaaaaaagtctgtcttcttttgcttgagtgccgataattattccatgttcattttttctgaactatgtattgcttataataaactttataagaaatacaattcttatatttaattttacttttccaaatttgcaagtataaattatatttgtcatattgaaaatgtgagtttttgttttttgatgaaagatttaaaaattcattttgcctttttcttaacttttttttttctgataaagaacaatcacatgaggttctctctttattattagtccacagggaatcattgtgaaatggataaaacatgttgcctgagtaggcgtatcagtgaccgatactagatagatagtttattttagtgaagggttagcacagttggctgcttaattattgtttgggcaaagtagtttaaccattcttggatgcataaggctattaggctgctatgatgaaaaagacatttgcttgaggatgtcctgactgtctcatccctttctgttgactttcttcattgtagttgacacacctgtacttcataatcagtgtgaaataagaggctgacttctgttgatagtgtgatggtctttgtcttggtttagtgacaaacattccaggactgtggtattgtgctctgtgagctatgtgatctgtacagagtgactgtcttaagtattttaactgattgccttatgtttctgtgtgagattgtttgtatctgtgtgttttcattttctattgcctaccaaatatagtagttagaaactattccttccggcggggcatggtggctcgcatctataatcctggcactttgagaggctgaggtggatggatcacctgaggtcaggagttcaggatcagcatggccaacatggtgaaaccccatctctactaaaaatgcaaaaaattagctgggcgtggtggtgggcgcctgtaatcctagctgctcaggagactgaggcaggagaatcacttgaacctgggaggtggaggttgcagtgagtggatatcatgccattgcactccagcctgggcaacaagagtgaaactccgtctcaaaaaaaattatgccttctgcatgtggctgattggttattcccatgtatggagatctttaatgatagggtcattagctctgactgcccctaggggaaatgcattctcttattcatctaccatatcaggaatttcacaaaacctgaatgccattgtgtcacatatactaaaaatattttataaactctgtgtttttcttgtaatttttctgaattggctatatgttgtgccatttcagaaaaaaaaatccaagaaaaacacagaattcatggaatatttcacaagtagctcttttaaagtatgttagcattttccttgacttaaatggtcttaaaatttttttgaatgaggaggtatgatgtaccagtaatatgcatatagttgttgtgtatcatagtaatagttaatattactgagcttatgccttgtgctaagtagtggtaagccttcacatgtgtcacttgatcttcccaacaaccctaggagtttatagaaacttgtggctaagagaaggtaaataatttgcccaaggccacacatgtaataagtattagcatctgcttttaaatgtgagtctctgagtatcttcacagccttctttttttctcttttcttttttctttttttttttttttgagatggaatcttgctctgtcacccaggctggagtgcagtggcatgatcccagcttactgcaacctccatctcctgggttcaagcaattctcctgcctcagcctcctcagtagctgagattacgggtgtgcgccaccatgcccagctaatttttgtatttttagtagatacagggtttccctatgttggccaggctggtctcgaactcctgacctcaactgatctgtccaccttcggcctcccaaagtgctgggattacagacatgagtcaccacacctggccagagcctacattctttatcagtgcagcatactttgcacatgtgtgtatgaaaatatatttaaatatatctttgcttctaactcgctaccttgggcaggttatacaacctctctgaaactcaggcttccccatttgtgaaatggaatagtatctgtctctggggttgttgtgacaacttgaggagataagaaatatgtaaattgcctaccataaagtatggtacttgtatatattcacaaatgttagcatgatgattagagcccacatttatttcacaatgattaatcagagtttggaaatttttttttcttgtaagtgtctttgtgtcgggggtgccatggaggtgttttgggataagccagcctgtgtcaagcgaataacatgtttggagctggtggaaatcagcggattcgcttcacactgccacctttggtatttgcagctaccagctggcttttcgatataaagagaattctaaagtgg

SEQ ID NO: 6215 - DNA, 20272 bp, Homo sapiens
gcgtcacatgaccgcgggaggctacgcgcggggcgggtgctgcttgctgcaggctctggggagtcgccatggtgagtgctgagggggcagtggcacctgggtcgaccctccttgtagcccctgctctctcccaccgccccgcactccagcgagtggagaaggggccccacagaccgttcgggattaagaccagcccgatttggcctgcgggataggggacagcaggaggaaggccgcgggcaggctgatccgggccggggtgggcggcggctcttggctgcggccgttgctgagagacggggcggcctctctgtggggttgacttggcatgtaggctttggggtccatgaaggcctgcggcctcctttaagtggaatcggtcacctgcctaccacgaggggaccggtagtcctaggtctgagcgtctggcccccggggcgcgtggaggccctgagactcggaggtggcgccgggacccgcccagatgttgcgtttctacctttgtgcctagttgtgctcggccgtccccacgccctcctggaggggtcgcagtgattccttggcctttcttggcctcatacccgccttcggctgcagtgtttgtcagcgagttctggggacctgcttacatgaatttcctggaaggactcaggctgtcttctaatcctgacggtcgcaaaggagactgattgtttactttagcatttgtgcattgggcgcaccttgcctcttttgtctcgccattgataaaatccaagtatttgacttgctggaagcagtacttctccttagggcccgtctatgacggcagcaaatcgtggtgtggctgttggccggtaaacttgaacttcctcaaaatgtgaatctttgtgtctggttcccacaaaggcaagttgtcacttgcattttattagcgtttaacatagcctgcactgtgtaaataaattttttgagtatatactgtatgtccgctttaattaccttactcactctgtgtagataggcttctgtaaatctgtaagcctggaaacagatttcactttaaatgtcttaatgccagaaaggattaagtgttttacaaatactattttcatataacgtgttgccgtacaaggtgattttgcctgtttctcaggatttttataattgggaattgatacaagaccggcgcaaaatttaactttaggatttgtgtgtttccagcgtttatggattgacatttatattgttttgtaatggaaaacacttaattgaggatgtattacacactccgattctttgttgggtgaaccagttgggagcaatcagccagacacacagtcttgtcctcatgaattttattgggaaaggaaacttgagtattcgttctttcacagtcactgtctataatttaggcagctcgcttagtcttcttggtgtcgcacttttgcatccgaaagcaagtgttggcggcccctttggcccttcccagccctaaaattccagaatccacttcaattcatcaaacatcttgtgtgccttcagtgtcacggactgtggccctgggtaccaatgtcgaacttaagaggctactgggggagacacgcttgtagaacttaactgtaatacagtgtgtggattgctttactaacattgtcaactcagtgctttggggtcatggagggatagttttgcctggggattttgggaaggactacaggaagtaacgtgaactgagactataaagagggtggaaagaaattctccaggtggaaagaaaaggtattgctaatagatgaagccaaaacgttcagtgtgctccatcagaggattcttggggatatgtattggaaatgaagttagagccgtttggtgttcaaattatattttgaagttgtcatgccctcatcatccttatttctctctacttcagttgtcaatgtatgccatgtcatcatttttaaaatagttctttcattaacgtgatattctgtacctttgtttgaagaaatgagcgttacatttggtttacattgtactgtcagattacatctacagcatataagcagggaggttgaaccacaataggtttctaacataagtggagataattatttgtatctaaactgaataataattatagcacttattaagtgcttattgctaagtagtaggcacgttttgagctttggtttcatttgttcttcataacagtggtgtactctcatctctgtttcatagaagaggaaagaaaagcacattgtttcagtggagagtagttttccaagtgatcagttcatgatctttgctttgctctgcacattagaactgtagacttgagagggctgtttgtgggtctcaagctaaaatgggactaatcacaaatgttaatttgattcccattctgtagggtttccattttcttctgattcatgtagctgtgaagtacggtcatttacaaatggaaaaccactttcatgattgaggaaacattggttaattggcttgtgtttaatgatagcgtgctcatattataactgttaaggctctatgtgacacttcatagtaaggcatcaagaatagcccttataatagctgttgctagcataactacactgttttatgagtaatatataaaaatagattgctttactatagctttatgtcttcacttgtagcttactttgtaataagtcatattctgtaatcttcaacattttgtatttacatttctattttaagctgagttgagacaaaatagaagaattttcctaaaattgcattcttttgtttacacatctctaaatctttctagtcattctatacaaatgtttttggaactgattgtatcctctttgtagccacagtttcatttgctatataataaaaattatcatacacaacagccaaaaggtggaaacaacccatatgtccatggataaacaaaatgtagtgtgtgtgtatatatatagatatataatgaaatacttcgtttttaaaaggagggaaattctggcacatactgcaacatggatgaacattgaagatattatggtcagtgaaataagcgagacataaaagtaaaaatattgtatgatttcacttaaatgaagtatatagagtagtcaaactcagagaaaagaaggtagaattgcctgggggttcggaatgggagtttaatggctacagtttctatttgcatttgtaaagataaaaagttttagagatagatggtggtaattgtattaatgtgaatgtacctaatgccactgaactgtacatttaaatgttaaaatggtaaattttaggtacattttaccacaacaagaagtcatttttaattaaaaatatccagatgtatcataaagaaaaataaaaaaaattcagatgtatcactgtttatctctaaatggatcaattgaacttaatgaaatccattgattcaaattattattaaatctattgcgtccagaggtaaggagccaaaaaattccaaatgatggcctggtttcactaaagttcagagaagactagcccatgatgaatagtaaatttcattaagtcagagtctttaaatgctggtgtcatccttgcctctgaaaccagcattttatggtaatagttccactgggttaaattcatgttccctttaagtgaagtttaaaagatacctaacttcttctttgaaatttgtttgtgcttctgaggaagagtgcttgcagcagagctcagtttactagagtttttcatagggaaaaaaagggagatgcatggtgttgttcattattcagttaatatttttctctttccaaagttagaacaagagaaagttttcaatttttataagctatgctagttcagaagtgggttttatgttatcaagtttctttgttaatctcaaaatgaaatgttgttttgcttttcttagataatgaaacagaccagattttacttgcaggttgatgtgtaagtccttgccttccacctcttcaactcattgtgtgagaggcattttgtctttagtcattgttttaaaaaataaaagtgaaatgacataacaaaaaattaaccattttaaagtgaacaatttataaagtggcatttagtatgctcacaatactgtacaatcaccacctttggtttcaaaacattttccctacccctaaaagaaagccagtgcccattaagtgattattcccctcagcctctctcctggtaatcatcagtctactttctgttcctatacagaatatttcatattagaggaatcatacaatatgtggctttttatgtctagcttctttcatttagcatgatgttttctaggtttgtttatgtagcaatacttcattccttttcatggttgaataatattctgtaattgtatgtatataccacaacttgtttattcatccattaattattcagtctttttttgttaaatatctaaacattctaaaaccagtgtattcatttatgcagtgaacatttgtggagcatattatgtatcaagcagtgtgttggatcccaaggatgtaaaaatgaccgtcatttataataataatgtgatacatgctgtggtggagatgtaaacagtgtttatatgacttgaagaagtggttaattctttttggcatggagattgaattcattttgcaagcagatttttgctgatggcaaagagaagagtgtctagatatattttgtccactgtagctgtagatcagtatatctgaaatggtgtaagctatttgaggacagtgctctttattgttttctactgtaagtcactaacaattttggctgttttatttctagactgtttagtcttttgttaaatattgccaaggaggggctggtcactgttctcgtaaactagttccttagtctgtcttaagaatagactgaaatgcagatgataagtagtctagaggaaaagagaggctttagagattggtttcggctatacctatcacaagatttcgattggtcagatggctatgtctgggttggattcagagtgtgttagcagaacacagccatgaactaccactgcaagtttctttgaggccagcctactttctgagagagaggcaattctttgtacacatactattctcctttgtcagtcttattctgttaacttcagcgataaggcatgactctgtgtgcagcagctgttaataattggtaaatgggctgggtgcggtggctcatgcctataatccaagcactttgggaggtcgaggcaggcgaatcacgaggtcaggagatggagactatcctggctaacatggtgaaaccccgtctctactaaaaatagaaaaaaaattagccgggtgtggtgatgggcgcttgtagtcccagctacttaggaggctgaggcaggagaatggcttgaacccgggaggcggagcttgccatgagccgagatggcaccactgcactccagcctgggcgacagagctagactccgtctcaaaaaaaaaatttggtaaatgggtttgaggtatagagctggacattgttggagaaggactatggctagaactatagaaataacgtacttgctagaagaatgtgcttgagacatcagtggaattttttatttttcagcctacaacacagcagtcccctcaggatgagcaggaaaagctcttggatgaagccatacaggctgtgaaggtccagtcattccaaatgaagagatgcctggtaagaatggagatgtgggaggcacagttgcagttcgtgtgttcctaaggaagcatgtgcagtgtcttctagagtcaggtgtttctggtaaatctaatcttcaccgtttaccagcatctatcttcagtctcatctccctcaagcactttgtggagcaatttcaacaaagagccctgtttactcacatgtatatttatggtttgggattgtctgtcttccctactagaatacaagctcataagaataagagacccttccttttatttacacattactgtattattaccacaccagtgtctgaccagaattactagcctccttggttctatacctcagacctgaggaatatttaacatataataggtactcagtaaatatttgttgaatgaatggatttaaatgctttgcatttgaattattcagctttttttctaaatatcttgaaaactttaatttctttgctgaatagatatatttattgtagaagctagcttaaaaattatacttaacacttatttacatatttttatattctaaaagataaagtaagagataatctgtgtagatacttttgattctctggattaaaatgtaaggaattgagccaaattggttagtactttaaactataaattactgtgatgaagatgatgctattttacctttgtaaaatgtcttactgtgctttctaaagcatagtaatatgctcttgtgtcttttattggtttaattcctaacaaattgggaatgaaaaataaatgtcttggaatggagaagctgggtttgctattgcttgcttctttctcttcctgtgtatggatagtgtttcctctatctcaaggaattgcttgcatttctgagttaagtggaacatatgggcattgtgagggcttgaagaatgcaagaggaaagcaaacttacatggatagtcatttcagacagctctgaagagtctttaacccatgacaaagccatgtcaggatagtatcttccttcacctgaatcagtatgccagttctcttgattgcaggtaaaatgtgatgaatggagctagtttcctagtctctatagattgaaaagattagcattctatcaagaagcttgcagtcttagctatgttaagtcttactaagaatcatgtatctttttctttttcagtagagacggcaaggtgaaccgatctaagttgtttttttaatgtggttaaaatcatttaagtgcggtattcttttaaaactatgtaacaagtccttgatgtaaagaatttgtacaaccaagataaatgtttatttaaattaagcattctcatctattctcttggtatttctgtaggacaaaaacaagcttatggatgctctaaaacatgcttctaatatgcttggtgaactccggacttctatgttatcaccaaagagttactatgaactttgtatcttttgaatgttgaagactaaacatttggaccatacctttttcttgataaggcctattttgtttgttctttatgaagtttttctggagttatcttattcttcgttatctgagtcacatggcactccttctccatgcagatgtgctaagtgagaaaaacactttgagagtactcctttcctatgcttaaacatctttaaatgtgttgtcggtgcatctcaattttcagacccttcatgaggatatttaggctatgacacagttggttctttaatacttagattttgttatgcagcagtctcaaatggacaggaatttaatcatttgccatttcaaaacccattagcagtctgacaggtaaccattgtatttactgctttgcttgaccacacatgctttaaaacccttattttaaagtaagaaaagtccggctaaaattcatccttcgcttgaacactttcttaaaggactaaaacttaagatgtctgcccagtagttagtaatgactccaacaagtttcaaagttttgtttaggttggcttatttttatttttagtccttaatcataattaaaagatatggccatttctgatgaactgcactacttggaggtctacctgacagatgagtttgctaaaggaaggaaagtggcagatctctacgaacttgtacagtatgctggaaacattatcccaaggctgtaagtaattacaaatcagagaacttttgtgtctgtatttctcactatatgttacgtcttttatgattatcagcttaagaaaaagttttaagggtaacttcttaacaaattgagatgaacattttggtagatattctcttacttgttttagagtaactagatttacgttttatgtagatatttgaggaattttggaaatagaaaaaatggacatgcttgctattttttttaatgtcttgactattagaaaaattaatataattgttctcttcctaatatgtttaaaggtaatatctatgttgtatatatacagtgtgtgtgtgtgtgtgtgtgtgtgtgtgtgtatagtttttttagaggtcagtcagtggttatattttaaatgagatattttccttgtcatgcgggagaaaacaacatggttcctgtcttgtttatttaatgttttgttcagtgtgtttggaaataaattcttgatttgaatattttatttctaatcagcatttcttcataattttcctagttaccttttgatcacagttggagttgtatatgtcaagtcatttcctcagtccaggaaggatattttgaaagatttggtagaaatgtgccgtggtgtgcaacatcccttgaggggtctgtttcttcgaaattaccttcttcagtgtaccagaaatatcttacctgatgaaggagagccaacagagtaagtgattttctttcttaattttgttgcaatatttctttcattgtagaatgtataaaagtgtggaaacatatacagaaacaaagtgtgaataattcttccacccagtcagccatttaggtagcatttgtatatagatttcctttgtaatatagaactcctcagtatatgtggtatcatctaaaatgtactcttatgcaaattttatctttggattgttaggacctgcttttttcatttaatgtaattttttctactacattaaatcttctttgaaaataaaacttttttaagagagttgtatttggaaattgaatttgtaatgaaataataaagtgtgagccagctggatttcataattgttcctttagtgtctatcagtttttataatttatagactgctagttaccttggaatataagtgatttgaattatctgttacgagttagctattaactccagagaaggaaaaataaaagccattcagagacactcctgtctcttgtgttatcagtattctagcatcaaagtctactgtacttttatcccacagcaggggcagatggtcagccaactgtggtcttcagtggggtgagctgttcacatgacaggtccccagattaaagaacttcattccttttttaaaaagtttattcatttattttctttctttttttaatttttaatcttttttcagtttgccccaacagattttgtttttttctttttaatattttcatttatttctaaggtttttaatatatcatttatttctaatgttttttaatatatctgcatcaatttcttttaaaacagtacagaaaagataaaacatttaacaatgtagagaaattgatgaagttacttgctttattatgttttgagtgtccgttttgagcatttaattaggcaatcaataacaatttttgaaaggtactgaggtctccatcctaggagacgtagaaaaataaagcaggaaatccatggtctcttccctcacaaagcttacattccaattaaaaacaaaatattcaacagtaaaatgatgtagttagcagtacaccataagtgttacattttttagccttttgtttttgtttttggtttgtggggatggggtctcattatgttgcccaggccagttttaaactcctggcctaaagcgatcttcctgccttggcctcccaaagcactggattacggacatgagccaccatgcccatccttctagcctttttcaattaaggaagttgccataagagcaagtccagttggcccaggatgaggagttggggaaagtaatttgccctttaaatttatactgtcctctccatggtactttttaccctagagtctgttccctttgaaatttaacactaagccaatgaagttgaaagtgattttttataaagcattggtgtactatagagataagtaggaaatacacaaaggagaaggatagtagtaagttggtcctgtaaatactgtgtaaagacttttctgtttctttgcagtgaagaaacaactggtgacatcagtgattccatggattttgtactgctcaactttgcagaaatgaacaagctctgggtgcgaatgcagcatcagggacatagccgagatagagaaaaaagagaacgagaaagacaagaactgagaattttagtgggaacaaatttggtgcgcctcagtcagttggaaggtgtaaatgtggaacgttacaaacaggtttatatatttttgttacctcttcttatgttcagagataaactgaaatctgatttttaaaatcagaatatttttgttatacaatagtacattgaaaaacatcttaaaatggctgttattgaagaagacttaaacggaaagatatatatgcagtgtttgtggattggaagacttaatattgtcaaaatagcatttaaaaagaattgatttatagatccaatgtaatctcagtcaaaatcccagcagacttttgtagaaattaagaagctgattctaaagtttatatgaagaaacaaagaacctggaacagctacaacgaatttgaaaaggaagaacaagttgaaagacccaagcaacctgaattaatgatttactctaaagctgcagtgagatcctgtgtggtattggtgaaaaggatagacacacaaatcaatggaggggaataaaacagggaatggcaaactttacctgtgagggaccagataataaatggtttttggctttgtaagacatgtgctgtacaacaagcttgtccaacctgcagcccaggacagccttgaatatggcccaacataagtttgtaaactttaaaacatgagattttttgcttttttttttttttttttttttttttttaaagctcatcagctaagtgtattttatgtatggcccaagacaattctaattcttcttcaagccaaaagattggacaccctagtctacaactaataacagtgcagatatggtgcaaaagcacccacaggcaatatggaagtgaatgggcatggctgtgttctagtaaaactttatttgtaaaaacaagcagcagctcagtttaccgatctctgactggacaatccataatagacccagatatttatgatcagttatttttgataaaagtacaaaggcaaccttttcagcaagtgattctggaacaattggatgtttatatgcaaacaaaaaaccctgaaccttgacccatccctcataccatatagaaaaaacacagaaatcaatcagagacctaaatatagaacctaataatgttagaagaaaacacagaggaaatctttatgacctaggattagacaaagatttctgaggatatacaagcacaagccatgaagaaaaaagctcacttttgagaggccaaggcagatggatcacttgagtccaggagtttgagacaggcctgggcaacatagggagaccccatctctacaaaaattaccaaaattagctgggcatggtggaacgtacctgtagtcccagcactcaggaggcttgaggtgggaggatgacttgagcctaggaggtggatgttgcattgagtggagattgtgccacttcactccagcctgggcaaccgaacaagaccttgtctcaaaaagaaaaaagcttttaaagtttagaagtgaagtcttggtgagaaaaatctcaaatacgattttcaagttagtagttcaaatgcgttactagaggaatagcttaagattttgaaaacagattttaacccttatgtgtgttttttctcttttagattgttttgactggcatattggagcaagttgtaaactgtagggatgctttggctcaagaatatctcatggagtgtattattcaggtagctgggaacatttcatttttttttaaacgacctattttatctttcattaaatttaattgttttgaaaaaattttgatggaataggaaataagctttcctgaataaagagttttccttgcggggtgtggtgactcacacctgtaatctcagcagtttgggagttcaaggtgggaggatctcttgaggccaggagttcaaaaccagcctgggcaacatagcacgatgccgtttctataaaaaattaaaaaaatttttttagtgtttcttttttttttcatgtaatcttgcttcttctaaaaataatttaaaaataggaattttctgtttctaacttataccttggtctttgtatcaatgtggtttgttttcctccaaaatgtaggaatgagtaatctgagttttctaggtctctgtagctttagtttaattgtaggtgcactttgtttattggaatatttctgtctgagcttatgtttagtagagaggttcaaaagtaatgtgtttgaatttagttgtataagaatacagtgtttttttcccacaaatgtgaactttaccatatgtgagtccagaatattacgtgaaatacttttatttgtattgatcatttgattttcaggttttccctgatgaatttcacctccagactttgaatccttttcttcgggcctgtgctgagttacaccagaatgtaaatgtgaagaacataatcattgctttaattgataggtaagaccttccaacactggcggataaatgctctgacttgggaataatgaattttaaacatttttttgaattatttgtttctgttacatctttatcataccaatgatcttaatttaattatactataaataatttagctttgtgagtatgagtactaggtacttgtctaggttagacatgaaagaggcttaacttaaatgtgcaggagacgtgaagataatgaatatctttattctgtgtgcttaattgacatttaaagatgttgtacagacttattttttaaatcatacaaatccaaagatcatattgaagaacaaaatttgttttttaccatgatgtaagtatcttgcagtgggaactcatttgatttagagtagccgtaagatactgatgattgaaaatgttcaagtaatcactctatcatcacattttcttaaagaaaaaattttaagtatcaaatatgtttagtacatccacttttttattttcttaggtttttttttttttttttttttttgagacagatcctcactcttgtcacccaagctagagtgcagtgacgctgtctcggctcactgcaacctctgactcctaggttcaagtgattctagtgtctcagcctccggagtagctgggattacagacatgcaccaacaagcccagctaatttttgtatttttagtagagacagggttttgccaggttggctaggctagtctcaaactcctgagctcaaatgatctgcctgcctcagcttcccaaagtgctgggattacagacatgagccactgcgcttggccaatgggtggcttttttgcagccatgttatgtagtagtatatgatgtctgtcctacacttgtaagcattgtcatgaaaccagaaacctaagagaagatttatttctgcagataccttttgtatgttttttaaaaaactaagttattagttttaaagtctgagaatttagataacaaatttttccaaattgtcagctcaatcctgggcagcaaaaattccatacttattgggcccactcttaaaggaagctagtaactggattttcctgagttgcctgtaatgtcacttacacatctctgtcagtagtgatgcttctgggcatagcaaaatgtggatgtagttgtgactgacaaacagataatgataatgaaacatactattttgagtaatttaagatgtgggaaataaaagttaattttatgaattttagacttagttgtatttcaagctttagtaaaaatgcagtatcttaaaatagtctatgtacttttattttttaaaggttatttatttaaatcatggttgttgaatacatttgtcactttaatgcatttctgtccatatctgcttaattatgcttcaaagagttgagagaattatcttgttgaaaatctacttaatatggtgtgaaataagaatgctgatgaaaaaggtttcattggcaaaactgtttagttaaaaatgaattgaggaggccgggtgcagtggctcacatctgtattcccagcactttgggaggccaaggagggaggcttgcttgagtccaggtcagtaccaccctgggcaacatggtgaaaccccatcactacagaaaacacaaaaattagctgggtatggtggcacatgctgttagccccagctactcaggaggctgaggtggaaggaggatagcctgagctcagcaggtggaggtttcattgagtggagagtgcgtgactgcactccagcctgggcgacagagcgagactctgtctcaaaacaaaacaaaacaaaacaaaaaaaacaaaaaccttttgggctcatacaaaatatagaaaagcaataaagaataagatgtcatccatgatctcactacccaaaccctgtatcttttaaaataaaggggtgttttttttttttttagattagctttatttgctcaccgtgaagatggacctggaatcccagcggatattaaactttttgatatattttcacagcaggtggctacagtgatacaggtttgtgtagcatttctcctaagttctcaaaactttgaaacttctctgccttccttttacaattgtttaaaataaattgtgtggttttctaaacattccagtctagacaagacatgccttcagaggatgttgtatctttacaagtctctctgattaatcttgccatgaaatgttaccctgatcgtgtggactatgttgataaagttctagaaacaacagtggagatattcaataagctcaaccttgaacagtaagtcagttacatttttgtaaaaatcctcaaagatatttttgtcctagatttgcttttctttctcaattgttttttgaactgctggcatttgtcttgttttaatcatgcattaagattgtcatgcttagcactactaggggcagaaagtagtgaccaattacttgtttttttatattaaggaaattgtggtacctatggaccataggcagtcttcagggaccagtgtctccaatttggatccctttctgtgtgtcaggggcatccaatcttttggcttccctgggctgcactggaagaagcattttcttgggccacacataaaatacactaacactaacaatagctgatgagcttaaaaaaaaaatcccaaaaaaactcataatgttttaagaaagtttacgaatttgtgttgggccgcattcaaagccatcctgggctgcatgcggcctgtgggctttgggttggacaagcttgcatgtgactgagtttgttcttaaactggtaaggaaactttgtcaggcagtatttatttccataagtggtgttttcctacgaatcagcacatggtgaaaaatgaggggctatgtatatttaaggtgcagaattaaattggtttaaatatcttttctattttgagctttgattttgataccttaaaggaaatatcaacagtactatttccaacctgaagcctcctcagctgttctgtcctagacttatggcgtcctctagtggccactatgggcagctatgatcctgttaccttccccagcagttcccttcctgccctgttccccactgctctggcttgggtcaagccaggcctgcctcccgccaacatattcttcagaattttacctcatgtaatcttcctcctttctatctcccttccagtggtttacctgcatcaagaaaatttcttctttttttcctccctttgtgttacccttgttcttttggtcatttttggttttgtgtgtgtgcaaactgaaaacaagtccagatgtggaatgataagtgtgagagaaaattaaatgatgtgccaggtgtggtggcttgcacctgtaatcccagctattcaggaggctgaattgggagaatcacttgagtccatgagtttgagaacagcctgggcaacatagcgagaccccgtctctaataaaaaataaaattaaaaataaaaaaaatttaaattaaaaaaactaaatgatgtatctgtgtctttctccccaagtgaattttaaagtaaaaatagacaaagtaattagaaataacaacctctaaagaggttgtaataaatgccccaatatgcctcaatatctacagaatgattttactaacaactacgtaaaagtcagtcagcctgcttttccttaatcaccaacatctgatgcagaagaaatagtttatgtgtttttctgttgtgtcaaattgctggttttgcatggagtttttttcctatttattttcatcatgaatatacaatacttgttggctggcccctgggaaccaaactaccacttaaaatacttcccttagaaatgtcatcaaattctagacagtcatcttaactccagctataccatctgttcatgagttggaaactgtatctagttttgtatcaacagaaaaataatagatgaatatatatttgtgtttagataagcatttttatcctcctgaaaggaggttgttatagtcttctgtggtggtatgattcacttgacccatttcctttaatgtgtaatgaaaaatttcaaattcttatggaacaaatgctatttgtgtatatagaaagttaattttattcattaagacttctgtttttctttttgtagtattgctaccagtagtgcagtttcaaaggaactcaccagacttttgaaaataccagttgacacttacaacaatattttaacagtcttgaaattaaaacattttcacccactctttgagtactttgactacgagtccagaaagagcatgagttgttatgtgcttagtaatgttctggattataacacagaaattgtctctcaagaccaggtaagagaatacctacgtgctattttagggaaacagtgttacaattttagactttggacctagatacctgagatgggaggggagggtaattcaatactaaataaaatttacaagtaactttttcattatataaattaaaaattggagatgtataaagaattataaaacatttataattccaccagatagagaataaccactgttaattaacatttggtgcatatctttccagacttttgtctgtatatgtgtgtatgacatacatgtgtatcgactttctcaccaaaaaaaggaatatcttgttgatactgtattgtaattttataactggaaacacttttgataatggctttgtatgccaatggtttcacctcagtgggtttcttgtgcctcgcatgttacaggtggattccataatgaatttggtatccacgttgattcaagatcagccagatcaacctgtagaagaccctgatccagaagattttgctgatgagcagagccttgtgggccgcttcattcatctgctgcgctctgaggaccctgaccagcagtacttggtatgagtttacccttagtatatccctgtatcagctcctagtgaaatcacatgttcaagtgcttaaaatggtttaattcactttctggtcttagatggttttgaaggaattgcaactgaattaaagattcacttgaacctgggaggcggaggttgtagtgagccgagattgtgccactgcactccagcctgggcaacacagcgagactccatctcgaaaaaaaaaaagattcatggcatccatgggcttttactttatatataaacacataattgtttgtaaacttctggagcatgtgagtaacaattcagttgctctgatttcttttgaagactctctgagaattacaaaaaagtctgtcttcttttgcttgagtgccgataattattccatgttcattttttctgaactatgtattgcttataataaactttataagaaatacaattcttatatttaattttacttttccaaatttgcaagtataaattatatttgtcatattgaaaatgtgagtttttgttttttgatgaaagatttaaaaattcattttgcctttttcttaacttttttttttctgataaagaacaatcacatgaggttctctctttattattagtccacagggaatcattgtgaaatggataaaacatgttgcctgagtaggtgtatcagtgaccgatactagatagatagtttattttagtgaagggttagcacagttggctgcttaattattgtttgggcaaagtagtttaaccattcttggatgcataaggctattaggctgctatgatgaaaaagacatttgcttgaggatgtcctgactgtctcatccctttctgttgactttcttcattgtagttgacacacctgtacttcataatcagtgtgaaataagaggctgacttctgttgatagtgtgatggtctttgtcttggtttagtgacaaacattccaggactgtggtattgtgctctgtgagctatgtgatctgtacagagtgactgtcttaagtattttaactgattgccttatgtttctgtgtgagattgtttgtatctgtgtgttttcattttctattgcctaccaaatatagtagttagaaactattccttccggcggggcatggtggctcgcatctataatcctggcactttgagaggctgaggtggatggatcacctgaggtcaggagttcaggatcagcatggccaacatggtgaaaccccatctctactaaaaatgcaaaaaattagctgggcgtggtggtgggcgcctgtaatcctagctgctcaggagactgaggcaggagaatcacttgaacctgggaggtggaggttgcagtgagtggatatcatgccattgcactccagcctgggcaacaagagtgaaactccgtctcaaaaaaaattatgccttctgcatgtggctgattggttattcccatgtatggagatctttaatgatagggtcattagctctgactgcccctaggggaaatgcattctcttattcatctaccatatcaggaatttcacaaaacctgaatgccattgtgtcacatatactaaaaatattttataaactctgtgtttttcttgtaatttttctgaattggctatatgttgtgccatttcagaaaaaaaaatccaagaaaaacacagaattcatggaatatttcacaagtagctcttttaaagtatgttagcattttccttgacttaaatggtcttaaaatttttttgaatgaggaggtatgatgtaccagtaatatgcatatagttgttgtgtatcatagtaatagttaatattactgagcttatgccttgtgctaagtagtggtaagccttcacatgtgtcacttgatcttcccaacaaccctaggagtttatagaaacttgtggctaagagaaggtaaataatttgcccaaggccacacatgtaataagtattagcatctgcttttaaatgtgagtctctgagtatcttcacagccttctttttttctcttttcttttttctttttttttttttttgagatggaatcttgctctgtcacccaggctggagtgcagtggcatgatcccagcttactgcaacctccatctcctgggttcaagcaattctcctgcctcagcctcctcagtagctgagattacgggtgtgcgccaccatgcccagctaatttttgtatttttagtagatacagggtttccctatgttggccaggctggtctcgaactcctgacctcaactgatctgtccaccttcggcctcccaaagtgctgggattacagacatgagtcaccacacctggccagagcctacattctttatcagtgcagcatactttgcacatgtgtgtatgaaaatatatttaaatatatctttgcttctaactcgctaccttgggcaggttatacaacctctctgaaactcaggcttccccatttgtgaaatggaatagtatctgtctctgggttgttgtgacaacttgaggagataagaaatatgtaaattgcctaccataaagtatggtacattgtatatattcacaaaatgttagcaatgatgattagagcccacatttatttcacaaatgattaatcagagtttggaaatttttttttctttaatgcttttgggtcagattttgaacacagcacgaaaacattttggagctggtggaaatcagcggattcgcttcacactgccacctttggtatttgcagcttaccagctggcttttcgatataaagagaattctaaagtgg

SEQ ID NO: 6216 - DNA, 538 bp, Homo sapiens
atgataatgaaacatactattttgagtaatttaagatgtgggaaataaaagttaattttatgaattttagacttagttgtatttcaagctttagtaaaaatgcagtatcttaaaatagtctatgtacttttattttttaaaggttatttatttaaatcatggttgttgaatacatttgtcactttaatgcatttctgtccatatctgcttaattatgcttcaaagagttgagagaattatcttgttgaaaatctacttaatatggtgtgaaataagaatgctgatgaaaaaggtttcattggcaaaactgtttagttaaaaatgaattgaggaggccgggtgcagtggctcacatctgtattcccagcactttgggaggccaaggagggaggcttgcttgagtccaggtcagttaccaccctgggcaacatggtgaaaccccatcactacagaaaacacaaaaattagctgggtatggtggcacatgctgttagccccagctactcaggaggctgaggtggaaggaggatagcctgag
